United States Patent Application Publication US 2007/0059710 A1 - sequence listing, part 4

SEQ ID NO: 9911 - DNA, 148037 bp, Homo sapiens
  misc_feature (86551)..(86570): n is a, c, g, or t
cagtattcattttcataattgtaaaaactaaaaaaaaaaaacaaaaaaaacccaaaaagctagaaacaacccagacatccaaccacaagagaatggattaakacattgtggtctttgtacccagtggcatattaaactacttaaaaatgaatgaatcacagccaygctcaacaggaatgaacgtttgaaacaattctgtattgagtgagaaaattttgagaaaagatgcttccaaccccttccctgatcacactccgtcctttgctctgtgctatgttccaacagtctgaatccaacagactgctgcactagggtcttcctgcagctgagctccagccagattctcccaacaggagacaccagcagggcaaaagagagcctggagtatctctcccctgctagagctgtgccggcagtggctgcacggctgtggctcccagtggacctcctcagccagtgacctagtgacccagctctcagggcacaggtgttctccctggctccatcaggcctagggtggtcatggctttccacagctgctcatccctgggagcttcaattgcacctggttggtttccttaactttggccacaacttgcagtttcttcaatacaatctcttcctttgaagcataagaatgaacttttgttttcaagctgacacaatctacatatgaatgatccccagtacagtggcaccatcatagctcaccgcagcctcgacctcccaggctcaagtgatcctcctgtctcagcctcccgagtagctggcactgcaggtgcaggtcaccagcctggatacattttttgttttgtttttaattttttgtgtagatgggctcttgctatgttgcccaggttggtctccaaatcctgacctcaagcagtcctcctcctgccttgctctcccaatgcgctgcaaatacaggcttgagccactgcacctagctgattccatttttaccaaactcaaaaccaaggaagctaaacaatgttataagggaatcctacatatctagtaaaactactcataaaaagcaaagcgagattctgatatacataaagttcaggccagtggatgcctctggggaccagcaggggagtgctatagaaagggcagcttcagtcgggcgcagtggctcacgcttgtaatcccagcactttgggaggcggaggtgggcagatcacctgaggtcaggagttcaagaccagcctagccaacatggtgaaaccctgtctctactaaaaatacaaaaattagctgggtgtggtggcacacacctgtcatcccagctacttgggaggctgaggcaygaaaactgcttgaacccaggaggcggaggttgcagtgagccaagatcacgccactgcactccagcctgggtgactgagcgagactccgtctcaaaaaacaaaaaacaaaagaaagggcagaagggcagcttcaatgatgttgatgatgttttaattcttacatcagatgctggcttcaaagcaatttattttaatattgagtgtaataccttacatctacattacatatattattttggccaggagtggtggctcacacctgtaatcccagcactttgggaggcagaggctggaggatcacttgaggccaagagtttgaaaccagactggtcaacatagcaagaccccttctcctcaaaagaaaaattaataaattaaccaggtgtggtggcacacacttgtagccccagctgcttgggaggctgaggtgggaggatggcaaaagcccaggagtttgaggctgcaaagagctgtgatcacaccactgcactctagcctaggtgacagagcaagaccgtctcaaacaaacaaataaaaaataaatacattacaaaatactaaatacattacaaaataatacatgtaaaaaaatacattacaaaataataaacaaaaacaaaattaaaaatacattacacatatgcttttatatgaatgaattttaaaagttaaaaaagtatgagggggtccaggcgcggtggcttatgcctataatcccagtactttgggaggccgagatgggtggatcacctgaggtcaggagtttgagaccagcctggccaacatggtgaaaccccatctctgttaaaattacaaaaattagccgggcgtggtggtgggcgcctgcaatcccagctactcgggaggctgaggcaggagaatcacttgaacccaggaggtataggttgtagtgagccgagatcagcgaaactctgtctcaaaaaaaaaaaaaaaaamaaaaacaatytcacaagcacaggactgaaatgaacctcatagcataatgctaggcaataaagcatttggtaaagctgagaggcaggagaaaagccctttgacaaatctctaggttatttgattcctgaaatttccaactcattgctattttaaagtcaggtttaccgaagtgtaatttacatacaataaaattctctctttttagtaaacaggtcgatgagttttgacaaacayatcgatgtcatcacagtcaagatatggaatatttcaattaccccaaaacattatttgaaactactttgtactcagcccctccttccacctccagcccctggccagcactggtccgttctctgtccctagagtttcgcctttgtaaaaatgtcacgtatatggaatgattatgtgtgtagcctgctgagcctggcttctgtgacatagcatgctgcttttgagagtcatccaagttgctgtgtgtatcatgggttcattctattatagagcagcattgccttatgtggatgtaccacaatttatttatccattcacaagttaaagaacattttgattgcttccaatttttgatgatttcatgactaagacccttacaaataaatattcatatataggtttttgttaaaagacgtattttcatattttcccacttagaagtgaactatgtatgggtcctgtttcatgtaggaaatatgggcccacctgtatgagtgaagtatatgtgaaaccccgtctgtactaaaaatacaaaaattagccaggcttgtaatcccagctactcgggaggctgaggcaggagaatcgcttgagcccgggaggcagaggttgcagtgaggcgagatcgtgccactgtattccagcccagccaacagagcaagactctgtctcaaaaaaaaaaaaaaaaaaaaaaaaaagagagasagataaggatccacctcctgtgatccaattacctcccaccaggctccayctgcaacactggggattacaactgaacatgaaatttgggtgggaggctgggtgcagtggctcacacctgtaatcccagcactgtgggaggctgaggcaggtggatcacctgaggtcaggagctgaccaactcctgagcctgaccaatatggtgaaaccccgtctctactaaaaatacaaaattagccaggcgtggtggtgcatgtctgtaatcccagctactcgggaggctgaggcaggagaatcgcttgaacccgggaggcggaggttgcagtgagctgagatcgcgccattgcactacagcctgggcaacaagagtgaaactccatctcaaaaaaagaaagaaagaatgaaagaaagaaagaaagaaaagaaaaactaactgttgggtactatgctcagtacctgggtgatgggatcattcataccccaaaccttagaatcatgcaatatactcaggtaacaaacctgcacatgtacccctgaacctaaaataaaaattaaaaaaagatttgtgaatctggattctcaagccaaaaatcatcttaatctcatctaattaccaatattcatatattaacctttggtggcttcaatattttaactttttaaaagctttttaatttttattttttgagacagggtctctctcagtcgcccaggctggagtgcaacggcacaagctcggttcactgcaacctccagctcctgggctcaagctgtcctccccacctcagcctcctgagtgggtgggactataggcacgcaccaccatgcctggctaatttttgtattttttgtagaggtggggtttttgtatgtgttcccaggctggtctcgaacttctggactcaagtgatcctcccaccctggcttcccagagtgttgagattacagaygtgagccactgktccttgccctaattttttaatgataaggtggttttgtgttgtaatcacagcactttgggaggctgaagtgggaggactgcttgaggccaggcgtttgagaccagtgtaggcaayacagtaagaccctgtctctacaattaaaaaaataaaaataaaaaatgtggttttgtgttagactatgggtttcttcaccctgctcttggccagacttacccacaagtgaaaaagaggggccaggaagctttctccaggtggaaaagaggggttattrctgcaattaggtgttaaatgtcatggccagaataagggcaatccttgccttaggtacccagattgcatctgcccattgcataagtctcaaggccacaaggggactatctcctggtggggtgacccagtgacctgaagctcttccttcttccccagcctcctgcttagaatttctctccacgcttctgtcctttcttctgtagccttcctcttgggtctgctggaatttttccctccctcaccacagatccgaagtctcaccttgggggcaagcaaggccggttttgtctcttcatctttgggatcagcgagaccctgaggaaaccagagggtactgagccagtctgagagagaggctgggggaagccaggggtgactgctgtgttctgcgggggctcagggagatggagcctgtgaaacaggctgctgacagtgggttgaagcaggctggccacggagggcacggggcacctgggaaatatatggacacgatgccccgttcctgtagcatggggaycctctcctaaagcagcctccattgctcctcctgaaagtgtttccttccactcacccttccgctccagagwctttgactatcctgctgcctttgaggggagccttgagccaaggaggccgtatctccaggtatgttatgggtcaacgagtttctgcagattgtcttctgatcttttttttgagagagtctcgctctgtcacccaggctggagtgcagtggtgcgatctgggctcactgcaacctctgcctcccaagttcaagtgattctcctgcctcatcctcctgagtagctgggattacaggtgcctgtcaccaagctcggctaatttttttttgtatttttagtggagacaggagtttcaccatgtggtcaggctggtcttgaactcctgacctcaagtgatcggcccgcctcggcctctcaaagtgctgggattacaggtgtgagccaccrcgcccaggcttgtcttcagatctaaccaccacagtggctgaaagatttgaggaaatgttgaaagcataactatctcatatttgagggactgtctagttgagcaatttttcattaaacatccaacaaatatttattgcatacctaccataagtatgtcaggactcatcatagccctgcagatgtgtcagagagcaaaacagacacagatctctgtctgccttcatagaakgtcaagagatagacaataaacaaaatagacggggacatgttacagtaggttagaagatcaacagtgctatggaggaaaagaacacaggaagagtaaaagagaaatgggcacagagtgaggataagtttaaattgtacttagggtggttagggaaggtctcactgaaaatgtgacatttgagccaagacttgaaggaggggagggactcagccatgcagtttttccaggagaagagcattcctgcagaacaaacagcaagtacaaataccctgaggcagccgtgggccaggtcacgccacagtgaggctggagcactatgagaaggggagcagtcaggtgagaggtaagacaarccagagagaggccagatcgtgtggacttggccttttcctctgggtctgatgggagcctctggaggattttgagagaggaaggacaagtccgtctttagtttktttttttttttttcttgagatggagtttcgctctcgttgcccaggctggagtacaatggctcgatctcggctcactgcaacctccacctcctgggttcaggcaattctcctgcctcagcctcctgagtagctgggattacaagcacacgccaccatacccggctaatttttgtatttttagtagagacagggtttcactgtgttggtcaggctggtctcaaactcctgacctcaggtaatccacctgccccggcctcccaaagtgctgggattacaggcatgagccactacgcctggccctgtcttaagttttaacaggatccctccagctgcctgagaatacacagaaataggatgaaggtagaagcagtaagacataagaggttgtggtgctcttccggatgagaagtgcttagattctggatacattttgaaggtaagctaattggatggtttactgatgagttgcatgtatgatataaaagttatgactctggccaggcatgtggctcacgcctgtaatcccagcactttgggaggccaaagcaagtggatcacctgaggtcaggagttcgagaccagcctggccaacatggtaaaaccctgtctttactaaaaatacaaaaattagctggatgtggtggtgtgcacctgtagtcccagctactggggaggctgaggcagaattgcttgaacctgggaggcggagggtgtagtgagccgagatcatgccattgcactccagcctgggcaasagagcaagattctgtctcaaaaaaaaaaaaaaaaaaaaagatatgactctaaggtttttgaaaagagattaacggcttgggtatggtagtcacacctataatcctagcactttgggaagctgagccagaggattgcttgagcccaggagttcgagaccaacctggrcaacatggtgaatcccygtctgtagaaaaaatgcaaaaactagccagttgtggtggtgggtgcctgtagtcccagttacctgggaggcagaggtgggaggatcaattgtgcctgaaagatcgaggctgcagtgagacgtgattgcactactgcactccaccctggatgacagactgagacactgtttcaacaagaaaaaaaagggaagcccaactccttaaggggcaggggaggcagtggtcttaaagcccagagagggtctctatgtgcaaagagagggtctctatatgcacacaaatagcagttactatcaacctgtggcttggcaggaaaggagctgggaaaatggaaactccaacctcactctcctcccacccttccatctctggctgaggcctcttaccagatgaatcccattggaaactcaagggcaagcgagccatggctttactgcacagtcatctttcctgggtgtggagcagggagggaggagagtagaatgtcctccacagtgttaaaagcaagccaaggagtttgggtttgaggtgacagcgaatgagaaagacgtgaacagggaagcaatatgttaagttgcacttaaggtttttaaaagtagtgacaggattatctccaaagaagatacagaagtggcaaagaaaataaaaataaataaatgaaaagaaaaaaataaaatgacaggattaattaggtggagagtcagggagaactttaaggaggatgcttgttgatgattgagggcctgaactaagtgggaatggagagaaaaagaattattcttatataacagggtcatgttgagagctgggcattgttcagcgagcttcacaggcatgctctctggaaatgctcacaaacacctctagctgtctcatgatycttaaataatgcatggaaatgatttaggacagtgtccagcatacaaacatatccaataaatgttattagttgtcatgcttattttaaagattattaaacaaaacgaacagaaaaatatccgagccaagaggttgcccaactccgacatccaaacacagacacattctgatcccagctcccatgttcccaaggtcttgtccaaccacactgtgttttctctagtgctgtgagaaatgtttcaaagtaagaacgagtaagacttggagacagacatgggccagcgcctgcaagctgggaacaaataggacagaagccaatggcaagggagaggcagaagttggagagggaagagataaatgtggaaacaatttgctgaggaaggcagggacaagtagcattaaggggacagctggttgggttagacttaaaaggaagaaaaggtcctgtgggaaagatgacaccactagtaggtggaggaagggcatcaggaattaaatgcaatataatatctactagtgactaagggcttatcaaaagatcagataccttcttcatttttactttgaaagtcctccaaaaatcgatcaaagtccaggtgtggtggctcacrcctgtaatcccagcactttggraggccaagacaggagggtcacttaaggccaggcaatgcagtgagaccctgtctctaaaaaataaataaataaataaaatctatcgaagtgttaactctcctcttcctagggaatttatccaacagaagtccaggaagatcaaggcgggaggatcacttgaggccaggagtttgagaccagcctgggcaacagagcaagacccgcatctctaaaaaacagtaaaaaattagccaggcatggtggtgcacacctgtagtctcaagtactcagcggtaggactgcraggctgcagtgagctctgactgtaccactgcactcctgcctgtgtgacagaatgacatactgtctctaaagcggaaaaaaacaaaacaaaaaamagcccaggagccagggaagacttytaacacatattttgttgaatgaatgaatgaagtgatccaggtttttgtgtgcatttaatttcacctctaggtgctgatccagtttgtggtatagtgttctggaggtccaacgtcatctacttcctgcccttcagaggtakgctgatgttgtgtgtacatcaacatcagcacagcctcctgaatgaacctaaattcagttaacacaaatttgcattaaaactaatattaggctttggattaggtatctgagttgttttgcatgttctccattgctcacagatttccttatctcatttttcagagtcttttgaaatggactctaatctactaattcattccattttgaccactctcttatgtgaattgttggaaccagacttctttggtcaccattttctagatatgcattcatatttaacgttgttgggcttcctaagtggtgatttggaaggccttactgaattttattttcctctcattcacagacagattaaaaaaaaaagctttccatttttaggcaaattcttaaactttattagccttagttcctcattcttttttgagacagggtctygmtctgttgcccaggctggagcacagtggtaccaccatagcttgtgacagccttaaactcctgggctcaagtgatctcctgcctcagtctccccaaatagctcaaactacagtcacccaacaccatgcatggactaagtttttaattttttgtagagagagggtctcactatgtttaagaccagccttgaactcctgggctcatgyggtcctcctgccttggtcttccaaagtgctgatagcacagacgagagccactacgcccagactagtttcctcattcttaaaatgggaataacagaatctaagagttgcctgcggtaaatgagattacacacrtacttatcacgtgggcttccaaatgtcagctctctgatgcgctagctgtgcaatcctgtgtaagtctcctaattttcaggtcccatttcctcttttgtgaaacgtggccaagggagaatggactttgcagtgtttgtgtttcagtctaagataatactgtctacttgggattgcagtccagccaccacttaccagctatatgcccttgggccatacttcctctgcgcctcagcttgagcctatcaatgacatctaagagctgtttatccagtcaggagttgcttgccayggcataagatgttggttcccttgaaaatgcaaccctatagcttaatgtcacccactgttaagattttccaacacttgcttaccatgtagctttcttgtggtgaaactctaaagttatttccatttacccaaaagcaaacctcagtgtgtacatatggaatggctkggattgaaytgtgtgaggaatacacagattcttgccttgtttggagaccacttctggtgggtacccactaaggagttgctcctggacagtgtatttctttttcctcctcctggcaggcaaatatgagtcacatctgagtctcttgacatatgggagtcgaatcgggaagatattctctctcttgttagaaatctttgttcctattcaaaatttagaaagaatatttgtcatgaatgtgatagtaagttgtaaaaggactcccaaggctcttgtaaaggaaaactcatgtcatcgtgtcttttttttgagacagggtcttgctctgctgcctaggctggagagcagtgctgtgatcatgggtcactgcagcgtcaatcccccccggctctagccattctcatgcctcagcctcttaagtagctggggctacaggtacacacctaccacccctggctatttwttatttcttgtagagatggggtcttactatgttactcaggctggtctcgaactcctgggctcaagcagtcctctggccttggcctcccaaagcgctgggattacaggtgtgagccactgtgtctgggctcgtgtcatcatttctgatctcttgtaatggttatcatggtgccagtatcagaacgataattttggacaatgaccagagcttgggatataaattcttgtaatatctttagggggtttttaatcttacgcccttgttacaaaatgaaatgcacaactccttggtcaatcattgaaagtttaaattctcccctcttgatgtctttgtcatttggtaacaytggtaatcttgcagcatcagatcactgtcccacagtcatctatgcactgtaacttcaaataatcaagttgttgcaagcagttactcatcttaacaatctagctaccagcctgtatgccctaccttatttgttggcacaaccttggaaagccccaaacgagatttttgtggtttttatttcaccccaacttcatcttgcagatttactgtcctacatacttctgatcttgtctcttctctatccttatgaccaacgccctcatgcatcatttcttttctatttcaggggtatgttaagtgcctcttggtcttaactttctcaaatccatcctaaaatagaaaatgattccttcctggcttagaatctttcaattgctcccaatttcaacttctgacatcatggtcccatcctctccaaagtcaccccaagtagtcatactaaacttctggttccttaaactagaaatcatattcatgtcttggccmtctgttgtttgtatgtgcgaaatccctttccacacattgtagcctggataacccaaacttccctaacatttcccccacgcacaggcaagctgatcttctgatatatctctgccctaaatcgtgtcattatttgcttacatctgtttcccctaagagacgctgaagtctttgatggcaaagctgtggctcattccttttttttttttaatctccatcacttgttagtgcttgctgaattaacagatgtaaggagttaacttamtgttgcactagctcaaacatatttagattgttacctcacaaatagctttttttttttggagacggagtctcgccttgtcgcccaggctggagtgcagtggcgcgatctcggttcactgcagcctccgcctccggggttcaagcgattctcctgcctcagcctctcaagtagctgggactagaggcgcgcactgccacacctggctaatttttttatttttagtagagacgggggtttcactatgttggccaggatggtcttgatttcctgacctcgtgatccgcctgcctcggcctcccaaagtgcttgggactacaggcgtgagccaccatacccgacagcctcacagatatctatgtccatttataaatatatataaaagcttttggccaggcgcagtggctcatgcatgtaatccccagcacttcgggaggccaaggcgggtggatcacctgaggccaggagttcgagaccagcctggccaacatggtgaaacccgtccctactaaaaatataaaaatataaaaattagccggacgtggtggcgcttgcctgcaattccagctactcgggaggctgaggcacaagaatcgctggaacccgggaggcagaggttgcagtgaggtgagatcgcgccactgcactccagcctgagagcaagaccctgtctcaaaataaataaaagcttttgctatttggtgtaaataaaagccaacttgtacacggtgcttactgtataccaggaacacaaattcattaaatcctcacaactttgagacaggcacaaatattatctgtttactagtgaggaattacctacggtttactagtaaggaacactgagacccacaggttgtgacttgctcaaggtcaagctggtggagccaagacaaggtgcaggcagtgagtcctgccctagagtctgacccgaaccacatttaacgtctatgtggtgtgtaggttattgccatgagtaagaatcagaattgttaacgcgcattccaggaaggcagggacaccactgagtgttactgctgtactttaggggccagagcagggcaggctggatgcgcggaggaaactcatagttaggtcaraagcctggcaagacaagggaattttctggtcgtcgtccacctctccaacctcacatcctactagtcttccaagaggattctaactgcacatgactccctagtttccggcttctcttcctaaggagggtctgcggcccgyctgcaccaccctctccccacagtcccgttttcctgtccatgcttggatggatccrgccgagccgtcagccgcagctgcgcgctgctcccccgactcgcaccccctcggcgaagcgctgcattttatgtaattttctgccgggctgctggcttgtgggggatgtggctgggtctcggcagccttcagcgccgcagacgctccggcaacgccagcatacgaggcccccgccccaggagcgcgggtccgggcggcgttcccctctgcgggaggcgcggcgagccaatcctcactttaaaagctttcstgtcctcgaagcgaggggtcttccgtgcggggcaagacgcactggccccagacgaccggtccgtgaaatgacccttccgagcgacccggagcgggcgaccttgcccaacccgcgactcggggcccctgcggtcccgcgtagaggacccaggtcccacggggggcggcggtgaatcgccccctcttgtggccgcgcttccgcccccggcacccgcccgctgctgggccacccggcgtcgcgctgccgcctcacaaagcccgggcagccgcctcattgcgcgcagggattcggaccacgcgccctcccctmccccactcgctgctgcggcgcccaggtctttgcctccgcgtcactttctcctcatcgagtccccggaggcagagagctgagcgaggttcgcctccccgggcgggacrcgagctccggtcctctcttggcgcaaacccccgccccccgcggagggactacttttcrtctccygcggaggractacttcctcccccgcggaggcgtcggtccaggcggcgcgcacggtatggcggcggcggcggcggcggcggcgcgcgcctgagaagaggggacgccagcccggtcaggcctcggcgcggcctacacgctccgctcgctcgctcgctcccgcctcccgccccgcgcccggccatggcggagccgtcgtccgcccgacgcccggtgcctctcatcgagtcgggtaagacgcgaggccgtgccacccccgccctggcgctcccggctgcttcggcttccccggctccccgggctcccccggctcccckggccccgtccccctcccctccccgccggggcttgaccygactccytgtcttcccgcagagctgtacttccttatcgcccggtacctatcggcgggcccgtgtcggagagcggcccaggtgagtgcgggcccgcgggcggctgcggacttggcgtccccagtgtccccgccgccgggggtcgcgggtggtgggcgggggtgaaacgggagcgccccgggcccgaccccacccctgaccgcgcgtctctcggccgcaggtgctggtgcaggagctggagcagtaccaggtctgtgcgcgcccgtccccgcgctccctcgggttcctcctgccgaccttgccctgagggatgctcgcccgcgccccccgcccgccgcccgccgcccgcccccggccccccgccccccgccccccccgcgccggagsggtggtcactcgtgtgcgtttcgtgtctttccagttgttgccgaagagattggactgggagggcaacgagcacaacaggagctacgaggagttggtgagcattgggcacgtttgctccccgggttttccgtgcaccgccccccgcccccgccccttcccctcgcggggaccccggcccgtggggtgcaaagtgtgacccgcactggggggcggcccgggsatagctgcgttcccggctgaagattttgttttgtttttgaggcggccaggtttgttttggcaggaaacagtcattgggggcggcgcggggcggagcggtgggggcgactcgcggaggtcctgcggcaggggtggggctccaggtgcggccgcctctgcgggggtgtggcgtgcgcagccagccattcaactgggcggtttcattcgcttccccrctccaccgcgcttgtaactcgcgctctgattggcctcsctgctcttgccccgcccgggtctgtccccccacttgttccctaggaatagaatcattggtctctgaaggtggagaaatgttcttgtgttgagctttttattttttgttttgtcagcagcgtcataaaaatcttgcagctgtatgaatatgccactgtagtgcttgtgctcctttctactgtacaatatttgttgaacgcagtagttgattgatgagtttcacactgatcttgtagataacacaataaagtgctttaaataggcacttttcttttgagctcggttaatcttgcattacagtctcatttyttttgtgaacttggttaatgtttctatataacttgcttttatctatagttacagcagttgcagggattcgtttgtttttactggagacatttttcaggaatatatttttgccgtttcgttattaggataaaggaattcattaattgccaggccatattcagcatcttgtataaggaaaacaattgagaaagaaaagagcttctgagtgatcttttaccacagttggaagacctgtaacacttgagtggtagagtatggtggcaagtgaaaagaagaaaaaaaagtggtagaagattactggttttgaattagacaacagaagagaccagaggatgtgttatttccatgaacagttaacacttgaagcctggtgcaagtaataaataattttaatatttgctttcttagattttgaagtaaacactttaacagtggatgttttcaagggaatgagttctaaaaattctgatggcaatgtgttgagtttgacattttgagatagtttatttttgtaaacgttgaggaaacatttaaaggatgccctcttttagttttcttcacggataatatagccttatcggtgaagcggaaaagcattactggttatgacgctgttgtcgtgctacctgagagaaaataacttgaaacaaatgtagtgctgtaactactggaaaagttacttttaaaatacatttataggggctgggtgcagtggctcatggctgcaatctcagcacattaggaggccgaggtgggaggatcacttgaggccaggagttcagaccaactcttgtctccacaaagaataagtaacagaaaatyaggcggctgtggtggtgcgtgcctgtagtcccagctatttcggaggctgaggcggaaggatcacttgactctgggagtttgaggctgcattgaactatcctcctgccactgcaytccagcctgggagatggagcaaggcctagtttcttttttttaaaaaaaaaatttatataaattttttggcttttgttggtagaattgcttaaaaccctacttactattgtttaaaatcacttaaattctgtgataatatggctgtgatttggctatgacatatggcatctatcattgcctccctgatttggtctgtctggtgggtgtcctttctttttttaccttcctctctgccctccagtcccccaggactgagtgatgatgagcctcatgtgtagagaattattcttttgttaatggtatatgtatcgtttctaaactttcaaagtcttttaaaaataccttattaagaagtattccaggccagctgcggtgctaacacctgtaatcccagcactttggcaggacgcttgaggccaggagttctagacctgcctaaagtgaggttgaggatgtagtgagccctgatcaagccactgtgctccagcctaggtgagcgagaccctgtctcgaaacgcaacaacaaaaaagaagtatttcagatgtacacaaatgagaataatgtaatgcaccsctgtatatcatcaaatttgaataataatwatttttttttttgagacagtctgttttgaggagcagcctcggctcactgcaacctctgcctcctgggttcaagtgatcctcctgcctcagcctcctcagtagctgggattacaggcacctggctaatttttgtatttttagtagagatggggtttcaccctgttggccaggctggtctcgaactcctgacttcaggtgatctgcctgcctctgtgtcccaaagtgctgggattacaggcacctggctaatttttatatttttagtggagaaggggtttcaccatgttggccaggctggtcttgaactcctaacttcaggtgatctgcccgcctctgtgtcccaaagtgctgggattacaggcgtgagccactgcgcctggccaacaaatttgaattttgaaagttactaacttgctatatttactttggtttctgtttgaggtatacatatgttttaagaaactatcaatggacatcttcaaacaaaaataatagaataaatgacccacccactaggtgcccattttccaacttcagtgattatcagagaatgttgcatattgtctgctsccttgtttttaagcaaattccagaaagccattcatttcactggttaatgtgttggaatgttttaaggcagattccagacactacatttcatctctaagtttgtcagagttcatctctaaaaaataaggactgcttattatatcatcaagtgccaatatcacagagtccatatccagattttctttttgttccctgggtgtcttttttttttttttttttttgagacggagtctcgctctgtygcccaggctggagtgcagcsgtgcgatctcggctcactgcaagctccgcctcccggattcacgccattctccagcctcagcctcccgagtagctgggactacaggcgtccgccmccacgcccggctaatttttctgtatttttagtagaggcggggtttcactgtgttagccaggatggtctcgatctcctgacctcatgatccgcctgcctctgcctcccaaagtgctgggattacaggcgtgagccaccgcgcccggcctccctgggtgtctttttacaattagtttgatttggtcttgagaaaggtccatacatgcattgactgattgattctctccccgccccaccctgggtctcactctattacccaggctggggtgcagtggtgtgatcacagctcactgaagcctccatttcccaggctcaagcaatcttcccacctcagccctccacctcctgagtagctgggaccacaggcatgtgccaccacacctggctaagttttttttttttcccctagagaaaaagactcgctatgttgtccaggctggtctcaaatgctcctcccaaagttggaattacaggtgtgagccaccacaccttccctgatttttgttttgtttttttttgagatggagtctcactctgtcgccaggctggagtgcagtggtgtgatctcggctcactgcaacctctgcctcccgggttcaagcgatttgcctgcttcagcctcccaagtagctgggactacaggcgcacaccactatgcccagctaattttcgtagttttagtagagacggctgttcaccatgtgggccaggatggtctccatctcttgaccttgtgacctgcccgcctcggcctcccaaagtgctgggattataggtgtgactcaccgcatcctgccccttccctgattatcttaaatctctttttatcttgaatagtcttgtttctatgccattgatttactggagaccaaatcatttatcctgtagaatgttttacattctgtatttgtcttattgttccttatgatggtaacttgttcctttttcttagtggttttcatcttcagatgagaatcatctggggagctttataaaatctggttgcccagagtatgccccaaaccagttaaatcagaatctttgtggtgggactggacatcagtattttaaaaagctttttagatgattctagtattagtgtttgtaaagccacaatttatcttaaacttgtgaccatgctgttattccaacctgtatttgggggcaagagtatttttggtacttttgcttttttttttttttttttttgagacaaggtgtcattctgttgcccaggctggagtgcagtggtataatcttggctgactgcaacctctgcctcacaggttcatgcagttctcctgcctcagcctcctgagtagctgggattacagacatgtaccactatgcctggctactttttgtgtttttagtagagacggggtttcaccatgttggcccggctagtctcgaactcctgaccttcagtgatccacctgcattggcctcccaaagtgctgggattacaggcatgagtcaccttgccaggcctacttttgcttcttataagaattgaagccaagtgtggtggctaaggctacacagagacttgagagtctgaggtgggaggatcacttggtgccaggggtttgagagcagcctgggcaacataagcaacacctcatctgtagaaaaaaagtttacaaaaccttggtttacaggtgtgagcctccgtgtccagctcccaagtttctagtctctacctgcactgctatattgctagactgtarctcatcaatcacactaccatgatcattaagtgtccccaagttacaaatgaaatacctatagaatgatagatctctatagtcaakgacaatacagaatctatagaggaaagaaattagctaccctcaggatggaagggtcttttagagttccactgtgaaaattaaatgataatgggattagtttcaagacttgtgggaaatacaaaattgtaaaagaggtttttgttttaaaggggttttactattaaaaaaggctcagcctaagacttaaagtatctggcagtgcacccaagttccaagtcatagcctataatcttctatcataacctgattccttaatcctgtagagtacttaaaatggtaataccagtctcctcccagtttgggtaattaagtcataacccaggaaggttaacaagcgaagatgaagaaaaaggaaagtacaaatgtattcacacaagtatatatacatataatatgtgcaatatatacatacaaacatatatacataaaatatatacatataatacattgatattcatacaartacatattctgatgtagtaacaagttttgtaattactgagttacatttatttgtttgatagagtaaaaaaaattacaaaataaatttgaaatctatttacaagtttagtcttagaaaattcatggttaggtttgtctaagttaaccctgctgaggtgattaaaataactgtacgcttctaagtgtagtgaaaaatgcccaaggaaatttgattaaatgtgtaagtggtataaaatattttatgattaaattttcaattataaccaggctcagtggctcacacctgtcatcccagcactttaggaggctgaggcaggtggatcacctgaggtcaggagttcaagaccagcctggccaacagggtgaaaccccrtctctactaaaaatacaaaacttagccgggcgtggtggcaggtgcctgtaatcccagctacttgggaggctgaggcaggagaatcacttgaacccaggaggcagaggttgcaatggtctgagatcaagccattgcactccggcctaggcaacaagagcaaaactccatctcaaaataaataaacaaattttcaattatcaattaaacagtaaccaaagaataaaagtaactatttgtttctggatttataaataagatttgtacttgaaggtttaagaaaaatgactacttgcaattctaataaaccaaattctgatttcagtataaataacttttaagtctgttcctcacacaaaaggactactccaatatatttctttaaatcttaatgagttttctaatgatacactaaatataaggatcttctggtattttttccggtcaaagaaaatggcccacaaaaatgtaacacattattcaattattaagtctcttaatctctttccctttaaataaacccctctacaaacctagtccttccgaattcttaggctcagttctgtagttatatttccttcctcctctgtctttaccactcgtatacatgaaaattacaattaaataacatggatttgacaggcccaatgcagggtkagatatttaaagatatctaggccaggtgcggtggctcacacttgtaatcccagcacttggggaggctgaggcgggtggatcacaaggtcaagagatcgagaccatcytggccaacatgrtgaaacctcatctctactaaaaatacaaaaaattagccagacgtggtggcgggcgcctgtagtcccagctactcgggaggctgaggcaggagaatcacttgaacccgggaagcagaggttgcagtgagccaagattgcaccactgcactccagcctggtgacagagtgagactcggtctcaaaaaaaaaaaaaaaagatacttaaagataactagtctcaattctttgttttttgagtttgggtctcttgttgtccaggctggactgcagtgacccaataatgaatggctcactgcagcgtcaaactcctgggcacaggtgatcctcccgattcagtgtcccaagtagctgggactacaggagggcgcagccacaccccgataaggttttttttttttttttctttttgagrcagtcttgcaccgtcgccaggctggagtgcagtggcgcagtcttggctcactgcaacctccgcctcctgggttcaagtgattctcctgcctcagccctcctgagtagctgggactacaggcacatgccaccatgcccagctaattcttgaatttttagtagagacagggtttcaccgtgttggccaggatggtctctatctcttgaccttgtgatccacccacctcagcctcccaaagtgctggaattacaggygtgagccactgcaccaggcctaatttttgtatttttagtagagatgggatttcaccataatggtcaggctggtgtctcaaactcctgacctcaggtgatccaccgaccttggcctcccaaagtgctgggattacaggtgtgaactactgtgcctggctggctgtgctaccttaaaagagagtagttactagtttccataggctcacccaacaasaagaagttatttgtatctaagggataaaagttgagtgacttgtttattttcagatcatatgtatccttatggatttttgcaagcttactgtattgattcctgagaaagatttgttaaaatctccaactacggccagatgtggtggctcacgcatgtaatcccaacactttagggggccaaggcgggcagatcacttgaggtcaggagttcaagaccagcctgatcaaccttgtgaaacccgtctctactataaatagaaaaattagccrggcatggtggtacatgcctgtagtcccagctacttgggaggttgaggcaggagaattgcttgaatccaagaggcggaggttacagtgagcggagattgtgccactgcactccagcctgggcgacagagcaagactccatctcaaaaaaaaaaaaaaaaaaaatctccaaatatgactgtggatttgttgctctttttgtccttttttgaagctgttattaggtacattcaaatttaggatttttgttttcctattgaattgaccttaaatattagaaaatgctttattcattataatcttcttgtcttcccatctgctttgccttacattaatatagccacaccaacttcttttggttagcaatggcacagtgtatctttttctgtccttttcctttcaacctttttgtgttcacatgtttaaagtttatctcccgtaaacagcgtgtagttttatgtgcattcttttagtgatgttttggtcatttgtatttttttttttgttttccagacaagttctcactttgttgcccagggtggagtgcagtggcatgatcatggcacactgcagctttgacctcctgggttcaagggatcctcctgcctcagcctcctgagtagctgagtctatacgtgtatgccatcatggccggctaattaaaaaaaatttttttttctagagactgtctcactatatggcctaggctcatcttgaactcttggactcagrcagtcctcccrccttggcttcccaaagtgctgggattataggtgtgagccactgtgccttgctcatttgtatttaacataattaaacataattgggtttaagtctacctgttctttatctcattttttctttattctttctctcactttttttttttgattaatcaagtattaagatgacagcaggatttcaaaaaggtaaaaagtattctacttattctgtatttctctttttttttttttttttttttgagaaagagtttcactctggttgcccaggctggagtgcaatggcgaaatctcggctcactgcaacctccgcctcccgggttcaagcgattctcctgcctaagcctcctgagtagctgggattacaggcgcccgccaccacgcctggctcattttgtatttttaatagaaacagggtttaaccacgttggccaggctggtctagagctgctgacctcaggtgatccacccgcctcaggatcccatagtgctgggattacaggtgtgagccactgcgcctggcaactactctgtatttcttttctttttctttttttttttgagacagggtctcactctgtcacccaggctgaagtacagtggcatgatcacagctcactgcagcctcagcctcctgggctcaagccgtcttccaaccttagtctcctgagtagctggaaccacaggcatgcaccaccacacctggctattttttttgtagagatggggttttgccatgttgcccaggctggtctggaactcctgagctcaaatgatctgccgtcagtctcccaaagtggacctcgcctggcctaamtattccttttcttcatttttttaataattttttttttttttttttttggagatggagtctcgctctgttgcccaggctggggcgcagttgtgtgatcttggcttactgcaacctctgcctcctgggctcmagcgattctcctgcctcagcctctcaagtagctgagattacagtcacctgctaccatgcccggctaatctttgtagttttagtacaaatggggtttcaccacatttgccaggctggtcttgaactcctgaccattagtgatccacctgtcttggcctctcaaagtgctgggattacaggtgtgagtcactgcaccyggcctctttatttctttttagttatatatccttttattattcttttggtggtttccctagaggtttcaatatacattaccaatatacattactttacattagttcctttaccacttcccaaataaataaagttataactgttagttgtcaccatcctgtcgctttgagctagtaatctttttttttgagacggagtctctgttgtgcaggatggagtgtggtggtgtgatctcggctcactgcaacctttgtctcctgggttcaagcagttctctgcctcagcctcccaagtagctggaattgcaggagcatgccaccacacccagctactttctgtatttttagtagagatgaggttttgccatgttgcccaggctggtcttgaactcttggcctcaagtgatccgcctgtctgggcctcccaaagtgctgggattacaggcatgagccaccatgcctggccttacttttttttttttttttttaagacggagtctcactctgtcacctaggagtgagtgcagtggtgtgaccttggctcactgcaacttttacctcccagattcgtgattcttgtgcctcagcctcccaagtagctgggattacaagcatgtgccaccatgcctggstaatttttgtatttttagtagaggtggggtttcaccatgttagccaggctggtcttgaactcctgacctcaggtgatctgcccacttcagctttccaaagtgctgagattacaagtctgagccactgctctcagcccggccttaccacatattataaaagtttcaagatgttgttactgttgttttaaagtcaataatcacttgcttacctacctatacatcttttctggtattttaaattttttcctccacttccatgggacctatttgtggtaatttttcttctgtctgcagaacttattttgttatttcttttaatgaaggtttggctgggcttggtggctcacgcctgtaatcccagcactttgggaggctgaggcgggtggattacctgaggtcaggagttcgagaccagcctggccaacatggtgaaaccccttctctactaaaaatacaaaaattagctgggtgtggtggcgtgtgcttgtaatcccagctacttgggaggctgaggcaggagaatcacttcaacctgggaggtggaggttgcagtgatccagcattggggccactacactccagcctggaccmcggagcaagactgtctcaaaaaaaaaaaaaaaaaaaaamaacacacaaagctttttaacaaaggtttgttgacagtgacttcagtagctatggaattctgattcatagtcctttttttttttttttcggcacagtaaaratgttctactgccttatgccttcctaatgttggaaatttagcagtcttattgctcctttgaaaataatgttgtttttggtctggttgcttttaggatttttattttgtctttgattttcagcagttttactatgttgtcctgtagtcatgatctattgctgtataacaaattaccccaaaatttagcagcttaaaactacactaatttgttgttatctgycagtttctgtaagtcagcggtccagacacagctcagatgggttccctgtctccttttctctgaaggtgcagtcaaaatattggcagaactggggttttagctgaaggcttgacgggaggaataggcttccaagctcatgtagttttggcaggattcggttcctggagggttgtttgactgagggcctcagtttctacctgactattggccactctcagttcctcgcccttttggtctttccagtgtgatagcttgagttatcaaaagatgaaagctgacgaggcagtagagtcttagcaagacagaagtcacaattgtaacctaatcatagaagtagtatcctctcaatgttactgttttctgaagtaaatgaggaggggatttcacaagtctgactaccaagaggtttgggcactattagcgggcatgtcagaagctgcctttcacatgtgcacctaggtggtttccttttttttttttttttgtgggagccttgctctgtcacccaggctggagtgcagtggcgccatcttggctcactgcaagctcygcctcctgggttcacgccattctcctgcctcagyctccccagcagctgggactacaggcacctgccaccacgcctggctaatttttttgtatttttagtagagacagggttttaccgtgttagccaggatggtctcgatctcctgacctcgtaatctgcccgccttggcctcccaaagtgggttttctttgcatttatttttcttgggttctctgagctttttgaataagtggtatgatatcaaatagtttaatgtgtaattaaagtcccaagtggaaaggatagaggggagaagtagtttgaagaaataacagctaagcatttttgaacatctgggccatctctaggtctgcttctattgaccatttcccctcttgaccatgggtcatatatctagctttgttgtgtatctcatcatttttttgaggtatgctgtaactttttgtgtaaagagtagaggctgcagtaatgtatttacctctggtaaagatgtgctcttttctcaagcagttagtgtgtgagacagggtcaatctaatttgtaattgatcatctctgagctttgttacattcagtaaatcactggctttccatgctttgagggtggcatcaatactttcccttccagcagagtttgacatttggccctcatgaaatttctgagatgtcttattttttacactggagttgccacctttccaaactttgtgagatctttttctactttgtacctgactgccaactttttaggttgctacagagttcgctctgccttgccgtcctgctctaggctttccatgtcagaagagatcattctccaccctgttgtcctatctctagccttaggagggccactacagtgcatttcttccagggctgccctggctttagtgtttgggccctatgcagttggtgaaggcctatgggaaaaaattgtggtaggtgtgcagactcactgtaactgaggcgccttaggattctaatcagtcatgccggccacaagtagccattaagtttgttagaggtttgagtggttttttcttattcttttctgaggtcagttcttcctgcctctctgctaggggtgtaagcagctatgagtcccttttctttaactttattttttttagatggagtttcactcttgtcgcccaggctgtggagtgctatagcatgatcttggttcactgcaacctccgcctcccaggttcaagtgatttcatacctcagcctcctaagtagctgggattacaggcgcctaccaccacacccagctaatttttgtgttttttttttttagtagagatgggatgtcaccatttccgccaggctggtctcgagctcttgacctctagtgatccacctgcctcggcctcccaaagtgttgggattacaagcgtgagccaccgtgcccagcctgagtcccttttctgttcccagaaaagcttgtactttgtgggattagttaatgtagatttttctttgtttcttcagctgtgatgggtttatacattttttaaagtttatccagcctattctcattgtcgagatgagagcaatatcttttatctcttacgttggagtaaataaatgattatttttcatttaaaattataacagacatatatttgtctatagtaatccataggtatatccacttatggctcctggcacctaataggctgtcagtacttactgaaagaattaatgttttttactgcctagtatgttgttgagaaccagttatccatgatttagatactaaatgatgtcttataggatctttgatatcttaacatctctctcaaagatgtatgcttcacttacaggccagttagcatatatatatatttttttttttttgagacaggcgagttagcgtaatatgtatatatatttttttcttgttgcccaggctagagtgcaatggcacgatcccagctcactgcaacctccacctcctgggttcaagtgattctcctgcctcagcctcccaagtagctgggactacaggtgtgcaccaccatgcctggctaattttgtatttttagtaaagatggggtttcaccatgttggtcaggctggtctcgaactcctgatctcaagtgatccacctgccttggccttacaaagtgctgagattacaggtgtgagtcaccatccctggcccagttagtgcaattttgagtaaagtcttgatttcaagtcttgagattaagttttgttagctctgcaaccttttttctttttcagaggtgcttttccaggtcatttgcatataaattttagaacaaaattgtcaatttctacaaaaaaaaatgttgctgaagttttgagtgttacaggtttgaatctgtagctcaaatctgtagatcagcttattgtttatttaagtcgtctttaatttctctcagcatgttttacagttttcagtgtatgtttttcacattttgccagacttatccctaagtatttaatagtttttgatattattaagctgttgtcattaaaacttgctctccaactaggtcttgtccaataagcatgtggctcctgatcatcttttgcaaatctgcsagcgcatcggtcctatgttggataaagaaattccacccagtatttcaagagtcacttctttacttggtgcaggaaggcagtctttgctacgtacagcaaaaggtaccttaatttgaagaagtgttctgctttgtattaatagcctaataattattataattgtgaagtaatgtaagcattgtggaagaaaggtgataatgtaactataaatcatgctgtggactataaaattctctgcatttagcatagaacattgaattttattacataagtgtttaatgggtccttctgcwttaaaaagttgataaagatatagatgttaagctaaaaagcttgaatttattctgagatgttgtttgaggttttatcaatgtgagttcttaattttccattttgtagctcactcataacttcattgaatgtaattgtatgtgtctaataaactctttaaatgctagaggtatttcatttgatatttagcttmtgaaagccctttgttataaagggaagtgattttctaaatttggtagcagcttgaaaacaagcaccacaaatgtaaaaytgcatggttctttttttactaatttaatttttttgccaagttatgtgctagcaaaatgtttgaaattgctattctttttctgttagcttggtatatatgacttagactaagtatatgtatgtgatataatatatgtgtacatgtggctaaactgctaatgggcaaagattgttggttcttctgatgctgagtatacatcaagttcatcccatgattattttttattacgagctattgctgatgtgatgctactcttagctgcaccaccagtataaagcttaactgagaaagaacacccctccctcttagttccgtgccagactggtttgttagctttagttgtttcttagtgctctagccatgtcaccctgtggcactaatcaggacactgtttatattcttcctcttctgtgtccctattcactttgtaattattctattttagctggttatatggtagttaattggtagcctgttttcctttgttttctttacttgtgtcaagctccatgtcgttgttttgtgatgagcagtgatttagaactggccagaccttagaagagtcttcagcaagctgccctagggtaggggcrtattctctgtttgttttgtactggtaccccaggaggatgccttgtaactgctctttggtcatgatagtggtaatgaatccattcatgtaaaatgcaatatgtctgttagtttggggcacccgaggctcagtagaggtttagtatgatgccttccctttcttctttgagttatgaagaaactaatttctggcacagtgtgactgcttcaaacctatgttctgmtgctatctcctatagaggagggcagacttttttttcttagtgcatttgctggtaggtcaaggagggatggactttgaattagtgttcagagtcacagatcctacgtatgtgctcttcagtagaggattttctgtgatcctacaatgaagggaaagctatataatttattggtacttcctaaagatagagactaaagtcatggtagtattggccaaattaattttaaaactgaacaagtcatgaattttcatataaatcaaagaactttttccttataaaagcttccatttttgaaaagttggatcagttgtaagacctttcatctttagtattgtatgatataattctacattgaaaaataaacacttggcattaaatgggacttggagtcaaaagatctggttttatggtccatctttaccaatcatttgctgtggatctctttaaaggtcctggaacctttgagcctcagttacctcacttgtaaattggcaaaaatacctacctcacagggttgttgtgaggattcaatgagctaatgtatgttgaaagcactttgtgaattgtaaagtgctacacaaatgttagttgttgttgctgctgtatctgagatgtcttaattttctttttcttcagaaatagtctaataaacctccagggcttttctgttaaagtatactagttggtaaaatgttgaataaacagtttattacaatatacgtaagtattctataaaatctttcttggggttaactttcaagattttatgtgtatctaaaattcattttaaagactgcaggcacacagtttggaagggctctgcctttgctgctcttcatagaggaagacctcctgaaatgccagtgaattatggttccccaccaaatcttggtaagtaaggttggcctttgagatgcctgaaataattgtttttaaatttctcaacaacctttataaatgctgtattaaaatttaaaaggaaatactggttgaaatgttgttttaatagtaataagtatcaaatgtcaaattattgttaaaataattactaaaaataaaattaataaaaaatctttttatagtaagaagtctatgttactgaatacagaagaatagaattgggaagaaattgtgtcattagggcttcttgaacatagatttttgtgaccctctagaaattgttatttgagtttttcttagatttttccttattggctctcccttaaccattttcattgtttttatttcctagtggagatacatcgaggaaaacaactcacagggtgttccacttttagtacagcatttccaggaactatgtatcagcatataaaaatgcacagaaggattctcggacatctatctgctgtttactgtgtagcatttgataggacaggacatagaatctttacagtgagtaaaaattttaaacttgatttgatgtcatctagagtactttagtgtgcttcagaatcatctaggaaatcttagtttctgtttcccatcctcagagattttgactcagtaggtatggtgtgggtctcacgaatttgtatttttaataagtgcttcagctgaagataggactctgtgctgttttgaaagacagtgatttagagtagtcgttcttaaatgtgatatttaaggatgcttaaaaatagacatacctggccgggcgcrgtggctcacgcctgtaatcccagcactttgggcggccgagacaggcggatcacgaggtcaggagatcgagaccatcctggctaacacggtgaaaccccatctctactaaaaatacagaaaaattagccgggtgtggtggtgggcgcctgtagtcccagctactcgggaggctgargtaggagaatggcktgamcctgggaggtggagcttgcagtgtgcagaaatcgccccactgctctccagcctgggcgacagagcgagattccgtctcaaaaaaaaaaaaaaaaaaaaaaaaaaaaacatagacatacctaacactttccctctagcacattctagacttactgaattagattacattrtamttaaatatatgtattaactgtaaaccccccaaaataaaaagctcctcagacctctacaagtgattcatgttcacattaatcactggttcaggaaaatgggttgattataaaataacccattagtgttcaagtaagtattaaaaacctatctgaaaaaatttggaatttatcrttttaatgttttaagcgtaagttaggagaggtgagaagtttaactttcattttgtgggtgtaaaattcaagagtagataatcaaatgtttcttgaatgggtgctggctagtactgtaaacttgagactgtgttcgtgaggaggctattcccaccacttttgtttgtttttgggattgccacttagtcctgtttctcacactatgaagtatagatctgttccaacattcatcacattcatcacattatatagcttgatgtgaatagactttttttttttttttttgagacggagtctcactctgtcacctaggctggagtgcagtggcgcaatctccgctcactgcaagctctgtctcctgggttcacacaattctcctgcctcagcctcttcagtagttgggactacaggtgccagccaccacgcccggctaattttttgtattttttagtagaaaggtttcactgccttagccaggatggtctcgatctcctgaccttgtgatccgcccacctgggcctcccaaagtgttgggattacaggcgtgagccactgtgcctggcctagactaacatttaaccattgttagttgatrtaagagagccgtgaactttgagttggacttactactttgcagagaacttgggggaaaatagtattggtaatggagtctgacccgtagaaatgataactcggcagtatctttatgtagactgtctttgccttaaagaaaaatactattattccataggtgttctgaccatagtcataatttattacataaataagagagtattctrtagttggaaagagttaaagttaatttggatggcatataaaaggtattcttttaatatttaaaagatttgctgtactaacattaatttttggatatattttttcttagggttcagatgactgtttggtaaagatttggtcaacacataatggccgcttgttatctacattaagaggtcattctgcagaaatttcagatatggcagtaaactatgagaatacaatgattgctgcggggagctgtgataaaattattagagtgtggtgcttgagaacttgtgccccagttgctgtgctccaaggacacacaggatcaattacatctttacaggtaaacttstagcttagtgggcacattcctatatgtattttcacctttttctttaaaacagtttctttggaattgagaaatagtaagatgtgtattagttatgttttaagtaagagaagtgataatcattcatacaaatcatacaaatcatggaaggctgatgaaatgaagatctaatgcatatttacatgaaggcttattgatattttggggtttatggttgaactggatgagtgtcaattagaaactggtgatagattaattatttttcaactttaaaacttgtggattttgctaagttgatttttttttttttttgagactgagtcttgttctgttgcccaggctggagtgcagtggtgtgatctcagctcgctgcaacctctgcctcctgggttcaagcgattcttgtgcctcagcctcccgagtagctagaattayaggtgtccaccaccacacccggctaatttttgtatttttagtagagacagggtttcaccatgttgggcaggctggtctcgaactcctgaccaagtaacctgccyggctcagcctcccaaagtgctgggattacaggcgtgagccaccgtgccgcttagttgatttaatttaccaaaatatttaaagtttttttcacaataagcagaggataattttgaacctatacagagtagacagaattgtataaacccctatgtatctgtcaacccatggccaattctttcctaactgcttcatcttgtacctaaagcgaatcctaggttttatataatttcttctgcaaatatttcattctgtatttctaaaagataaggattcccctccccactttttttcatagtgacggttatgatggaaggaaaagattcctttttaaaaaaactgcaacaccattatcacactatttattgatgttcaagtttccagttgtctcataatggtattttatttaggttgtttgaatcaggagcaaaacgaagcctgcatgttacaattggttgctgtagaataaaagaaacttaaaatataaatttcacctatctatgcagtttaaaaaaaattcgcttgcagtttcttcgttgaaggacctaggttatctatagtttccccacagtttggatgttgcccattgtatcctgttggagtagtttaatatgttcctctgtatttctgttaagttggttattggatgtagagcagtggttctctttaatgtgcatgagaatcacctggagggcttgattaaaacattgttaggcactactcccaaagtttctgatttcaaaacgtctggggcgrgggtatgagtatttcatcactgatagagaattgatcatmttgggatgtaagttcttccatcagaaggcacaaaatgtctagtgttttttgtattactcactgatgatcattgccttrcatccgttagttattagggacagaaaatgttactcttactagtgcacggttcttggctgtcagtgtaacagaaattaataggaggctaggcagacttcccagacaagatttattaagacttatgctgagatttattaagacttgtgcctagcgatggctcatgcctataatcccagcactttarggaggctgaggtgggaggatcacttgagctcacaggtttgagacccggcctgggcaacttagtgagacccccccccccacccccacccaccccccacaaaaaatagtttggcaaggtagcacacgcctgtagtctcrgtactcctgaggttgagggaggattgcttgagccaggaggttgaggctgcagtgagccgttatcrcaccagtgcattccagcctgggtgacaaagtgagactgcctcaaaaaataaaaataaaaaaagagacttatgcctgaaacattgggaataagtgagacagtgaaggaagaagggttctctggctggctccccaggggaatgccttgccgtgtcttaaggagggtaatgtgcataactcatcaggtaggtgaacgttattacatgtgtgggatggagcacagggtgtgcagatgcactaaggaatcatgctgacacatatgtcacrtgatgagaggggcagataagcccctctgggcgaaggttttagtattacartgaggctcagggttaggattggtccttctcctggccttgtgcacatatgggcggatagagttaactctccttagtaggattcatggtggaatgctgcttgttttagtttttttagacaacttacaaggtctggtcagcgagtataggccagtgggggtggtaccaaaatgtctggtggtcagtggtcacatatggaaaaacatgttggtggggttgggccaagtgctgtccctactaccctgtttcagtgcttttctatcatgttttgaaacttaacgtttggttagactgaagtaaattgttagatgatttgtaaggcttttattttatgtttgatttataaggcttttaaaggtacattggtatctctcattagaatttggtgaaaactggtggtggttcaatttttttatgcacattcacctaggctgtgtattaytggtcacttaaatagatttggtgtgaaattttatgataaaaggtgacttttgttctagtmagtattctcaaagaaaagagagtgagtagctattttgggatgaagatagttataactgagatagcggtttttgtttttgttttttgtttttggcccaggcggagtgctgtggtgcagtcatggctcactgtaacctcagcctggggtcaaggtctgcccatctcaacctctcgagtagctagggccacaggtgtgtgcttaccaaccccggctttttaaattctttatagggatggaatctagccatgttgtccaggctgttcttgaattcctaggatcaagcagtccttcttcctccacctcccaaagtgctggaattataagcctgagccaccgtgccttgctgagatagtgttttattttggaagtttmagcaagatttttggtttgtgtacttacttttagttaagtatattgttctctggaagattttatagtttgaaaattaattcaaattcttgctaggtttcacagttaacattttatagtttgatatgaatgtgttgacaatatagcagcaaataagaaaatttatactttgagagagtgcctgttttaaaatcatcttggaattctttgaaagtggagttctagtcttccctgaaatgattcttcttgtaacgggggctcacatgcgtttatcacctactgaatatatctgaacaatctaattgggtagtagtacattttttttttttttttttgagacggagtcttgctctgttgcccaggctggagtgcagtggcgcaatctcagctcactgcaatctctgcctcatgggttcaagtggttcttctgcgcctcagcctcccgagtagctggggctacaggcacgtgccaccacgcccggctaattttttgtatttttagtagagatggggtttcactgtgttagccaggattgtctcgatctcctgacctcgtgatccacctgccttggcctcccaaagtgctgggattacaggtgtgagccacctcgcccaacctcagtgggtgattttaacagcatctgaacacaactgatgaaactgaagagagaattagtgaagtggaattgaggccagaagaaaatagatagaatggagtacaatgagtaatcattgcagccctagggaaaaattagaggactaataagaagactgattgctagcttctttttttttttttttgagatggagtctcactctgtcacccaggctggagtgcagtggcgcgatctcggctcactgcaagctctggctcccgggttcacgccattctcctgcctcagcctcccaagtagctgggactacaggcggctgccaccacgtccggctaattttttgtattttttagtagagacgaggtttcaccgtgttagccaagatggtctcgatctcctgacctcatgatccgcccgcctcggcctcgcaaagtgctgggattacaggcgtgagccaccgtgcccggcctgattgctagcttcttaatagaagtaacggaagttgatagacaaagaagtaatatttttaaattgctaatagaaaatgccagtcaataattctgaacctattaaaatatatcattgaagaatgaaagtatattaaatgcatatttagacaagctgagaacttcttagcaatggaacaacattaaagggaattctaaataatattctttaggyggggatgtgatcccaggtggaaacttggagatgcaagaaggaatgaagacttaagacaaaaaaaaaaatgaatgtgtgggtaaatggaaataaacattggctgtataagataagtaaattctgggcttcaaaatacatatggaattaaagaatgaatagtgtgtgtatcaggaggcggtaacttcagtattctgagatctttgcattgttcaagaagtggaaaataatacaaatttacattagactttaagatgaagatgcattttgaaatctctagaataacagccaaaagtatagcaagagattgcrtaactactaggcttaatagaggtggggaaatatgtactaataaagaaagtaaaacaagaaaggagaaaaaaacagtactaagatgatactgggatagtaaatgtcaatgtaaacataattatattacttgcaagtacattaaatggkctaaagcaagtctcaactgaaataattctaagtatattctctgacaacagtgtaattaagccagaaattactaacagccagaattaataacagataatcctcactttttgtaaattttatgtatagttgacccttgaacaatatgggtttgaattgcatgggtcgacttatatatagattttcttccacctctgtcacccctgagatagcaagaccaactcctcttattcctcctcctcctcttcagcctattcaacatgaagacaatgaggatgaagacctttaagatgatcacttctacttaatagtaaatatattttctcttccttacgattttcttgataacattttcttttctctagctttattataagaatacattatataaaacatatacaaaaatatgtgttaattgactgttcatgcaattggtgaggctttatcaatagttaagttttttgggagtcagaagttacgtgtggattttcaactgcctgggggggtttgrtaccctaacccctgcgttgttcaagggtcaactaactgtacttctaaataatccatacatcaaagaagaaaaatcacaatagacatttaagaatatttcaaactgattaataatgaaaacattacatattaaaacttgggggaggtactctttgggagccagccttcaaggcagtgcccagtgattcttgccttctggcacttaggccactgtagtctccttgctgaatagggttgacctgtgaacttgaagatattgagaaaatggtataatgtgactttcagtgtttctgaagttacactacaacataatgaaatatcttttgtcttattctctttaatcactggtcttgggggaagccagttgttaggtagattgcacactcaaactgccctatggaaaggtcttcatggtaataactgatgtcttctgctatagccatgtgaataagccattttggaagcagatccccctattcccagttaagcctttatgtgactgtggctcaggtcgacatcttgactgcatctckcagccttgagacactgagccagacctatctagctaagctgctgttgaattcttggaccatagagactatgagataatgaatatttattgttgtccagtgcagctaaaaattttggggtaagttgtttcatagcagtatataattctcttctgaagttgtgctgaaggggaaatttacacccaattcatgtattagaaagaagctgaaattcagtgatcacaagtgtatttctcaagaagttaggagaagaacaaacaagaagaaagaaattatgaagataagtacagaaattaaggatagaaaaaatgtgcataacggtagtgaggatcaacaaagccagaagttctttgaaagactaaaaatactggtaaaaaacacattgttcagggaacaaaaaagaaacgtgacaaataaccattatcagatttgaaaaaggggtatcactacatatccttcagataataaaaagaggatattttaagcagctttataaaggaaaattgaaggttaatacagagaaaaacaagacacaaaaagaaaatctgaattgacttgtaactatgaaatgcattgtatctgtagttaaacattttctctacctacttattatttaggtaaaaaatgtttggcgctaatctcccaaggaagcaatcagacaaatccaaattgagaaacagtctgtgaaacaaatctcttattcctcaaaagtttggtttcaagaaagatagaaaggtggagagcttttcaataaggaacctcaggaaaagggacaaacgttagtgtaatgtgtgagccttgatttgggttctagatttaggagagaaaaaagctgtaaaggatgcttgagaaatttggaaaatttgaatatggattatataataatgttttatcaatagtaagttttcgaagtattgataatcatagttatgtaggagaatgtcattgttaggagatacacactaaggattttagggttgaagtgatgatgtcagcaaggtagatttggatggttcatgtcagtgtgatatctacatcaggaagcaagtgttgcaaactattaaccattggtgaatcttgatgaccagtgtatgggtgctcatggtactattacgacttttatctagattaaaaatattacaaaattaagtatttgcagaaaatgaacactatactattactacaactgttcatttttagtattgctaggcaagaacaaaaatgggccgggcgcagtggctcacgtctgcaatcctagcactttgggaggccgaggtgggcggatcacgaggtcaggagtttcagaccagcctgaccaacataatgaaaccctgtctgtattaaaaatacaaaaaattagccgggcatggtggygggcacctgtaatcccagctacttgggaggctgaggcaggagaatcgcttgaagccgggaggtggaggttgcagtgagcagagattgcgccactgcacttcccaccaggtgacagtgtgagactctgtctcaaaaaaaaaaaagtacaaatactggaaataaaaaacttttattttccagaagtttggttgcctacttaaaatccaagagaattgaaaaatgccttgacaggttgcagtttatcttgtgaaatagtagctattgaccttaggtagtggcgayggctgcacagcattgtgcatgtaytaaatgccactgaattgttgactttaaaatggttcatatgggccgggcgcggtggcttacgcctgtaatcccagcactttgggaggccgaggcgggcagatcacgaggtcagcagatggagaccatcctggctaacatggtgaaaccccatctctactaawaatataaaaacaacattagccgagcatggtggccagcgcctgtagtcccagctactcgggagaccgaggcaggagaatggcgtgaacctgggagacggagcttgcagtgagccgagatcgcaccactgcactctagcctgggygacagagcgagactcttgactcaaaaaaaaaaaaaaagttcatatggtgagttttatgttatgtgaatttttatctcccctaggatgcatgagtgagcatacaggaagagatttcattttaacagttcaggacagctaactacctttgacgaatacattcttttttttttttttttttttttgttgactgggctcaagtgatgctcccccctcaccctcctgagtagctgggagtagctgggactacaggtgtgtgtcaccacacctggctaagtttttttgtgtgtgttttttgagtagagatggggttttgccatgttgcctgaactggtcacactcctaggctcgagcagtcctcctgccttggcctcccaaagtgctgggattatgtgtgtgagccaccacacctagcctacattctttttaaattttttgtttttagttgacctataatacttgtagaaagacaaagaatacagtgtgatgtttcagtgcatatatgcattgtataaggatcaaatgagggtaattatatccatcactaagcatttatcatttatttgttgtggtaatattcaaaatcttctcttctagctrtcttgaaatgtctatcacattgttatttgctgtactcaccttactgtgtaatggaacaccagaacttattcttcctgtctgattgtaacttaatacccattgaaacaacttctcatggtcccccccttcccccatactccccagccataggtaaccactgttctattctctgcttctgtgaaatcaacttttaaaattcaagggtgaaattacacagtgtttgcctttctgtgccttgctatttcacttaacataatggcctttaggttcatccatattaccacaaacgacggaagaatattctgtttataatgttccattttgtgtgtgtgtatacacrgacacacggcattttctttgtycattcatctgtagatgggtgtttaggttgattcatgtcttgactattgtgaatggcactgcagtaaacatgggagtgcaattatctcttcaatatactgatytcatttccctttggatatacacccaaaagcatagggaacaaaagcaaaaacagacaaatgggattacatcaaactacaaagcttctgcacagcaaaggaaacaaacaatatagatcgaagagacaacctgaagaataggagaaagtacttgtaaactttatgcatctgacaaagagttaatatccagaacatataaggaactcaactcaatagaaaaaaaattcagttaaaaaatgggcaaaagacctgcgtagacatttctaaaaagaacacatacaaatggctgacagatatatgaaaatatgcttaacatcactaattatcaggaaaatgcaaatcaaaaccacagtgagatactacctcaccccagtcagaatggctgttctcaaaaagacaaaggataacaaatgttgggaaggatgtggagaaaggggractcttatgcacttttggtgagaatgtaaattagtacaactattatgggaaacagtatggaggttctcccgcctcccccagaggcaggttctctctctgttgcccaggctggagtgcagtggtgtaatcatagctcgcttggcctcaaacttatgagctcaagtcatcctcytgcctcagccttctgagtagctgggactataggtgtgtgccacgtcatctagttagttcttaattttttrtagagacagtgtcttgctatgtttcacaagctggtcttgaacttctggcctcaagcaatcctcctccattggcctcccaaagcactgggctttataagcatgagccaccctacccagctggaggttcttcacaaaaaaagattggctatatatccaaagaaaataaataatacattctttcatagcaaaagagaggatcagcatatattaaagagtgcttattttaccactgaacaagttgtaaaagtagacgttcttaagctcatgagcctgtggtaaatactaggtagtcactcaaaatgtgtagatttcaagcatactttggactttggaagtagacacatgagattgtagcacggaatcctaaaatcctaggccaaagaagacttttagaaatcatagttcatactgtttcttttatgcaggatttagctaatccatcttagaaaaaaaaagcaagactatttttaatatccagaaatacatattrtagtcattggcgactggccttgagggggcataacaaaacatggttgtatgtcagtgatactgcaattgatgaaatgttgctatttagaaacagtaaaaggaagcccccagaagttaaaaatacctgttggacactaaaaaaacaaaaacaaatcgcaactcttaaaacttcaagcttagaggcttcattagtgaattctgttaaaacttgttagaactgctgagagcttaatacgatggttaaatatatataggacccatgtcttaaaaccagaactttattgtacaccagcaataaasaagtaataaatacaatggaagaagagtataatttgtaatagcaacaaaacccctcaaacacataggaatgaatttaacaggaaatgtgaaatatgtttatgaagaaaggtcttaaaaatactgaccggagtcttgggttggggaaggaaatagtctaagtaagtgaaaatacctctaccatgttcctgaatcagaagattcagtattgtaaatatgtcagatctttcctgattatgctataaaatcagcgtatttacatttgaaattccaatgattttgtttttatggaactgtgccagccaatcaagctcatttaaaagagaattatataagcacggacagcgaaagaagagcaaagaattgtttagccatgctggagatataaaaatgttttagagctgttataaagaaaacagtatatatcagtccatgaatagatgaagatataagtgggacagaaatagctacaaattgcttatctgtctggaaatttgatttagaacaggtgacttaaacatattcttycatggacagttaggtttagaattcctttttttttttttttttktgacggagttccgctcttgttgcccaggctggagtacagtggtgygatctcagctcactgaaatctctgccttccaggttcaagcgattctcctgcctcagcctcccgagtagytgggattacaggcgcccaccaccaygcatggctaattttttgtatttttagtagagacagggtttcaccatgttgatcaggctggtcttgaactcctgacctcaggtgatccacctgccttggccttccaaagtgctgggattacaggcatgagcaactgtgcttggcctctagaattctcaaagtactctgcaaggttgcgagttttactctgatgttttaattaaaaaaaaatttttttgtccaattagcaattcagtgtggaaggtgtttaaattttttttaaagtgaaagcaagtttattaagaaagcaaaggaataaaagaatcttcaattttaattaacaaaaatatccaactactaatataactttaattatactactttttctcattacttttaatgagatagcctgcaaagctcaatgttaggccacattctggaacatatctacttagatataaacaatcactttcaacattaaaaaaaatccataatttcttccttactttgctttctgttaatggcactattagtctttcttttctaagctccttctttgtcttgaatgtttcttgagtcagcaagtttgtttgctttttgagacagagtctcactctgttgcccaggctgaaatgcagtggtgtgatcttggctctttgcaacctcagcctcctgggtagctgggactacaagcatgcgccaccatgcctggctaattttttattttattttatatatatgtttatatacgtatgtgtatatgtccatatatacgtatacgtgtatatatacatatgtacatacatatacktatacatagacgtatatgttgacatatgtgtatatatacatatttatatacatgtatttatatgtatacatatatgtctacatatatacacatgtatatgtatgtatacgtatatatatacatgtatacatacatacatatatatatatattttttttggtaggtgaaggagtctygctgtgttgtcccrgctggagtgcagtggcgccatctcagcctgctgcaacctttgcctcccggattcaagcgattctcctgcctcagcctcctgagtagctgggattatgggcatccgccaccactcctgcctactttttatgttacaggcatccaacatcatgcccggctaatttttgtatttttagtagaggtggtgtttcaccatgttggccaggctggcctcaaacttctgacctcaagtgatctgcctgccttggcctcccatagtactgggatcacagccgtgtgtcatcacgcctggacaattttgtatttttttgtagagacagggtttcgccatgtcacctaggctggtcttgaactcttggactcaagcaattctcactcctcggccccacaaagcgctgggattacaggcatgagcsacagcactcgggcgagtcagcaagttttgatgctcctctcttttggtctttcctccccattctagggggagaagggtggagctgtattccagttaagcttcttscttcttagattaactgggttccctcttggctttttattacatcttgcctcttctttttcaatcaatactgtatattgctgtaagacaaatcgtttggctgcttctggtgtttttacttgaaaagtacagttaccctttaagctgctttgattacatccagattctctattcatttaccccattgccgcatgactttgagaaatgaacactttgttcatatagatctttgtttctatcatataccatattccccctygcttttgaacttgtgctgatattattcctttgcttagtgtgtgtttgttttccttgcattttcctactatttaatccttcctagatgtctctagctagttcatcttcctttctgtagcttgcttgtttagcacttttggtattttattaagtacagatgttagccttattctgaagttgcgctgcagtatagttcctgtgtttccttattttatggctttgttttcaaaatatttaaatcattgacccatttcgaatgtatcctgatgtagtctgaagaatggacttagtttttttccagattactgcacaattgtaataccatttatgcagtgatccattgttcgcccaacagatttgagataataccttaattstacttaagtcttagattaggattcatgttttctcccatttttccttccagtttttcagtcagctttcccaggttgaatagggtctagttttggattgtattttttccattggtcattctatcagtgtaccctgttttgtctgatcattttaattattaacactctgtgatatgctttaatatctagtaggactagatctccaccttgttaaagtttttctggccagycttgttyattctgaaaataggcttattgagatcatattacatataaatgaatgtggagaggttatgattttttcactacggtagtattacctatattttggatttcatgtgtttatttcctgaaactgtcaattgaagttaagtttgcaagactattraactgtaacttaagtagaagttctggaaactgaattgtatatgttttactttttagtttagcccgatggccaaaggctctcaaagatayatggtttccactggtgctgatgggacagtttgcttttggcaatgggatttagaatccttaaaatttaggtaagtggctttaattatgtaacaggttttgttktttaatgtagttacagtttaatctaatgaaatgaagttttattgttatgagaaattgtgtattgttgcttttttttaacctttgaacttaatttttattatatacagcatatgtgccatattgactatttcctatttataattatgtagatagcaggatttgtaaaagaagcatagcttttctatcttagcacatttttgcaaagacaaagtaaggcatttaaaataataggtatataattggaaattcaggcaggaacatttgagagtcataagacctgtattgtatacctgtgctgtctaatacagtagtcactagccatatatgatcgttgagcactttaaatgtggctagtgcaattgaggaactgaattgataatttaaatttaaaacttacaattgattaatgtattaaaacattttttttccttttgttttcgttttctttttttttttctttyttttttttttttttgagatggagtctcactctgttgcccaggctggagtgtgatggcgtgatctcggctcactgcagcctctgcctcctgggttcaagtgattctcctgcctcagcctcctgagtagctgggattacaggtgcccgccaccacgtccagctaatttttgtatttttagtagagatggagtttcaccaggttggccaggctagtctcaaactcctgatctcaggtgatccacccgccttggcctcccaaagtactgggatcacaggcgtgagccaccacgcctggcctgttagaaaattaagcatatcttgaataacgagtatgtgaaattttcaatgagttttgggaaatccaaatatagataaaatatttttgttaaaaattgagttgtcaaattgagatgtattttgagtctcaaatacacactggaaaatttcaaagacttaatatgaaagtatcttataattttattgatttggattacatgttgatattttgggtgtattgggttaaaggaaatatgattaatttgatctttttatattttgtaaaaatacatggaaatctgtggaaatatttgatatacaataaggtattatagaaataagattatagctgggtgttgtgtgcctgtggtccccagccactagggaggctgaggctggagggtcccttgagcccaagagtttgtgtctagtgtgggcaacatggcgagaccctgtctcttaaaaaattataatatttaaatatgctagattaaaactaatattttaagctgtgttaatgtggtaaaataatctattttaaagcagcatcttcttcttttaaagcccacgtcccctgaagttcactgaaaagcctaggccaggcgttcaaatgctttgttcttcttttagtgttggtaagaacttcttcacatttttttcttagttttttttttttaaacatytattaaatgaccacttggttgctaagaacttttattagctacatggtaaatgasttctggtgtttatttcattaggttcaatttatgatgtttattttgttagccttgttcttccagtcctccagtctgcctttctctgatttctggtagtaatcagtgatataagagatggctggtaaaagggaggcttgaggtgtccacacaagtgattcctatgccagtactatgtgtatgataatctaaatttgtgattttctttgaataggctaaactgtgtatgtttgatagtttaaatttatttcccacacataatatcttgatgaaattaytctttttcagtttttgtacagtgaacttgtgtggtaacctttctcttttttyggataggtcaaagacttttccctcataaaatctgaaaacttgaacaagctagggttaggtatgtagaattgtttagaaagcagaacttcttttcttaaaaatatttttagagcrctggtgcttaattggcattatattgccacccttaataatacagatggggaggccaggcacagtgactcaatgcctgtaatcccagtcctttgggaggccgagatgggaggattgcttcagcccaggaattcgagcccagccctggcaacatagggagaacccatctctaaaaaaaaacaaaacaaaaattatctgggcatggtgcacacctgtagtcccagctactcaggagactaggtgggagtattgcttgtgtccaggaggttgaggctgcagtgagccatggtcacaccactgcactccagcctgggcgacagactgagaccatgttccccgccccaccagctggctcacgcctgtaatcccaacactttaggaggctgaggcgggtggatcacctgaggtcaggagttcgagaccatcctgaccaacatggtgagacccccatctctactaaaaatacaaaaaattagctgggcatgctggtgtgctcctgtaatcccagctactcagcaggctgaggcagtagaattacttgaacctgggaggtagaagttgcagtgagccgagatcacaccattgggctccagactgggcgacagagtgagattctgtctcaaaaaaaacaggaggagattgtgaatgtttccagattgaattaattttgttttttaaagctacaagttcagctttataacctctatatagtgagtcagaaaatgtaactgttgagataaacttagttttagggtaaatgatctttcttttttatattttaatatggaaattwgatttgttcaggtatttgttataaactggatgtttaaaccttaccatttttatttcaggtggtatgtttttagccacaggtagtactgatcatgtaatcagaatgtattttttgggttttgaagcacccgaaaaaatcgcagaacttgaaagccacactgtaagcatccacgttttaaaatcctttagattaattgttaatactattcctgttattgctaaggggcattgttattggctctacttttatttttaattttttttctgttgaacaaatgaactgtcatttataactttttgatggtattaagttttaaaatattaaatcatagttgcatttctgagataagtcattgcttgtgaatgttatcttaaatttttgctgaattctatttgacagttaaaatattgttagagatgtttgtatatttataaaaatgaaaatgtctaggtacaatatagtttttgttaattctattctaattttaatttaagcatacaagcaattatatttaaaggggaggtatgtcactggcaactcagattagcacttgagaggcctaatattttacagtggttattttagctttatgttcaaaatcttgattatgacagttgatctgrgtgggttaactttaagtgagcctgtttatctaaccaagcccatgaaataagaatgtgattttaataatgcatagtaagatagaaaactgtcagtgttctgaagtactggtcagggttrggccatcttttcttttatttgaagcttttgggaaggcagtccacatccagaggttatttgatagatacagatttaaataacttaaaacaacaattgaaaatgccttatttttagctactttaaagcctatattttgagcactttccacacatttcacttccatataagtcatcttaaacagatgtaattataaatactgctttaagtttagaagcaaggctttttttcctgttagatgtgcctttctttgaaatgaaagctgtattttagtagtcttaggtttgtagttagtcttcacttaaaattataaaacatgttgaatgacagggytaagcaacacaagtgcaaattttrcttgttaaagcaaataggcttctagcattaaaacttcattttttcaaattcacagaccatgtagatgatcatttttgtatttgtccttttcccccctttaggataaagtagatagtatccaattttgtaacaatggtgatcggtaagtgtgtgttttgtatgtgtgtgtgtgtgttattaggcaaatataatgtgctacatgttagtatagctaacctgtcattttgtatgtattttttccctttatattattatgattatttatttatttatttattttttgagatggagtttcgctctcgttgcccaggctggagtgcagtggcacaatctcggctcactgcaacctccacctcttgggttcaagttaatcttctacctcagcctcctgagtagctgggattacaggcgcctgccactgtgcccggctaactttgtatttttagtagagacggggttcctccatgttggtcagtctggtctcgaactcccgacttcaggtgatctgcctgcctcgccctcctaaagtgctgggattacaggcgtgagccaccttgctcagccattattttttatttttagttgactaataattgtctatgtttatggagtaagtacactgtggtgttttaatatatatttacattgtgggatgattaaatcaagccaataaacatctctgccacttcacatactgagcatttttctgtagtcagaacatctgaaatctactcagaaattttgaaataatatataattaactgtcactttgtatattgcaggtatttattagtaaatgtattaattgaatgaaaagtgtctagggcaggggttgggggaagaacacatgaaatgtaagtttttagaattgtagtttctgccagcttctagcgaccaaaagtagtttttctttggctagatgtctgatttactgaaaaaattatgtgtaaggatcattaaatttcttgtttgggtagttaaaaaaaacttttctaagaaaccaccgtgatatatcctgcaaagaaattattacttaaatcatatactccttctttgcctccattgtgtgtcaggtccctttgctaaactaattgttgagaacttaatttgttaatagattgatttatttttacacagtgtccaacatgaattaatttgaattaacaagtaagatgtttaaaatggagctattgctcttattttcctatacttcaaaacttttttctgttttttttttcttcttggcattcttatttaattatttttttttgagacggagtctagctctgttgcctaggctggagtgcagtggtgcagcctcggctcactgcactgcaacctcccchtcctgggttcaagcgattctcctgtcttagcctcctgagtagctgcgattacaggcatgtgccaccacgcctggctaatttttgtatttttagtagagacggggtttcaccatgttggtcagactgatctcgaactcctgaccttgtgatccacccaccttggcctcccaaagtgctgggattacagacatgagccactgcaggttgcctcttctcagcattcttatacattgtattttcaaaacttaatctgtttgaaaagctattgattgagtttgaggtgtgttttatttcatagggccgggcaaatcatagcaaaccaaattttttttcccatccagatacgctctaaataccttgtcttttgaattaacacctgtggattgtcctgttgttaggacagcttcattacattctttttttgcatgtgattttaattgtagcccttgttggaaagtgtgtgaatatagtaagatcctgttctgaatgttttaaggttcctaagtggtagcagagatggaacagcacggatttggagatttgagcagttagaatggaggagcattttattggatatggctaccagaatctcagggtaagttgagattgttagaagtaggtgcatcataggtgttcgatctgtctctctctctctctctctctckckctctgtgtctctcagtggttattttgttgaggggattatagctaccttctattacgaagagctgtggtataagtgaatagctgcgtactgcatatcaggtgaacagagacatccaggtaaatttatccttacgttgtrtagcaaagaataacatgtactttttctatggttcaaagcattgacctccttcttagatgttgcatttaaaagcttctacaagtaaaaaagataaaattaactcaagtacrttaagagtggaaattatacttttctgtggataggatttttgaaaaaatttaaaagtagcttagagccaaggctgggaaatagggtaagcaaacatactttattattaaggttaaaaaagaaaattgagctccagcctgggtgacagagcgagactctctaaaaataaaagtcatagattttactttagagtttgtttcctgattttaactttgcactttttcatatcagtttttctgagaaaygtttccacattttgtcttctggaaatcatgtctgctttatttttatttaaaaaaaatggtttagggtctcactccatcgcccaggctggagcgccagtggtatgatcgtgactcacttcagccttgacattccggcctcaggcagtccccccatctcagcctgtccccccatctcagccttccaagtagctgggactatgagcatgagccaccatgcctggctaatttttatgtttattttttgtaaagacttttgttcaggctcatcttgaactcttgggctcaagtgatcctcttgcctctgcctcccaaatgctttgtttttaacaacagaaattgacttatattctctgctgtagctcaaagaattgtattgcattttcaaaataaatttgatcttgtttttttgtggaattatctgtgatagagaatgaaaagtatatatactggaaatttgataacccttgctcataaacaaattaaaaaatctttattatatataaaaatgttacatctcagtatgaaagtgaatactgtcaatccttgattagttgaaataaagggaatgggggtgaagataatttaaagtcagtttcacctattattgttttattaaggaaaatagaaactgtcaaaacttgaatgaaaatttttaaatgagactgaaaactgtttagttttcttgctgacgcactcgatccatgaaggggacttttcctataattttcttcatgagaaaatatcttctcattttaagttttcttgctttcaaatcttgaaaaacagagtcttctgtatgtaagaattgattgatctgtttattttagtgttctaatattggcgaatcaacttgatgaaatggaacatatctgttagtaaattcaaagttattaatttgtggctgggcatagtggctcatgcctgtattcccagcactttgggaggccaaggcaggtggatcacctgaggtcaggatatcgagactagcctggccaacatggtgaaaccctgcctctactaaaaaaaaatagaaaaattagccggatatggtggcatgcgcctgtaatcccagctactcgggaggctaaagcaggagaatcagttgaacccaggagatagaggtttcagtgagcctagatggagccactacaccccagcctgggcgacagagctagactccacctcaaaaaaaaaaaaaaaaagcaatgttattacttcaaaagccttttagtttaaagtgaagaatggagtctttgcctttattccattttacttttttttttggagacagagtcttgctctgtcgcccaggctggagtgcagtggtgcgatctctgctcactgcaagccctgcctcctgggttcatgccgttctcctgcctcagcctcacgagtagctgagactacaggcgcccgccacatgcccggctaattttttttgtatttttagtagagacggggtttcaccatgttagccaggatggtctttttttttttttttatttatttaagttttagggtacatgtgcacaatgtgcaggttagttacatatgtatacatgtgcaaccaggatggtcttgatctcctgacctcgtgatccacccgcgtcgccctcccaaagatctgggattacaggcgtgagccaccgcgcccggcctccattttacttcttamtattattctaccctcaacaccaatcaatctagttagaattattctctcttctgtgtgttttttttttgtaattacatagatagctgttttataacactcattctatattctttttttttttttttttgaaatggagtggcacggtctcagctcattgcaaccttcgcctcctgggttcaagygattctccttcctcagcctcccaagtagctgggattacaggagcctgtcactacgcccagctaatttttgtattttttatagaggcatgatttcatcctgttggccaggttggtctggaactcctgacctcaagtgatccgcccaccttggcctytcaaaagtgctgggattataggtgtgagctaccatgcccagcctttgttaattaaaacatgttagatgcttgtaawatctttttttttttttttttttttttgagacggagtcttgctctgttgcccaggctggagtgcagtggtgcgatcttggctcactgtaagttccgcctcctgggttcatgctatcctcccacctcagcctcccgagtagtagggactacaggtgcccaccaccacgcctggctaattttgcttttttttgtatttttagtagagacgaggtttcaccgtgttagccaggatggtctcaatctcctgacctcgttatccgcctgcctcggcctctcaaaatgctgggattacaggcatgagccaccgtgcccggccgatgcttgtaatttcttaaaacgtattctattatttcagaaccattaggccttccctaccccactgttgactactgtaatgcagagaccctttgcatatcacttttttattttttgagaacgtagtcttgctctgtcacccagkctggagtgcaatggtgcggtcttggttcactgcagactctgtctcccaggttccaatgattctcctgcctcagccttctgagtagctgggaatacaggtgtgtgccaccacacctggctaatgttgtatttttagtagagacrgggtttcaccatgttggccaggctagtctcaaaccgctgacctcgtgatctgcctgcctcggtctcccaagatgctgggattacaggcgtgagccaccgtgtctggccctccataacacttttataaaggatgaaaaacattctaggcatgtgtatccaagaccgttcttgccaaggggcctgtaggagtagactgtaggaaagttgtatgaagagatgagaatagtcccatttacagttcagattgaacatctgtgtgtcagttatttttctaaacattggggatatgaatatgaattaccttatttttgtgttcctaaaatttttttgtcttctatggagagaaacagttgaaagtaagtgttagcaataggtttgtattcagaagaaggaaataataggaaagaagtagggagaaaargcattgctttcataagcagtaatggtgtcctaaaatctgcccttattcagtctctgtactgtttctaaattatccctcccttcttcaggttttgccctcacctgtttctagacagtctgttctgggtcagctgtgatgaactcactgtagggttgataagataggcacatgggttggatttctttatttttgtattgatgagagattgtatacattgtatagccagccatctaaataagyttacatgttgtgtatttttttgttagggacttatcttcygaagaggaaaggtttatgaaacctaaagtaacaatgatagcttggaatcaaaatgatagcattgttgtcacagctgtgaatgatcatgtcctcaaagtgtggaattcttacactggacaactgcttcataacttaatggtaggtaatttctggtacartgtaacaaatgagattttttgaaatatgattgtaattttgaagctataaaaataatatattgaacaagttgtttctctcatgtaaactatgaaatgattagaaatttttataattataaattattgtcgaatacatttctaaaagtatatgctgtaacagtatgtatttttaaattttcaatttgtaacttgtaaaccctccttaatgttatgactttgttaaataaagggacatgctgatgaagtatttgttctggagacacatccctttgattccagaattatgttatctgcaggacatgatggcagcatatttatatgggatattacmaaaggtaccaagatgaaacattattttaatatggtaagtgaagtgagatgtaccttgatacatgcttgataatttgtttagagtatttgggttatgcggcttagccagaaattgatctgcttgttttggcagtttgtttttacaaatcagcatattcaaagcctgctaaatattagacagctacatgtatatacgtacatacatgaaattctctgtatgactgatttatatgagggagacatttttaagttacctgttgagcattttatgtgcctgtgtgtttaaactggtaaaagtatggcaattgtaaaaactttttcactacttgaatttattgaaatattctataacaaattgaaatatttgataaatagaaatataaaaatagtaataaaataaaatgacattattaatattcaatattaaccaaatattacaatatttgattactccaatttcagtaaccttgggctgggtgtggtggctctgaactcctaacactttgggaggctgagacaggaggattgcttgagcccaggaattcaagtccagcctgggcaatgtagtgagacactctcttaaaaaaaaaaatcccaagatggttgaaatagagatcaaacatcattaggttttcccggccttttttctttatgtacaggtgtattcttaaaaaaaaaaaatttttttttttgcatatgtatattctagaaccaaatgaggatcctactgtatctttttagaatttctccacataatcataattatagttactaatcagcaaatttaacatttataagatagcattrtctagtcaggtctatagtaacatctttttagatatattttgctccgtagaccagaatccagttcaggctcatgcgttgtgtttaagtggttgtatctttctaggtttcttttttttcttttctttttcttttctttttgagacagagtctcgctctgtcgcccaggctggagtgcagtggcgcaatctcaactcactgcaagctccgcctcccgggttcacgctattctcctgcctcagcctcccaagtaattggaactacaggcacccgccaccaaacctggctaatttttttgtattttttagtagagacggggtttcaccgtgttagccaggatggtctccatctcttgacctcatgatccatctgccttggcctcccaaagtgttgggattacaggcgtgagccactgtgcctggcctctakttttctttaattgtcaccagcccctctcagccttttttctttttcctctttcttggcctttaacttttgttgaatattascaagtattgttacagagtgtcctcagttttgtctgatattttttcatgattarattgttatagttttttaaatgaaataaaacataagtgatattgtgtccttcatgaatcatattaggaggcacatgatatttatttgtccccttactatggtgataattttttttttttttttttggagatggagtttctctcttgttgcccaggctggagttcaatggcacaatctggggtcgctgcgacctccgcctcctgggttcaagtgattctgctgcctcagcctcccgartagctgggatttacaggcacctgccatcacatccagctaattttttgtatttttagtagagatggggtttcaccatcttggccaggctggtcttgaactcctgacttcaagtgatcacccgcctcggcctcccaatataattattaaactaatttttttagtagcgcttttgagactaatctgaatatcctgtttctcattaaatttttacccacaagtattggatccattgaagattttccaatggcattattccttccatatttattagttggtgtctttgcacacagkggtatttttttttcctcctccaacttctaagttcaggggctacctgctgtgtgcaggatgtgcaggttggttacgtgggtaaatgtgcttgcacatagttttgtaatcttatttcatgtaaaacctttttttttgaaatttttatttttaaagaatttacagatgtatttttgagtataaattcagcctgtctgagaagaaagttaacttttacacaattaatttctattgttgagtacttaagtggtttctaaaatacgtatgacaataacactttgaatagccttgtacatgattatttccctaagataaattctgaaggaattattgtgtaaaagggttttagcactgttaaggctttatatgtttgagacattttgtgaatttactcttcagtttatactgttacaattcaaagtgcaattttttattgttttgtttgagacagagtctctctctgtcgcccaggctggagtgcagtggtgtggtctcggctcactgcaagctccgcctcccgggttcacgccattctcccgcctcagcctctcaagtagctgggattacacgcgcctgccaccacgcccggctaattttatttttgtgtttttagtagagatggggtttcaccatgttagccaggatggtctcgatctcctgaccttgtgatccgcccgcctcggcctcccaaagtgctgggattacaggcttgagccactgtacctggcctgtgtgatgtattttagaggcagtgtagtagcatcctattgatgctgatgcattcttagacctttgattctcaggttcttagacctttgattctcaggttcttagacctttgattaaatgcattctaaaacattttamatagtatgatcaaagtacaaatagacaattaggcatctctgaaagctgcgtttctgtgtattcaaattattggaaaaagaactaaacattcttggacaatttttctgtcgttttaaaatccgtgggatacatccattaccttaactatcctttcatactcagtaataatattacatcctgaatttaactcctcaaaacaaaaaactacattaatttaggctttaagcagaatataagcggaaaaactctatgccaaagaataatctgaaaaaacatttcacgtgggcaacaatgatcttatttccagttgcatagccaaaattggccttgtttactgacatttccttactgctcagctaagaggctcataattcctaattctagatagactaaatagggttgtcagttattaatagcaacaatatttcatgaatacgtaataaactttaatgtgacatttttctccagacacagttgcaggttgcgttttgtcaggaatcattgtataggacgcttccagttacaagtgaaaccccaagtcstccttgctctgcttagataggtctgcccacttgagaaaactttcatctcagcaagtatttatagaaaagcttttggtgctgttaagtccacatgtatgatgggcagagttgctgccaccatcttcagctttccagctttgagattttgccactccctccccactggcatctgctttaaccatgactgaaggtcccaggccagggatgcaaaatggtacatatatgcaggttgtgctgtggcacaggtggctcctagaaggaccatgtgggtgaaaccatgttcttatgttttaatgatcagttggaggaaaaaaaatayataatatatatacacacacaattttttcctttttatgttaagagaatatgaattaatatgcacatcttattcagcaatcctctgaatatccgagtaactttattttttccacgtttgctaattgtcatccttttcatgtgcaacaatagtgaagtatcactattcaagcagtgacttacttgggcgtggacgtgagtttgttctggcagttactgagtagatgtctcatttctccaacaccgaacgcgtaacatttagttactggaaagttaaaggtgcagacaacaaatatgcatagctctacactgtagagttaaccaaataactaacttaactataaattgatgatattaaactaatatagtttacagtttaaaaggaagaataaaacagtataaaagtaatctatttaaggttacactcatgatagacttagagcatcctttctgaaatctctgttagggtagttgtggctgcagactttttcatatatatgcttgagacccggcagcattgccaaattttgcatggtgcttagtcatcttagtaatgagctgaagtagagcccaccttaaaatctagaaaagtgttcrttttagttcatgaataccaaatttggttaatctttaatcatttatcttgtagcttattatccttttattatatactaagacaaaaatttatgaaattgtttataagaagtaaaagaagccttcacyttggattgggttgttagccttcattggagcacttggagaactaatgcttagaagaactttgaagacttttttctaggctagttgtatccaaaatcaattttatttttttggaatagtgattgatgtatatgcttaatgaaacatttgtttttatttttattttacagagtctcactctgtcacccaggcttgagtgcagtggagtacagtggtgcagtcttggctcactgcaacccctgcctccccggttcaaacgattctcgtgtctcagyttcctgagtagctgggactacagacgcacactgccacgcccggctaattttttgtatttttagtagagacagggtttcaccatgttgcccagggtggtcttgaactcctgtgctcaggcagtccacctgcttccacctcataaagtgctaggattacaggtatgagccaccatgcctggctgaaactttttttttttttttcagaagggatatattgtcacaggttatccacattaaaaaagtttacatagcaaatcacttgcatagaattggtcctaacttttttccttttgtgtttcctagattgaaggacaaggacatggagctgtgtttgactgtaagttttcacaggatggacarcattttgcctgtacagattctcatgggcaccttctgatatttggttttggatgcagcaaaccatatgaaaaggtcatttttaatactttgttgtagcatgcaagtaatagttatcagctgtgttttggaaataagtagttatgagctatgttttggaaacagtttagctgagtgatttgatttccttgtttttctagttttaattaactgtttaatatttgtttcctttaaaatgtgtgaaccttaaaatgtcatcctgtgaacttcatttttctagattcctgatcagatgttcttccatactgactatcgaccacttattagagattctaataattatgtcttagatgagcaaactcagcaggctcctcatcttatgcctccaccattcttggtagatgtagatggaaatcctcatccaaccaagtatcagagattagtaccaggccgagaaaattctgcagatgaacatttgattccacagctgggctatgtggcaacaagtaagtgcagtcttttttttttttttttttaaagttgtacttgaatattttaaagtataatataaataatttccttacctttagatccccaattattaatattttgcaatatttgttttattattttttttctgtgtattgttttgaaccatttaacttctggacctcatgtaccatttacctctaaataagaacgacattctcttacataactatagacacttatgacaattaggacgttttacactcagataatactattatcaaatctatagtgtgtaaccaaaaatttccagttattctagtaatgttcgtttatagcttytaaaattctcccaatttttatttgggaccacatacgaaatacgaaagttagttgtcatagttccttaatttcctgtaatctggagcaggttgtcagtttttgactttcatgatgttgatgtatttgaagattacaggtcaggaattttgtagaaggcctcaatctgggtttgtctacttcttgattaggttccggttatgcatttttgacagaatacaacataaatgatgttctagtcttaatagagcatactgtcaggatgcttatgattgtggtttgtctaattactggtaatgttgtttttgaacactataaacttagtatttttctctttgtaattaatagtaatttgtggggagatatgtcaataacctgttcattgtcaaagtttaccctcaagttttaggacccattgatgagttttgcctgaatcggttgttactgtgaatactccaaagtggttattttctaacttcatcattgttctgtcattgcatcatatgtatcattgctccctcattgcgtcatatgtatcattgcatatgactgtctattgctcacccctttatttattgatgaggcttattaagttttagtatgggcttctgggtgtggctaatgggttgtattactcacataatccttaggtttgactctcagagccttttgaagctgtccttccccaagtccttacactttttcagtcacttttttccttttctggatgtaggatgttccaggtttgtcttgtacttttctctgtcgtagccaagtgcaaagttcttttttgtgttaatagcagggcagtgtttctctacagatgttaaagaaaaaatgctattttgtttgtttggatgaggatttactgaaactaaatcaccagctatatataaagtaaaaacctaatgtagattactatatggttgctatttcaaatgttattttttattacttttattgaagtgtactttatatacaaaattcaccaattttaagtgtacaattcaagtgtatgtgtgtttattttttgagacagggtcttactcgtttscccaggctggagtgcagtggtgcgatcttggctgactgcaggagggtcaagtgatcctcctacctcagcctcctgagtagctgggactgtaggcgtgtgctaacacacctggctaatttttgtatttttagtagagatggggttttgccatgttgcccaggctgtcaagtatgttttgacagatgttaaataataagtaactaccaccacaatcaagatacaaaccatttatactgcccccaaaagtccccaggacctgtttggagtcagtcctctcctttctcccagtcccttgtaatcagtgttacattttctgtcactttaattttgtcctttaagagggttttatatacaaagtgtaatctttttgagacggagtcttgctccgtcggcagactggagtgcagtggcatgatcttggctcactgcaacctccgccacccgggttcaagtggttttcctgcctcagcctcctgagtagctgggactacaggtgtgtgccaccacacccagctaatttttgtatttttaggagagatggggtttcaccatgttggccaggatggtctcgatctcttgacctcatgatccgccygcctcggcctcccaaagtggtgggattacaggcatgaggctccgcgcttggccacaaagtgtaatcttttgtgtctggcttctttgacttagtgtggtgcttttgagattcattagtgttgttgcatgtatcagtagtttgttcctgtttattcactggggctgataataccccatggaatagatgggtatattatcatttgtttttgcattcactaatggttaaaggcttgtttccagtttggggctatcatccagattgaaatatccaactgtcacgtggaatttgtcatttctctcttcagtttactcagtttttactttatgtattttaaagttcattcattaggtgcatayacattttgaattgcttgtcttctggatgaaataattcttttctcatgaaatgtttctctgtatctctgaaaatattttttgttttgaagagtcttatttcatattaatatagccaattcaacttgttttggattaggattgtcatggtatatctttgtcagttcttccagctgatctgtgtctttatatatctaatctgataacttttaattgggatttaagtattaagtactctattaagtgtagagtatttacacttaaatgttcatatggtatgggtttgaacataagagtattcctatttgtttcctctatattcttttcattctttgtgcctttttcctttttcttttttttttcttctttgggattgatgatttttttttgtgttccatatgacctccactaatgtcttactagcaatacstgtttatttgtatgtaatggttgctttagggcagaaattgtcaatgtgtggtttgcagacccataggtgtatctgcaacctttcatggagtctgcaaggtcacagccatcttcataacaatactgagatatttatttttttacagtgttgacatttgtactgatggatcatgggtgggtagaaataaacttctggcactgtagcacaaatcttggttgtggcaccaaaatagtaggagttattatattctttactgctctgcacatgaatacatgtctttttactattctaggtattaaaactggaagtgtacgtaaagcacttctgctgtgtattctggctcctgcgaacttgaactattttctgtcctgtgagagctctgcaaatttttgtgcaactgcttttttatattttcccctcagtagtggagttctaccccatgtgcacacataacagtatttaattaaaaaaattttttttgagacagagtcttgctctgttgcccaggctggagttcattggtgtgatctcggcttattgcaacctttgcctctggggttcaagcagtttccctgcctcagcttcccacgtagctgggagtacaggtgtgcaccaccacaccaggctaatttttgtatttttagtacagatgaagtttcaccatgctggccagtctggtctcgaactcctgacctcaggtgatccgcccacctcagcctcccaaagtgcagggattacagacaggcgtgagccaccatgcccggccacgtatcagtatttagtcaaataattgatgagacctcattacagatctttggagctttgtgtgcagttcactctcctctgatattcagtcctgcgtattttaacattcttcttccagcaaactctcacctctgtctcctcaactcagttagatctgtggatgctgtttgggttctctcttttgttctgtaacctggagactacctccagacagtaatctggagcaatcagagggtttgtctccattgttccccttctctcagggatcacagttttgtgctgcctgttgtccagtgtctgaaagcttttgttttacatatattttttccagtattgtagttgtttatggcagaaggacacttcctgcggcagttaagttttcatgggtagaaccctccttcaatatttcagtatcgattgtattattccatagagacagttaacattctgatatttgagaarttaacagttaagtgttctgtgctatgaaagaaaagttaggctgagtgcagtggctcacgcttgtaatcttagcactttgggaggctgaggcaggcaggcggattgcttgagctcaggagttcaagaccagcctgggcaatatagcaagactttgtgtctaccaaaaagaaaaaaaagaaaagttatatagccttaggttattttggcttatgccgattagaaatcttctttgccgttttccctttggtatcatgttgtaatcttaggaattttgtgttataagcaattctaattaaaatcttcttatctttttagattaagcctctatgtactgccttttcaactcattttttgagactgataaaatttttaaagacaaagttaatatgagatataacatttagctcttttaagttcttctttggtttccatagcaaaacaaagacattatcagtgatatgcaagggagtcttactcaggtagcaggatggaaatgtcctcccttgcccatcccataatactatatgaggttttacagtttctctatctgtctttatggtggcaagttatatctttgcattccttttgattatcaccttattaatctcctttatttttaattttatttatttatttttttgagacacagtttgactcttgtcacccaggctagagtgcagtggcataatcttggctcactgcaaccttcgcctcctgggttcaggcaattctctagactcagcctcctgagtagctgtgactacaggcgtgcgccaccaggcccggctaatttttttttgtattttcagtagagactggtcttgaactcttgacctcaagtgatccacctgccttggcctccaaaagtgctgggattacagatgtgagccaccacgccccggctgtaatcccagcactttgggaggtcgaggtgggtggatcatgaggtcaggagattgagaccatcctggctaacacggtgaaaccctgtctctactgaaaaaaaagaaatacaaaaaattagccgggcatggtggtgggcacctgtagtcccagctagtcgggaggccgaggcaggagaatggcctgaacccaggaggcagagcttgcagtaagccaagatcacgccactgcactccagcctgggcaacaaaagtgagactccgtctcagaaaaactctgtacttgaagtaagaattatgggtagtagctatgttaaaaacatatctaagagagtaatttgagattagtcggagaggcttgtgtaattaccaccatcaattgcactgttctccgaggactcttggggcagagggagagctaaagtcttgttgaaggcttaaaaaaggtcttacctcccttttttcccctttcttaagacatagagaagaaattaartctcagggatttttctccacattggaaatgacccatagttgctctgttccagttagagactctggggaataagattttagtgaaatatatcgagtatggtgaggggcattagtgtgaaacagcgtaataaagttttacagaaatatgtttccatgcttccacttgcaggaatttcagaggctgctttcaggtttttgtggtatttagtcctctacaggaagacttttgttggctttgaatcttttctctgacttcttggtgaatrtgtasagtatctttttaaactggttatttttcaaaaatgggaaattctgaccattgttaatgtattttaatttgtaccctaacgaaatttttttttgttttctgcttttatatgattatatattaaataattgaatttgtaggtgatggagaggtgattgaacaaattataagcctgcaaaccaatgataatgatgaacgcagcccagaatcgagtattcttgatggaatgataagacagttgcagcagcagcaagatcagagaatgggagcagatcaggatactattccaagaggactttcaaatggtgaagaaacaccccggagaggtaataaatagtgataaatgttttacctgaatatggctgcattgaaattaaagagtaaacgaagtctttgtcaggtacatgtaatgtgagaaacttaagtaaacaatgtatttttacaacttaattagtagtctgaaggtagctttatgaggtgtgagataatgtagtaacaaatgggtctttgaatttcaagtactgctgaagccttttgtactctaaaaatacagtatttacaaaattgtattaaataggagcgaataacagattggtttttaaaataaaaccatagttctagcttttctttgctttaacattggtaatttttgaaaaactgtattgggtagagtatgatttttcttattgaatcagaaagtttgaaaacttartgagttttcagtgttgagtccttaaaagtacagtgtagaagtaaatacataacaatcaccagtctcccctcagttagttccactatttactttgtttctagtccaatatgattaacaagtttcattattcatttaaaatagtactttttttctcttaaacttacagcataagactttgtttttttattttggaaagaaaggttggaagaaggatacaatgaacagccatatattctttacctagattccttatattactatacttgcttttgcttttttttgtgtatgtgtgcacacacacattcctatgtgttttttttcagaagcatttgaaagtaagacttgtgacactttatatcttaatgcttcatcctgtatcatccaagaaccagagatattctcttacataaccataatacagtgatcacattcaacaagctgaatatgataattgttgatatagcactgctatctaattttgagtccttacttactcttccccagttgtcccaataactaactgtccttcctcatggccttttttaaaaaaaaaaaatttaggatttaattagccctgctcattacattttaggattatgtcttttaatccagaaaagtttcctcagagcactggtactttggaaagcttcaggcctgttgttttcacaagatttctctcaatttagatttgtctaattatttcctcataattgggttcaggttaagcatttagacaggaatactgaatagttgatgctatgtcctcagtctgtcatggcaagaggcacaagatacataaacgcattcttctggcacctactgtattgccttaacaatatattctagaaatcgtatcagttcacagaattcttcatcctattttttttttttttttttaaatagcttcatactactcctctgtgtggagtaattaacctttctaatctctttatgggcatttaggttgtttcttatgctttgctgttataagtgatgtgataaataactttatgcatgttttcagattgttggagaataatgctrtgacttgggcagttaaatttagaatttatatttctcagttcaaaaatgtttcttcaatatatagtattttaatataaatgcttggtttactagcggggcatttaatgccatttgaagttggtgaagcatagtgtgttctctaatgcacattggtacacatgtgattggtaaatagagtgtggtacatagaagagtgcagaagttgcattcactcgtrgatttttccctaggcaagaagagctggcacagctggagtmcagctccatagcctcccacaagaatcaatatcaccctcagtttttctgttgtgttagtagcaggagccccttcaccttctgttgtaagaaaatgagcactttgtctaggacttcctcctcagaggctagtctctctgtggcttccagctcatgggaggttgcgcagcctcctatacccaccttaacagcctctgtggcttccagctcatgggaggttgcgcagcctcctatacccaccttaacagcagcccctcaggctcagagcgtcagtgttgtcttcattgcctcatcacccacctgcccagctttagtttaagcacgactggcatttacccacaacattttatttgtttgactttttaataaccatcttgacagctacttgccttggtggctcagattatctcttgagaatcatgagaatcatgattactgttgcaagagctcttgtaaaaccactttgatttcaggtatctgtcttcagtgcaaatttttcaaaaagactttttttaktgtgcaatttttaagaaggcacagtttttaggaatgcatatataatgtaatgtgaaatgtacattttataatttcagaaagtctagtaaaaattgaaattgaggtttaatagttaatgtttgttccgtattctacattttgatcttagtcatgttaagattctgtcaggctgggtgcagtggctcatgcctataatcccagcactttgggaagccgtggttaagaggattgcttgaggccaggcatttgcgactagcccgggcaacatagcaagaccttgtctgtacagaaaataaattttaaaaagatttttctcacaaagttttttcagtagatactatcttctcttagttctttatttttggtgcgcatcttaggtgaacgtgtgcttgttacatgctaaatgtatattagtttaaaagtgtattggaatcacttccccatcatattttcctaggttttagaaggctgagcttagacattcagtcccctccaaatattggtctgcgtcgtagtggacaagttgaaggtgttcgtcagatgcatcaaaacgctccacgcagtcagattgctacagaacgtgacctgcaggcttggaaacgaagagtggttgtaccagaggtaccactaggcatatttaggtttgttttaggatatctatttataatgtttctatctgtgaaaatatatttatatggttatttacacattctgtattccattaattgtgtaaataattgtataaatatattagtaatgagtgggaatcttactatcttaattgtggtaggaaaatgtcagaattattctctaatgtttttactacattaaaggttttcagagccagtcttgcttcttttctttttttttttcgagacggagtttcrctctcgttgcgcaggctggagtgcggtggcatgatctcggctcactgcaacctccacctcccgggatcaagcgattctcctgcctcagcctcctgagtagctgggcttacaggygcccrccaccacacccagctaattttttatatttttagtagagacagggtttcaccatgttggccaggctggtctcgaactcctgacctcaggcgctccacctgcctcagcctcccagtgtgctgggattacaggcatgagccaccacgcccggctccgtctttttttgtccatgcacacacacacccacktttgtcctttcagtattattttgaaagaaattctagatgtaatattatttttgtccataagcgtataagtgtgtatttctaaagataagaaattttaaaatatataaaataatgctgttatcacaccttaaaaaaaccgtaccttggtttctcagtataaccaaatatccaggctgtgtttaaatttccagttgtttcaggtgtcataaatgttttcagttttttgcaagactgcttcataagtgataattctatcagaaggcacacataaatagcctcctcggtttttgtgatgttagcagctatcagtgcttaatgtgtagattcattaatttattagctgttgtataatcatgatttttaactctatgaaaacttcttcatttattatcttggacacttctgaaaaagaaatctaaaaaagaaacccaagtatacttagttttcaagtagcaaagtttgtgtaggaaaggcagagtagatggcttgattattttgctttatttcccctcaaaataaagatttattccttttcattattcaacagcgaccaatttgtatgtgtgtgtgttttaatgtataaatcaaatagctggggtttaacttatttctgayattctttattgatgtttaaatcatctcttttctagccatgaggagcctcttttcaaggctccctgtcctttcaaaatgactagtagttttccatagcatccttactatgagacaggggaagatattatagttcatcttgtwaatttttgacctatatctgaaattaagcagccctattttcttttagtaagaaatgttatttcttttatttttttgagacagagttttgctctcgtccaggctggagtgcaatggcacgatcttggctcactgcaacctctgcctccgggttcaagtgattctcctgcctcagcctccygagtagctgggactacaggcatgcgccaccacgcctggctaattttgtatttttagtagagacggggtttctccatgttggtcaggcttgtcttgaactcccgacctcaggtgatctgcctgcctcggcctcccaaagtgctgggattacaggtgtgagccactacgcccagcctaagaaatgatattttatattgcttcttggccttttggctaagatcaagtgtagaaatgatattttgtaattataatatgggcagtagtgtccttggtgctgagttgtaatgtactgatttgagttattgaaatggaaacaggaaatactttttagaakgatatctaaaatgtttcagtattttctcatgtttgtatgtcataataacttaatagyttgaagataattttgtaaatttatctttgtgtttttatatgtttaaccagaagagtttcagtgaatgctggagtgttattagatagtacttatatattgttctgtgaatttgggaaggactagaaaatagtgaaaagcaaaatgtggaattgtgatgagaaatacagaaaatcaatatgtatatagtatgctgtaattaagttttaaattggcgtctaagtcttatggtcatcagaaccaaaagtgtcattttgggatgctttttcaaaaccaagggaagcaaacaggtgtcaagagagaaagacctgaaaaattagtttcttaaaacacaagcatttattttcttatccgaaggaagactagaaataatctaaggctggaatagtggttccacagttaatcaggaacttagactcctgtgtttctcatccccatcgtggagcttggcttcwagtcctttttttttttttttttttttttttgagacagtttcgcttttgtcacccaggctggagtgcagtggcatgatctcagctcactgcagcctctcctcctgggctcaagcgattctcttgcctcagcctccagagtagctgggattacagtcatgggtcaccacacccggctaattttgtattttcagtagagatggggtttcaccatgttggccaggctggtctcaaactcctgtcctcaggtgatccacctgcctcggcctgccaaagtgctgggattacaggcgtgagccaccgcatccagccttggcttctagtcttaaggtcaccgcatagtccaagatagctgctgaagctgtagctattacatatctgtatttgtgatgtaggttgaaatttagaagaaaagaagaaagatgttcagatgtcaaaaagggcatttctagtcaaaggaacttactttaagtagccatgtggcatttctgcttataactcattkaccagaatgttgtcatttgaccataataagctaaggaggagagtaggtaacacagtatctatttagagcagcaaagaacctggataaaaattggtattgtgtttctaaggaagaaaaggagaacggcagctagctatctgccataatataattttcacaaaaaagaacatagctctttctagcattttattctaaaagaaagctcatgtgaaattttataaaggcgataattgattgagatgtggtgatcattgcccatgacaacagttccaatagtggaaacaagggtgaatttttcataactgtatgttaggatatcatttgataaggatgaagagtatttaaaaatttgttttctgactataaaagtttgtgtccaatgtgaaaaattggagtaatagatataaaagcataaaggtaaatgacagctgtgcagagctatgagcatataatgttgcttgccagtataagtaattctttttgtgcctaggattcaggcacgtagtttgtcttgatccaataacggtagaaattctattcattataaatttttttttttttttttgagacggagttctgcttttgttgcccaggctggagtgtaatggtgtgatcttggctcacttcagcctccacctccctggttcaagcgattctcctgcctcagcctccagagtagctggcaagcccagctaattttttgtatttttagtagagacggggtttcatcatgttggccaggctggtcgtgaactcctgacctcaggtgatccatgtaccttggcctcctaaagtgctgggattacaggtgtgggccactgcgcccggccgtataaaaattcttttatatacactctatgatctttgctaataccacttttcttagctgaccatctcattaggagtaaaattgcatgcagctgaaaatgatacctatgtcaagtgttcctttgttttattgattgagaatcaattgtatgtattgctttattgtcaaagggaaacatacagatatcaggtgggactttcatttggctgcaagctgaaaatctcgttatatggttccttaaacmcacataaagcagtgaaattgacaacctgtgaaaggttgagtctgctttagaaatccccgctggataaaataatgttctactgtaatcttgagtgtgggctgtctggcgtacttagagaaaaatgcagtgttcttaaaaatcrgtttttatccttacagcatttactcttacactctgttgagtgtctagttataccttggaacatggccaagatttcagtataaatctttttcctttgagatgttaaagtaaacaaaaacataaaagccacgtgtttttaataatgttccagttggagaaaagggacagtcagtcttttccagagaagaaaaatgatttttagtaccttcttcttggtggcaggtcctttgctttgaaattggtcacaataacataatctttttgttgtatcatgtgagtgaaatataggtgattagaaaaaccagtaacattgctattcttgttttctataaattatcaaacatagcttgaataaatgtggagaaggcagactctgcttattttttctttagrgaaaggaattgcaatcttggaaaatcatgaagacgttttgaaaagctattatgggagattctgtttgaattggtcctgatagtaccaatcagaaaacgaatgaatatttttgcctstgatatgaaaaataggtttaactgcctctgagattttatttatattcatataaatttttaacatgttttaacttcagagattttgtgtatttttaaagtacataaacttatgatttatagaatcacactggtttttattctttatatcctttagttatccatcagttcagtagttaatataactgggtatttaaatttgtaggaagctggaagacttccgattagagaaaggtgaagaggaaagaaatctttatataataggaagaaaaagaaagactcttcagctctcacataaggtaacctaaattctgttttcttagcaaattagaaattacattgaaatatagagttttctttttgatttataaaactatcagtaactttcatctgaagtggagtatttcttgcttaaggttttctgtttgagatttaaaatagtagacttaaggttatatagctgttagaaaggagtagtttgaaaacttgagaaaaattgcctagtgcctaacaatggtattgagttcttaattttagttactaaattatttgattctgaattgtcatttggttcttcttttttttttttaagggctctcagttttctactaaaattctcattgttttaattacttggaaagcagccatagctattttaaaaacaggtctggtaatttcatttttttcaatgtcttgcttccctgtggaccattttctattgcctgttgatttttctccttttttatcatcatatttttgtttcttttttgattgttaaatgttagaaaagatttgaagcacaggatggctttattcccagagacgatttacattgacttctggcagccttctggggccactctcaagccttattgccttatccgaacaagaatgggccttagttccttgggattactgttctatctgtagtttacctacaggtctaggctgtagccttttgggctaacagccaaagcccgagggagtcccctacatataggaggccatgaattgcaagtttattagcctaactcatgagttagtctgtgattttgcttacttgctaaaccttccagcttcctcttccagaatgaaattctagggttaaaatatatatatatctatgtgtgtgtgtatacacacacacacacacacacacacacacacacacacacacacmccccttctttttttgatcttggttctgtgattcttcataaccttttaaggcataaagtgcctttaaacagatttgttaaaaaatatgttttaccagattttctagtttttcttagtgaaagtttggcccacctacatgttaacctattatcactcgtgaaactcattaatacgagtttttgccaaaatcagtactgacaaattaaggaacattcagttcattttaagatcatccagtgataatgttgaaattctaaaactgaccagtgctcattagacagatggccactcatgtgaaaattgatttgtgcataaatgtaaggaatatgtgctctcattgggtaatctcatctgcttttgtggttggggaatggcatgccttttaaaaaaactaaaaccaatatagttactttatttggctgattttgaatgattattctgttttgataaaaatatatttaaaacattcagaactgaaaagcacagacaacaaattatgtaaacattaaaaacctgaaaatacacatacttacagttaatatttgaacattaaaaagaaaacttttagcttcaggggtatatgtgcaagtttgttatataggtaaattgcgagtcatagggttttggtgtatggattattttgttacccagataataagcattgtacttgataggtagtttccyggtcctcaccctttttccacgttgtgccctcaggtaggttctgatgtctgttgttcccttctgtactcaatgcttggctctcacttgtaagttagaatatgtggtacttggttttctattctgatgttagttcacttgggatagtggcctccagcttcacccatgttgctgcaaaggacatgatctcgttttttttttatggctgggtagtattccatagtttatatataccatattttctttatccagtctaccattgatgggcatttaggctgattccatgtcttatactattgtgaatagtgctgcagtgaacataggtgtatatatgtcgttatggtagaatgagttcttttcctttgggtatatacccagtaatgggattattcggtggaatggtaattctgttttaagttctttgagggatcatcaaactgctttccacagtggttgaattaagttacagtttcactagcagtgtataaccattctcttttctctgcaacttcaccagcatctgctattttttgatgccctccaccccccagtgtktttttttgtttttgttttttttttttttttttggragatagggtctcactcttgcccaggctggagtgttgtggtgcaatcatggctcactcactgcagcgtcaacctcctgggcttgagtgatcctcccccctcagcctccctagtagctgggactgtagctgtgtaccaccatgcccagctaatttttcgttttttgtttgtttgttcttgtttttgttgttttttaggggcaggtttctccatgttgcctgggttggtctcgaactcctgggctcaagtgatctgcctgccttgtcctcccaaagtgctggaattacaggtgtaagcccccgcgtctggccttgactttttaataatagccattctgactagtgtgagatggtatctcattgtggttttgattkgcatttctctaatgattagtatgttgaacattttttctttacacctatgtatagagatagtgagamattccttgagaagttgcttactgcatcataatgtacgaatatgtatttttcatttctgagatgtatacttttaaggtgacatccttttcagattattgttattttccctcattcgtggtaaaccagttaacttacagcatagtttggaaaatgcccatctaatgtgcattttctcatgttttctaaggaccttaaaagtaaaactactaagcttgagttaaaactgtatggcaaaaatgytaccttctttttaagcctttttttctttttgctttaaatccttctggaaacttgacggaatgcccattttgktgatattgtccttatttaggtgttgattttcattcgcatgtttttctgtgtttcagtcggattcagtggttttggtatcacagtctagacaaaggacatgtaggcgtaaatatccaaattatggtagaagaaatcgtagctggcgtgagttatcttctggaaatgagtcttcaagctctgtaaracatgtgagtggaaaactttaaaatgttataagataatcttaaatgaatttggcttaattctttactttgaatgaatataccccaaatttatatgaaaacacagcattctgcagagattwatatgaaatttcacattttgaatgttaacaaaaacttttaatggctaagatagtcacatactgtatacttgtgcaatccagtggttttacatgttgagcatcccaactcagaattttgaaatgcaccaaaatctgaaacttyctgtatataaacatgatgttctagtgtgcatttcagattttggatttttggatttggcatgctcaacctgtaagtgcaaatgcaaattttccaaaatctggaaaaatacgaaatctgaaacaattctattccccagcgttctggataaggggtatataacctgtagtatattgacagagttgggccatcgtcacctctattaaattttaatacatttcatcatccctaaaagaaaccctattcccatttacagtcacttgccagtccctccctctcccccagcccctcacaatcactgatacattttctttttctgcatttgcctgttctggacattttatatgaatgggccctttttttttttttgagacggagtctcgttgtcttgcctggctgcagtgcagtggcgcgatctcggctcactgcaacctctgcctcccgggttcaagcgattcttctgcctcagcctcccgagtagctggggctacaggtgagtggtggcccagctaatttttgtatttttagtagagaaggggttttcaccatgttggctaggatggtctggatctcttgaccttgtgatccacctgcctcggcctcccagagtgctgggattacaggcgtgagccaccacgcccagccggacgggctcttaaaatatgattttgtgactggcttctttgacrttgcataatgttttctctaatgattagtatgttgagcatttgtgtagcatgtatcaatacttcattctttttttactttttattgcctagtaattctcccattggatgtaccacattttgtttatccatttatcagttgatggacatttgtattgtttccactttttggctgttatgaatagtgctgcttatcaacattcatgacaggtttttgtttagacatatgttttcatttcttttgggtcacgctaggagatggtatgctgggtcgtatggcaagttttatgttttaactttttgaggaccctccagactccttcagattggctctaccattttatattcccaccagaaatatgagagttccagtttctctacatcctcaccaatgattgttattattccattttatttatgctatcttaatgggcgtgaagtggtatctcttggtttcagtttgcatttccctaatgaccagtaatgttgaacatgtttgatgcttcttcagatcttttgcttatttttcactttttttggggggtctttttattgttgtaagaattctttatatgttctggatacagtcctttatgacttgtagatatattacttgtagaatttttctcccattctgtgggttgtcttttcacttctttggtggtgtcttttgaggatgaaagttttaaatattgatgacattcattttattttttccttagtagcttcttttactgttgtgtctaagtctttgtttaatatctttgattgatttttaataatcatatgtaagctatttgtcttcattttgatttgtttgagggagaaaccaacttttttggtaaagagtatttaatasgccgggcwcggtggctcatgcctgtaatcccaggactttgcsaggccaaggtgggcagatgactcctgaggtcaggacttcaagaccagcttggccaacatggtgaaaccctgtctctactaaaaagacaaaatttagtttgacgtggtggtaggtgcatgtgatcccagctatttgggaggctgaggcaggagaatagcttgaacccgggaggtggatgttgcagtgagccgagactgcgccayggcactccagcctgagcatcagagcgagactcttgtttcaaaaaaaaaaaaaaccaaaaaaaaaagtatttaatactacagtgttaaaakttcctgaytgagtaatgttttgaggaatgaagtattagatatgactgaaaagttcatttaattgtcttatgatgcagtaggttaataattaagcatggggtttgagtttaaatccaaattcttttactttgtcatgttgcttagcttttctgtgcctctgcctatgtaatatgtacytcagaggcgtggtaacatgtacctcagaggtgtggtgagaattaatttaatcagtaatgcaatgtgtttraatagtgcctaatacacaataatgttagctacgattatgrttaaaaccatctgtttaaactgtttttatttttttgagacagggtcttgctctgttgcrtaggctgtagtgcatggtgcagtcatggctcactgtagcctcaaactcctgggctcaagctgtcctcctcyttcagcctcccaagtagctgggattaacaggcaccagccaccctgcctggctaaactattatattatgtaatgagaatgtttttacattcttttttttttgagatggggtcttgctctgtcccccaggatataataggaaataattattttattatctgtcatttttatgctggttgacctttttctcttttctttttctgcatatatatatatatatttcttccaaagtttctatatgtaacttacattgtatgacttaagcaattggatagtcaggttgtatcatggtttggaataaagggttatatatagactttgcctttgggaggaaggtgtagtatcctagtctggaaataactattttaccatgcagctctgttccaacctctccgcctcaagtaccttgaatttgcscaacacagtagacatgggatggtttcctttgggaaaactgttacgtaaggtcattctagaaaggctagggtggtatgtagtgscattatcattattgatgtggaaatacattaattactgtcaaggatatacaaaatcatacaatcaatatgtaaaaagtgctataaaagggctaaacattaatgcattttattatgcctgggaggcactattctaaatggtttacacgttatctaatttcatcattccaacaagtaggaattcaggcactcttataatctcttttaaaaatgaggaaactgaggtacagatatggaggttcagtaactttcccacatttatataaaaagttagcagcatgggccgggtgcagtggctcatgcctgtaatcccagcactctgggaggccgaggtgggtggatcacragggcaggagatcaagaccatcctgggtaacacggtgaaaccccatctctactaaaaatacaaaaaattagccaggcatggtggtgggcacctgtagtcccagctgctagggaggctgaggcaggagaatggcattgaacccaggaggcagaacttgcagtgagccgagatcgcgccactgcactccagcctgggcgacagatctcaaaaaaagaaaaaaaaaagttagcagcatgatytcagagcagaaaccctgccttaccgaagcatcagttcacttgaggatttggggaaattaaacttaaaaaaaaatttattgaatgcctcctatctgtcaggtgtaaattttttattttgatgtaatttcagacwtgaaagttctaagaataataaaaattcctttgtgtttaccaccctgactgttatcactctcctgtatgtatgaatatgttttaatccttttgagagtgagttgtacatatgcctcttgatatctacatatttccttgtgtattttcaaaaacaagtgatataattatcaaaatcaggctgggtgcagtgtctcatgcctgtaattctcagcactttgggagactgaggtgggaggatggcttgagcccaggagttcgagaccagcctgggcaatacggggcaagccctcctccacaaaaaaatgagaaaaaaaaaattagctgggtgtggtgacacacctgtagtcccagcttctctggaatctgaggcaggataatcacttgagcctaggaggttgaggctgcaatgagccttggttgcgccagtgtaactctagcctgggtgacacagtgagacactgtgtcaaaaaaacaaaaaatgaggcartaaacaacaatataatgtcattaycagatctgcagatcttactcaaattttaccagtcaatggtcctgataattttcatagcaaaataaaatcctggatcacgtgttacattttgttgtgtctgtttagtaacctgaatctagtctagttccttgatttttgttttaatgttgatattttttgatgatttatgactggtaattttgatgattagggtcatgcatttttggcagtaatatgacagaaaatatactgttcttctcagtgcatcacatcagaaagcacatgatttgttttgtcccactactggtgatacgtgctttgatcacttcctaaggtggtggtgtttgcaggtttctctatggtaaaattacagtcytgattgttggatttactccttgatccatgggctgcagaatggatgtggtgttagcaggcatgaaaacaacattaatctcctttgatgtgcccatcagaggtcttggatgrctaggtctattgtccacaagcagtaatatttggaaaggagtcttctttttctgctcagtaggtctgaacagtgggcttacaatatctggtaaaccatgctgtaaatgatgctgtaaatagatgtgctgtcacctaggctttgttgttccatttcttatgctcaggcagagcagatttaacataattcttaaggggcctgagatttttgaaaaggtaaaaatgaacagtggcttcagttgaaagttaccagctgcattagccctaacaagagagtgagcctgtcctagaagctttgaagccataagtccctctagctgtgaaagtcttagatgtcatcctcttccaatagaaggctatttatttcatctgcatttaaaatctgttattgtagccactttccttgattatcttagctagatcttctggatcacttgctgcaggttctccattaaagcacttgctgcttcaccttacacttttatgttatggacatgccttctttccctaaacctcatgaaccaacctctgcaagtttccatcttttcttctgcagctttgtcacctctcagccttcatagarttaaagagagttagggccttgctctgggttaagctttggcttaagggaatgttattgctggtttgaccctctatccagacaccaaaactttctctatattagccgtatggctattttgctttcttaccatttgtgtgttcactggaatagcattttatatttcttggaagaacttttcctttgcattcacaacttggctacttggtgcaagaggcctagcttttagcctgtgttggctttcaccatgctttccttactaagcttaatcatttctacattgcgagttaaagtaagatatgtgtgactctttcatttttgaatacttagaagctattgtatggttattagtaggtctaattgcaatattgtatctcagggaatagactggagcagtcagaacacacatggtattcattaagtgtgctatcttatatgagtattgttcctagtgcccccaaaacaattagaatagtaacatcaaagatcattaatcacaaatcacagtaacagayacaataaaaatgaaaaagtttgaaatatggtaattactaaaatgtgacatagagacaagaatgagctcatgctgtttaaaaatggcaccaataaatttactgggttcagggttgtcacaaaacttcaatttgtaaaaaacacaactgtgaagcacaataaagtaaagcacgataaaaagtatgcctgtgtatacatattatatgcagacacatgtatttttttgtctgtatatctgtcattgttatgcacgacttcacattattctgattttaatgatacccgtttgtacttcccttctgtacararaaacctggctcctgttatttatttagatttttaaatctttttttttttttttttttttttttttttttttttttttttttactttggagatggaatcttgctctgttgcccaggctggagtgcagtggcacagtcttggctcactgctaccttcacctcctgggttcaagcgattctcctgcctcagcctcccaagtagcagggattacaggcatgcatcaccacacccggctaatttttttatgtttttggtagagacagggtttcaccatgttggccatgctggtcttgaactcctgacctcaagtgatctgcccgacttggtctcccaaaatgctgggattacaggcgtgagccaccatgcccagccctgttatttatcataaacttatttgtttaattctacatacacagaaagtagtttaagatttactaggctgggtggctgaaggctgtctctacaaaaaatacaaaaaaaaaaaaaaattagctgggcgtggtggcgggtgcctgtaatcccagctacttgggaggctgagacaggagaatcgtttgaacccacgaagtggaggnnnnnnnnnnnnnnnnnnnncaggtggatcccttgagatcagccctccagcctgggtgacagagtgaaactctgtctcaaaaaacaaaaaaaaaaagatttacttaccctgtggtaaaaaccctagtatgtagagtttagttatttacttactgttctttttttgtcgttaaccaaattgtatttagtacaaatatttcaaaagttatttatccttcttatacaaaatacagcatactacagatrgtcccacacttgacatttttcacttaaaatatctttgagatcactccatatgatccttatttgttttaagagttatgtagtactttatggcatgattgaaacagtttattgaatcgttctcctggttatgggcagttaggttgtttccaatgtttacattataaataatgctacagtgaataatattttgtatacgtatttttgtactgctggaagtgtcatttggggatatatttatttgattttttctttttcttagggacagggtcttgccctatggcccaggctggagtgcagtggtgcaatcatagctcactgcaacctcgaactcctaggctcaagtgatttcccagcttctgactcttgagtagctaggactacaggcatgtgctaccatgcccagttaattttttaacaaatttataatgacatgtatccaccattataatatcacacagaatgattttactgccctaaaaatcctctgtgctccatctgttcatctttctcttcccaacagcccctgacaatcactgattttttgtcttcatagttttatctttgtagaatgccatgtaattggaatcatatagctagtagcctttgcagattggcttcgttcatttattaatatgcatttacatttcctacatgccttctcatggcttgatttttttgtttgtttgtttgttttttttagcacagaataatatttcattgtctggatataccatagttttatcagtttacctactgaaggatgtgttggttgcttccaagatttggccattataaagttggtataaacatctgggtgtaggtttttgtgcggacataatttttcacctcatttgggtaaacatcaagtgtgattgctggatcttattatgtttagttttataagaaactgctaaactgtcttccaaagtagctgtaccattttgcattcctatcagtaatgaatgagagttcctgctgatccacacccttgttaaaaaattctttccagcatcatctgtagattcacaatcccaaacaaaatcccagcaaattaattttactgacaaactgatttttcgagtttatatagagaggaagaagatccagtatagccagcacaacactgaagaagaataaaactgaaagactgacactctacttggcattaagacttactgtaaatctgcagttttcaagacagtgatgctggtgaaagaacagatcaatggaacaacwtaaagagcccagaaacagactgacacaaatatattcaaacgatctttggcaaaggagcaaagagaacttggtggacaaatttatcattttcagccagtggtagaataactggacattcacatacaaaataaatcytagacaccagtctttcacaaaaattaactcaaaatgaatcataagcttaatgtaaatgtaaaacaaaaaaaccataaaacttctagaagataacaaagggcaaaatctatgtgtccatgagtgtggcattgacctttttagatacaatatcaaaagcacaatcatgaaagaaaaaatataaaaaatttggactacactgaaatgaaaactgctttgggaaagacactattaaaagaatgaaaagataagccacaaaccaggataaaatattagtaaaacttatatctgataaatgacttatattcacaatatacaaagaactcttaaaaccaagcaataagaaggcagcctaatttaaaaatgggcagaagatctaacagacacctyaccaaagaagataaacagatgacaaataaccatatgaaaagctaccaaaatatgtcacagggaattgaaaactagaacaacaattagatacatctattagaatagctaaagtccaaaatggaaaayatttacaytgactttttattaactttactcagaatggcctgttgtatcactttctttgctaatggtggtagtgttaaatcttacggatgttctctttttgtcttatgctttgataagaaagggatgtagtgaagaagtttgctttttaagtttatctgattatatatttactgattactgttcatttttcttagatgatttaatcttactggggaggattgtgtacagcttttttctggacatgtgttgtttaacttcagggatcaagatttttttccccccttcacaaattaggagacttcctgtgatcagagtgaaggttctggttcttcagaagaggatgaatggagaagtgacagaaaaagtgagagttacagcgaaagttcaaggtatctgtttttattgttgtggtcttttaagcattttagtcatagtcttggatggaatcatacttgaattttattcaagaggcaagaatttgcaactgtggaacagtttttaatacacttaaaaggagacmaaaactagatccaacagctgttcctataggagtatttcaggagttttttttttttttttttgactttaagcagttgacccagcactgttgaacatgcatactgaaaatayaaatttaatcttggttgcacttaaaaagactagtatctaaagtatgtgtggtaaaaccacagtatattcattattattgcatgtgttgaatttttgttagttttgagatccagatttcctgggtccaaaatgtcagcctctggttcttggtgcacgtcaccttcatctcaacagatcctcaatccagaaaactggaccttaatctctcttgtccacctatccgtaacatggctagaaaattctccttcctatcactcagatcatctttcttttttttttaattggtactgtttggttcaaaccattatcacatactctctgcttcctttcttgtcttgttttacttcattatgataaggagctagaatgatttttttaagaacataatgtattatctttttttaaacaaatttaattgtggtaaaatacacataacagaaatataaccatttaaagcatgcagttcagtactgttacgtacattgacatagttgtgcagccagtctccagaaccttgtttatcttgcaaaacggaaattctataccaattaaagaatgattcttttctttacccttcctcatgtccctggcaaccactattctaccttccgtgttttcattcattgtcttctaattcaacttttcttgaattttatttatctaaaacagatgcttttataattttcataaataagctctttttctaataaatacctttttgtaatgtgtttacctgtgtatttgatagagacgaaaaggtgtgtggttggttgaagttgggccaaggatggcccaagtagagtcctttatttttattattatttctgtttggtgaagctagtagtggaccagggactagttttctataactagtttcctctttgactctgattttgctaaggactaggactagtctctttctatcagggagactcctcttggcaagaaactgactacttaaggctttcagtttggtgtagctatgcttcccttgggcttctcagtgtgttcattgatggcttgtgattccagttgaaattcctggtctatacctcagcttcctccaacatgggggtagtggtggggcctatttttggggttttgtatgattcttatgtttctataagtctgtgttttgtttccttgaaggggtaattgctagttgtcttccatcatattttatctacaatatacctaaattttttttttcgggtttacatcctttcctaatttctagtgttagtgaagatttctctttttctcttatgtttgtcatgatctttagtcacttcagtacttgctggtagtgaggggagaatgctcaagttaagtctttctggtatcttcccttccctttttctcctctctctgttccctcaattttatatgattgacttgctatcagtgcttatattctggctccattcaactgaaagcactccccttttctagtgactcttcatctagatattccgattggacagctgatgcgggcatcaatttgcagcctcctttaagaacatcatgtcgtcgacgaattactcgattttgtagtagttcagaagatgaaatatctactgagaatttatctcctccaaaaagaagacgaaagagaaagaaagaaaataagcctaagaaggaggtaagaaaaacgtatctttaaaaatagcatgtatcatgataccccagctttaccccatttcaaatgttgttttaacatttctcgtgatactggcatagtggtgccttgggtgtcttgggccctgctctggggctggtctgggcgagctgtcagccctccttggggaagctcactgcactcccagggtgcagcaggtaccctgtgtgtcttggggattctgaagggcactgtggactcctctgtctcctactttcaacccctgtggatagcaggagctctggggcctgtgggaaggaagggagcatctgtcagtcctttggagggatgggtgggggcagatatagtgggacttatgggggaggcctttgcttcacagatgcggartcctttgcaggactggggccctggtctccccgcgagagacttgaagtccaccagtgtcgttcacttcagtcttgaggagatggaactgccatgactgcatgtttctggctgtgtcaaaaggcaggataatctcaaaccgttaacatccagtctaagtgcaggtctggtcagagggctgggtgcaggcagattggccctgttgccctatgaggagaccgtgggattggggttgcagaaattccataagcctcttgccacctttgtgaaccacatgacacagatctggcaggaccrgagacaactgggaattgccacagtggtttgggatgtggccatggttctctccacacatctggagatgggagctgtggagctcttgggctgccccgcagtgaaactgggtgctggcatagggctgatgggcatagtggctgccctgctgggtgctcatgtgactgtcatagatcgaaaagtagcattagagttttgtaaatcaaatgttcaaggcaatttacctccttgtatccaacccagagcttttgttaaggagccgacttggggaaagaatttggggagtttttctcctagagattttgacctgatacttggagccgatatcatatatttagaagaaacattcacagatcttctccaaacactggaccatctctgtagcaatcactccatgattcttttaccttgcttaattcactatgaacggagtaacttttgagcaatgctggagaggcagtttactgtagggttcactatgatactgagaaagacgtacatacttacacagaagagaagccacagcaaggacctacagttggctatcatttataagaatgctgtcattgagggtgttgattaaggtcttggagacaaaacacacatgcagttttaaaacaaagcagtgctttatgccatcgctgtgatttatttatttatttattttttattttttgagaggagtctctgttgcctagcctggagtgcagtggtgcaatcttggctcactgcagcctctgcctcctgggttcaagtgattatcctgcctcagcttcccaagtagctgggactacaggcccacgcaaccacgcctggctaagtttcgtatttttagtagagacatggttttgtcatgttggccaggctggtctcgaacttctgacctcaggtgatctgcccaccttagcctcccaaagtgctgggattacaggtgacccactgtgcctggccattgctgtaatttttagtcatatttacttactctgaaattccattaatgttaaaagattaagtgtgagattttggttcatgctgtttctgtactccatactgctccctcttgataaacagttttcactgatgatgtgaagcattggtataaaggtgtctttaaactagcaagcttgttttggcgaggttaaatcatgcaaataattttaaacaccttctgaaatacatcgtgtttagcccagttttctgattttctggatataagacaagaggtttaacatgttccctgagctgttggtgctattgaaatcttttgccccatttaaattgtaaaaactctgggttggttgagtggggtgtgagttttctggggtctcatattatgctttttggcttaatttcaggtttaagtatctaaacaaagggttaagtaaaaataaagttttagttactttttgagagtaccttaagtcttggactygaatataggttatctttatcaaagcaaaagctgtggttttccccctcagctttaccttgtctcaaatgttgctttaatgtaattgtttcttaagctttccatgccttcttaataatatataggataacagtaaaaaagattctaaatcccatccctccattaagaggttagcttcccaaacataagctccttctgtattgtacttgtaattgttcattcagygtctgtattacccagtagactgtaagcttcttcagggccaggaatgcttctgcatctctcattgttgcttccccaggatctggtattaatatatcataaccaaataatgaaaaagatacattccagttagaggcttttgattgttggtttaaatgattgttatattgttttatgattgactttgatacacttcatgaagtcacacataarctttttaaaaattatttttatttatttatttatttagagacagagtcttactctgtcacccaggctggagcgcagtkgggcaatctcggctcactgcaacctccacctcccgtgttcaagcagttcttctgcctyagcctcccaagtagctgggactacaggcacacaccaccacgctcggttagtttttgtatttttcatagagacggggtttcaccatgttgaccagggtggtctcgaacttctgacctcaagtgatccacctgcctcagcctcccagagtgctgggattacaggcgtgagccatggcgcccggccaagctactttattattaacacttctccatctccactgttctgagtagtgggcttgacagttaaacctttccaaatctgaaacttaaagagaaagctctattttgctcagaatctcacggcaacacttattttctcctgtcaatttcaacactagtagtagacttcaaggaattttaaggtgctttttttttgtgtgtgtgtgttattgctacgtttaccattttcattttacatgtctgtcttcatacttgtctcttcatttaataacatccctatttatttgtgtacactgtgctgatttcaagcaggtagtcattgtttaaagatgttaagtctttgtatttatctattgctgtatataacaaaccaccctaaaatttaggtgtttacatggcaaacgttgcatatttcatgtattggttgatcaggaactgggagctgatttractgggtgattttggctcatgaggttacaacatgttgactggggctgcagtcatctgaggacttgatgagggttggatgatattctttccgagcttattcatatggcttttggcctcagttccttgccacacaggtctctccttagctggctgcttgagtgttgattttcaactcaagctggctgcttgagttatgattttcctcagagtgaatgatttaacagtagccagggataagcccccatttatgacctagtcttagaagttgcacatagtctcatcggctttattatatttggtagaagtgagtcattaagtgtagtccacacttaagaggaggagacttccacttcttgaaaaggagagaactattggggaatttgtaggcatattttgaaatcaccggtcttacaacctaaaatcaagaggagactccttgtgatgattagcctgtggccaaactcagagtggagtcttggcagaacaggctatgggtaaaagaggatttaggctgggtattagccccctaaaatgggatgtaaaatagcatgaagaatctatcagaaatttaggagatgatgctaggaaaatgttaggtagatttacaatgcttttttaagtgatatattcctgtgtaaaggaactaaatatatatgctgtgtgaaaactaatcattagatggacatggcaaaaatagtcattctgaakggtgaaagtttcttttatttttcattcagacagtgcatgctgcccctttctaatctaagaaactttgttctcttccccttsgtagaatttgcggaggatgactccagcagagcttgcaaatatggagcatttatatgaatttcaccctccagtttggattactgacaccacacttagaaaatctccttttgttcctcaaatgggtgatgaggtgagagtaatacaaatttaaaaacacgaatatggaacataaagtttatattgctcttaatttttaaatgcatatttcccttttgtaggtaatatattttcgacagggtcatgaagcttatattgaggctgtaagaagaaataatatttatgaactgaaccctaataaggagccatggagaaaaatggatcttagggtaggatgatggcattattaaatcattaaacattttagcacatacatagttaaattacttacaaatctatttaaaaacctgttggaaacatattttattactttctttcctacttgataacatttctgctgtaaccaaaccttaagatcctgtgggaatggcttgtttgtcartgggcaaaatttgtatgttgctgattggtgtgtaaaatgttaaatgcaacaacctagagtttcagaaaggcagcttggcaatatatatattatcactcttaaaaatgtttatgtatccaagacagattttcagaggaagaaatgcaagttttcaaaagaagaaataaaaactggaagaagggtttaacctcatggataataaaataaggaaataataatttttccttttcaatacttagccaattttgtgatttcgtttgtttttagctcaagaaagaattccacattttagcaagtggcaaagatgttggtttgttaacagttattcagattgctggtggggtgtgtgaagtggtccaggctttctaggggatattttgttaatagtagttgaaactgaaaaatatttggaacttttaattctgtgattttactcttctggtaatttggaaaacaagcagaaatgcttgtaaatatatgagtattgtagttcactcactgttgacagaaacaaagctggaaaaaaaaaattcagatattccacaatagtgaatgaaccaaatcatggtgcattcacacagtcacttactatgtacagcccatcttgtacttgaaggttgaaaaatatttgttgaatgaatgatggatacattttcacagtgtattactaataggaaaaatggggtgtgaagtggtatttctggttatggtagcaaaattttgaaaacatttgcagccaatcaaaagaacaacatcaaaatgtcaatggtgatgatctgtggggtagtagtacacgtgtttttttattttttatatttttattctacagattttgatacttttaaaaacttagaaaatgaagaaaatgctagttattttaacaaatatagctgtttttaacacttatattcaacttaatggctctgcttgtataagttaggctttatatacattggcggttttatttatgtctgtttaacttaggactgtgtacctaagtacagtccatcctcattattcttggattctgtatttgtgaactgcgtacttgctttatttgtaatcccccaaacagtactctcagagccttttggtcatttctggacatgctcagggtggtgaaaaatttgacttgcctgacgagcatgtttctagttgaggttgaacaaggtgttgctctgcctttttttttttttaagctctcgcactgcaaacaagtgtccttttcatggtctattcagtgccacatgttttccatttttgtgctttttctggtgactttgctgtttaaaatggcccctaagcgtagtgctgacatgctctctagtgttcttaagtgctagaaggctgagatgtgccttatggagaaggtatgttagataagcttcattcaggtatcagttaaatgtttgcaaatcaacaacatattaaataaggtacctttaaacggaaacacgcataaaaccaagttacktatgcactggtttactacagtgttgtgaccagaattttgcaggaacctatccctatatattctctatagcactgatttagtattttatttcagtgttctaggtgactatagaacataactgctgtgaataatgaaaactatgcttagcactttgtttggtacattataataataacatttgttcagtgaataagtggatgaatgatctgttgtattcctagtatcagagaagcagacactggggggaaggttgactatggcaaatccatttgatggatactccatccaggtagggactttcacttgtttaccgtcctgtccctactgcctagaagaggtcatagcatatggtagattctcaacaaatattacttactgaatgtattaggcagaaacttaatatcaagattttgaagaacacttatgaataagtagaatgcttacacattttcactgtataatataaagctatataaataaaaatgtgcattgactgggtgtggcaggccacacctataatcccagcactttgggaagctgttgtgggagcatcacttgagcccaggagttcgagactagtctggacaacatagggagacctgtctctacaaataataaaaaattagcttggtgtggtggcatgttgtacctgtagtcagtcccaggtactcgggaagctgatgtgggaggattgattgagctcaggagtttgagattgcagtgagccatgattgtgctactgccctccagcctaggcaacatggtgagatcctgtttccaaaacaaagccagaaggaaatatgttagatttttaacagtgattgtcgttagatattgcgctaatccgagatttgtgttttcaatcttacacttttgtaatgtattttctaaaggatgttctttgtattagaaactgtattaaatatgtggagattaactttagcaaaattgaatgtaattaatggtattaattaaacttgtctgcgggtttggaagcctaaattatgagtttacttaatataacagtatgtggagaattatagtattaaggaattgcttttattttaaccattaaaaaatatgtctgttaaaggatcaagaattggttaaaatagttggaatacgatatgaagttgggccccctacactctgttgcctaaaactagcatttatagatccagcaactggaaaacttmyggacaaatctttctctattaggtatgtattattttttaaaatggaattacttaaatttaaatttgccattttgctgattgaatgattagcatgcccttcccatttaactccagggtaactggtagagcactgtggatagcctaagatgtggctcgagcttctgatggctaggaaacccatccctgaccctgaagtcatagtaggcatgtcacagttatagttaagtgtgggcagtctgttttatatggttttcatgctgcttatgtgggtggggaattctgacatacgggccaaattttttctgccctttgtttttgaaaaaattcagaataaataatttcctacacctgtgctgtctaataaggttaccactagtcacatgtggctactgctcacttgaaatatggatggtttgattgaatgtcttaatatgtgacttggcagagtatgaggcataaacatttttttttaaagaaatgaatgtgttgtgaatgtacacactgcattttgaagagtagytatgaagaaaaaatatgtcagatctctattttgttttgataacatattgaaataatattttggatatatttaaaatatgctatgaagtttactgttttaccttttaaaatatagctggttgaaaattaaaaattacattcgtagatctcatgtttcttttggacagtgctgcttttagactatataacctgctatgtagagagtttaacaattttttaaatttttgtctagatatcatgatatgccagatgttattgactttcttgtattgcgtcaattttatgatgaagcaagacagaggaattggcagtcttgtaagtctatccttactaagttttatatacccttaaaaattaatctgttttattggtctacctttttggctgtgggactcttaattatagtatatacaaacatgtaaattccrgaaragatataagtgacctataaatatattttgcttacggcttggtacttactgattatgcaractttcttggtaggggccgggggacggtgggcakggcasgcattttctccctaggtcacccaggctggagtgcaatggtgtgatctcagctcactgcaacctctgcctccaaagttcaagcgattctcttgcctcagcctcctgagtagctaggattacaggtgtgcgccactacgcccggctaatttttgtatttttagtagagacagagtttcaccatgttggtcaggctggactcgaactcctgacctcatgatccactcacctctgcctcccaaactgctgggattagaggtgtgagccaccgtgcccagccctattatgtagacttttttagacgagcaacttttcttctgttcttttggttcatgacrtttggaaaagattattttcactccttgactataggctagggtagacttacttccttttagacttccctgtactatattgtatataattatctttgatgtaacattggcataatttacacaattatactaggatctaaaatgatcagaaggttgaaragtaatttcagatttcacactgaaaatgttctggtatacccarttattttacccttgatatcataacaacgtagacttaaatgggaagacttgacactgttttgttaagaaataaaaaattcatatacactttgctttataaccatgtaatgtataggtgggcagaaaaattaaaaaattaaaattacctyaatgtaattttacacattcgagtaaaattacacattggagtaattttagtacctcaatgtaggtactaaattactcgaatgtgatttttgtgatgatcatttaaggagggctcacttattcagagttgtgtagattattaatctcaggatataattgatgattgaatgactgtcattaggctgggtagtaatagcaactgttaatagtaactgtagtacctgtttcacaggtgtacaaatatatgttcagtgtgtaatgctatccagggagcttgtgtattgagttagaagtaggatggttcrttcttttatcagttcttggatttttgttagaaatactaagttttacccaggctgtgtcatctggtgtacacattcataaatgatgttaagacattgatytttctagttactgcagtttctttctttctttccttctttttttggacacaaggtcttgctctgttgcccgggctgaagggcagtggtgcaatcagagctcactgcagcctcaacttcctgggctcaagcgatcctcccacctcagcctcctttttggctgtgggactcttaattatagtgcatacaaacatgtaaattctggaagctgcaccatgtgcagctaatttttaattttttttgtggagacagggtcttgctgtattgcccaggctggttttgaattcctgggctcaagcaatcctcttgcctcagcctgcctaaagtgtaggaattacaggtgtgagccaccatatctggccactgctgcctttttgtgtggtactacaagaaggtaaattttagatraagtccctaatcatcctcatctgacgtgaaagattgtcagggcgtgtggctcctctttatagattattctcctggtaacatctacacaagtaatcaagattattttgggagtagatgcagagaaaatttttcttgaagaaaaacatacagccacaaaaataacatgaagcaacattagcaggttgtatagttgtgttccaaataactttaaagcttcccagctattatgatttttcagctcccatgaggtgtaagaggctctcatttttgccaacatgtccattaatttttttaaaactgaattatctacagttaaactctagagatggagtcccagatgcctcmtgtaatttagtggtttttgttttatttttgtggttgagaaattattggaccagacctgttatactacactttaattcattttgcttccccatttttgcgtggaatttgagtagtatggcaagaagaagttgcttgttttcatttttacagtggatttttatccttctcttgaaaggccaaagtaggtttatttgaaaagccttaacataagattaccagggtgatcagctagcaaaaacatagaaaagacacttttattatgagaaaacttaattttttcaggctcctttttatttaaagggttgtttttgtatgaagaaatatttttatctaaactgaaattatcttctagtattaggtaaatagcaagaaaaatatacacttaattttttatatcaaagactctcttctaacatgtttttatgtttggcctctcaaaattgaggcagctgattttatgacaataatttattattattacattcagttgtaattaatgtttatgttaaattagggtattagagatttggataaaatcatggtgtggtttrtcttaaattgtaagtttaaagctatactagtctccttagatttctttcaggggctatggtttcaagtgattttgaagtaaaatatatgtaaaactcatgtttacataagtttgaaaatatgctaaagactaaaacatgtaggtctagtagttatggcattattttttttcaaacctttgaagaattcactgtaagcatactttaattattcaagactgtttgccaggtatattatattctttcttggggataaattgtagctttaattttgattatttctataaaactttccttgagaaaagaactgttgatctatatcccgaagaatcatcagtgctggataggtgacttttattgtttcattggttttgttttgtaaatggtgggaagggtaagaaggaagagatatggttactgcagcagttcatgtttctattgtaatgaatgttaaacacagatctagtgcagtttatttcactggttgaagtgttagagttgtaaaatacatctagaaatgcatttaatctaaaagttaaattttttatgccatattttycttggtttgtttaggagcgctgcttgcctgttwttgtattgtgcttttggcttttttttatctgtatcatatggtattttgtagattaaaaaaatgttaatgaatgttagcagagaaatgcctcagacttgatcatttctctcctaggtgacagattccgctctattattgatgatgcttggtggtttggaacagtgttaagtcaagagccatatcaaccacagtatcctgatagtcatttccagtgttatattgttaggtttgtatacagatgaaaactaatcatttcccagtaattcagtgtggcaggttgctgtataaataatacatttctggtttttaaaaaaacatggtttttatctgtcattaagtcatgtcaggctgacccgaaatgtctctcagacatgcacctactctttgtttcctattcaccagtactccccttggttcaggttctgcttgctttcctggaactatttctgtagccacctaatatttcctttacctygtattrtcagtgtcctagttcagaagcagatactatatcattaatcttcttcaaagaaacctttgacgcctcttcattggcaatgggataaaaaccattgactgtggctgtagtggaattcaagggcttcatgccttgtctttcagttattgttcactttgggtgcaggccacataggatttctggttttgttcttaaacctgttattttaataatatatccttcttaaaaaaatttactgttaatatttaaaattgtactgctgcagtgaggttaattttcacattttgtatttttataatggatacctattatccacattttgtttttatgaaaggctaaccagagatttgttgttttttaacaggtgggataatactgaaattgaaaaacttagcccatgggacatggaaccaattcctgataatggtatatatatttgttaaataatgaaaacattttatttttataatatgtacatttgccagtgcacatggaacaaacatatttgtattctatgatcaatatattcaaattattacagtaactgaactttactgaaagaagacaacagcatcrtgtttatctgttttgttaattcttgaccttagattccagcttgattttggctgtaccttaatagcttgctgtcgtttctcatgtaaccctgcattaaayttaactcctggctgggcgccatggctcacgcctgtaatctcagcactttgggaggccaaagcagatggatcacctgagatcaggagttcgagaccagcctggccaacatggtgaaaccctgtgtctactaaaaatacaaaaaattaggcgggcatggtggcgtgtgcctgtaatcccagctacttgggaggctgaggcaggagaatygtttgaacccgggaggcagaggtttcactgagccaagattgcggctactgcactccagcctaggcgacagcgagactccatctcagaaaaacaaaacaaaaaatttacatccttcatgtagcctctacttttcctacctcattcttaatcttttacccttggtcttccttcaaggaaaagattgaacttgacttccatctgtcttctgctttacctcaagttgtcttattatggattttctactgaaatagacaactatttaaagccagcctgtcctccagtgctagcatcccactgctgttggccttccaagggcctggtacctacacttagctcatcccctccaacaattttaatttcytcctacctttctccagtcaggtttgaatatgtctcttagaccttacatttgacttcatgaagcatttttgttactgaattatttcccttttgcgaaactttttgaaagggtactctatatctcttgtgtccattgttttcaccaccaagctttctttatgtgtttttactgatttgtaacatcctttgatgtttttctctttttataattttcaagaaaatctctgaatatctgcattttgatatttctcttcaatatgtactctccattttttatagcactttaaaaaacttgatttcaagataatttcagacttaaaaaaagttaaaaaaaatagtacaaggattttctgaatacctatatttcccttcttatacagctagcacattgcagtgatcaaaatcaggaaattattaatacgatactattgtctatagactttattcagattttgtctgtttcactaatatcctttcacattttggatttgtcatgtcatcttagtctttaatccaggatccctccgtttttcactgtctttcatgactttaaggcttttgaagattactgggcagttattttatagaatttccattagtttgggtttgatgtttttctkgattaaatttaggttttgcattttttggcaaaaatgtcagaaaggtaatgtgtctttctcagtgcaattattttaggattttaataatttgatttagggggtatgtgtcaggtttctccagtgtaaagtaaatactttttccattataattagtgtcccatggggatatatttatgtgctgcaaaaatcttgtttcttatgctgtttccactcactaattgtagcatccgttgataattcttscctcaaataatgattttttgttttcattgtcttacatgtgttagttggaattctactataagatacatcttctcctttcccatttatttatattagtatgtactcagatttttgtgaaataaaatcagtgttcaattgttgtcattattttgttgctaccttattgcagatttggccactgggaaccccttcatgttggctcctatgtccatttgacattttcttttgaatcgcctttgagtgttttcatagcttctggcaatatgcagtgttcaaggctcaccttgtactttccytacctcagctgtggaatcaggcagtttttcaggggccatggcctgtttgattggagaatggcatttagaaaccaagatatttcttgttattgatgaatcatattccattgtatggatataacacatttttatccattcatcagttgatgggcatttggattgcttccattatttggcggtgaatagtcctcctgtgaatatcatgtgcaagtttttttttcttttgggtacatatgtaggagtggcattgctgggttacgtggtaactctgtttaaccttttgagggctgacaaatggtttttttggagcaggtataccattttacatttccagcarcagtgtatgtgggttccaattttttcacatcctggatacttttgttttttttaacttataggaagtattattgtgrtttcgatttgcctttctctgatgcctaatgatactgaacattttttcctttgtttattggtcatttttatatctttgtagaaatgttcaatttcttttttctttctttctttttttttttgagacagtctccctctttgcccaggttgaagtgcagtggtgcaatcgcgactcactgcaacctccacctgccagggtcaagtggttcttgtgcctcagcctgctgagtagctggaactataggcatgtgccacccagctattttgccatgttggccatactagacttgaactcctggcctcaagtgatatgcctgcgttggcctcccaaagtggtgggattacaggcgtgagccacggagcctggctgagaaatattcagattctttcctcatttttaactgttatcyattagtttgggatatcataatttcttctgttcccttaaatggtctctgtatttcggggcttttctggattttttttktttttttgctttattttcttttactgtttcattaggataatttttattgctgtgtcttcagtttttattgctgtgtctacactatgttagtgtaaaatttgttacatatgcatctttttagttttatgtttggaaaatattagttattattgctttgttttatgaaatattagctatgcttatagagtaaatcatataactacatcacatatttgtttcatacacatttcttgaatgcctaccgtttggggggcatcaagttaggcactaaatagacattatgagaaaagatttakttttttcccctcaatgatgatatacattcagaaatgaataacacatattgtgctcttttgaatttttttttttttttttttttttaagatgtagttttgctttgttgcccaggctggagtgcagtggcgcaatctccactcattgcaacctccacctcccaggttcaagtgattctcttgcctcagcctgtttagtagctgggactacaggtgtgtgccaccatgcctggctagtttttgtatttttagtagagataggcttttgccatggccaggctggtcttgaattcctgacctcaagtgatccccctgcctcggcatcccaaagtgctaggattacaggcatgagccaccattcctggtgttgagtctttttatatttttatcttatatatttatattttctttcggaatatcttatgtatcaccagccaatgtgtttatagtattcaccttactgcttgttgttttcatctctaaaagttggatttgggtgtgtgtttcatgtcttccatttatatatgtttttaatgaacatgcgtaatataataactrcattcatgtctttgctaattctaacatatgtgccaattctggttggttgattaataaatctcttcattatgggtatttcctaatatattacctgtgttataattttacattttatgtcagacattgtgaatttttaccttgttgggtgctgtatatttttgtattcctgtaagtgttacactttgttctgtcacacaattaagctagtcggaaacaattttatctttttaagatatggtagatgggtttggagcagtgctcagcctagaactgatttacttttgacttctaaggcaaggcccttttatgcagtgtatccactgctctatgtatcatgcagctttttcagtctggctgagggaacaggcgtgggtgctggccyttttgtgcatcaggcctttgttatcacagaactttcatttggttcttttcctggcttcctgtcatttcttcacacgtgtgggttgatcagtattcaccagaatacctgaggagaccagcccaggcaacatagtgagaccccctttctccccattaaaacagacacacccacacacccacccacccacaccccttgcccaaagtcatagtttttaggtggtatagatgtgatttgaacttagatcccggctttgataaaccagtgttttttaaagcactttatgttgcctgcctgtacagcgtctttcctcttccttttgatgagataaaatactgaaagcataactctgaattacagtataaaaatacacattttggcttattagggcagtgggatgtctctgccctcttcccccacatttcttttatgttcatgcagaaaataaaatggaaatcctttttctttttgcaagaacatgaattataagcttataggaatcatttatcatccatgtttaaaaaattcccatctctcagctaaaagactacatcatatgacttaattctaataggtcaactctactgaagttaagagcattcccaaagaatgctctatataaaacttgtgtgtatgtttgcaggaatcttaatggatatgtttctagaggaaatgctcccatgagcattctctccatcatttagcagctgttaaaatgatgctcttcccaatgcccttgttccctcattgtaaacgtgctctgagttaacctggtagccagtacacagtacacagtaaatgacatttcttatctgtatgttagaactactattcaataagctaaaatattytgagcttcctcagattttctcctttttttttttttgagacagagtcttgccctgttgcccaggctggagtgcaatggcacaatctcggctcactgcaacctccacctccgggttcaagctattctcctgcctcagtctccttagtagctgggattacaggtgtgccccaccacagctggctaagttttgtatttttagtagagatggggttttgccacgttggccaggctggtctcaaactcctgacctcaggcgatccacccacctcggcctctsaaagtgctaggattacaggcgtcagccaccctgcctgcttctccttattttttcaagaaataccagtctgtttcatttgcgctcccttaaaatttaagaaaattagccatttgtcatgtgggattattttatccattttgacttgactttttaaaaattttaatttaaaaattttaactgtatgtaagcttaaaattttgaatattrtcaggttcaatttgtgttttcagaggcctcagggttaagtttgcctccttgaagaaatagactgaaaactgcaatactggcactcttatttttaatttttaatttgttagggtaggtagattgtgtttttacctgaatttaagcaatttgttaatctcaatgagtaattttaaaagagttgcacatttgaactctatttttgactgtggagataacctagttttataagctatgaaaattgaattttaataccgtatatatttattttttgtgtktttttcttcctctcattgttttttatggtattcatagttgatccacctgaagaattaggagctagtatttctgtcacaacagatgagctagagaaattgctctataaaccacaagctggtgaatggggtcagaaatcaagagatgaagaatgtgatagaattatcagtggtatagatcaacttttgaatcttggtaagttttttattttttaggatgaaaagtttttttttcaatttttttcataaaggtatttaaaaatactagcataattgaggtttctgttcttttctacactttgtattggttatcttttaatttagcctgtaatgttaaatgtagccatatcttatgaatgatttctagagaagtaccacttagaggcaatggatttattgattaaaaactctcctgtcttccctaacagatatagcagcagcttttgcaggccctgttgatttgtgtacatacccgaagtactgtactgtagtagcttatccaaccgatctttacacaattcgaatgagacttgttaatcgattttacaggttagtagamacctgctttcaaaatgtttaaaaagctatatttggcaatattgactagggtaaacaaagaaagagatagtggtagaattgggggctgattagcattttctgtttcattattctctttcattgtcagatggtgttagatgcctatgggtaggtgtgggtagggccaggcagaarattgactaccatatttcaccctcgtttttttttcagtgattatttccatatcactgaaattttacttttattccacttatttcagtaaactttcactggtactttagtaatgagaatttttctatcctcatacatgattgaagacataatttgttttaaaattaatagccataattgaagaaacagttgtttgtttttctaatcaggtaaccaaggtgcagaatcttaaggcctcagtaaatgttgtgttttattatttgaacaataagaccttctattttaattattcttggtaaatagtggttttgtttctccagtggttttcatttgccaaactcatgacagatggtttaacagggkggctactgctcccagggaactgtcagataaatcctcatttccagtgcagcagctgttggcagtctttcatcaaaagtccatccatctggagttacctattgtgattggccaagtagttttgctttggctaccagggcttcgttctgttgaatatgatattcctgaaatctcttggatattctttgtgtcatttaaaaataatttttgtgggaggccaggcgcattggcttatgcctgtaatcccagcactttcatgaggcccaggcgggtagatcacctgaggtcaggagtttgagaccagcctggccaacatggtgaaaccccttctctactgaaaatacaaaaattagccaggcacggtggcacgtgcctgtaatcgcaggtacttgggaggctgaggcaggagaattgcttgaacctgggaggtggaggttgcagtgagctgagatcacgccactatactccatcctgggtggtggagtgagaccctgtctaagcaattaaaaaaaaaaaaatatatatatatatatatrtrtatatatatatttgtgggagctaaatgataagaccacatggacacacagaggggaacaacacacactagggccttttggagggtgacaggaaggagagaatcaagaaaaacaactaatgggtactaggyttaatacgtgggtgatgaaataatctgtatagccaacccctgtggcacaagtttccctgtgtaacaatcctgtacttgtacccttgaacttaaaagttaaaaaaaatatatttctgtaagcartggtctgaacaggtggtctcttcaggctttacttttgttgtgaagtctttaacacagtccaaaaagcaggtttctctaagtttattgtaggtcccaagaaattccttaaactgttctgagtagattctgttatttatacagtcatatacttctggcctttctgatgcatgagtttcctttctgctctggaaaaatagttgttcaacctatccttgagtgtctccagtaaggcctgatatcttatttaagcacaggctctcacagccgacatgagtaggaggctgagagttgcagggatggtcaggcctggctggagaagggaggtccgagtcagggcctcaaccctcaatctttagtaatctgtttttcttagaaattttgttaagttgttagataactttattttttttctttgtatgtttaaatttctatttaactacatttaaaaataatayttatatagttaatacttggtctttttggcctttggaagattaatttcccagaggcactgactttttatctttggcttctagagcactggtaagtataaaatttcctattcttaatgatttttacagcagttgattgtattttaacttttataattcaactactttaagaaattataaaaagtcatcttgagtccacattatcgacgtaatttatctctgtaatttaacactggaatgtgcattcccatcagaaaccacttgattgtttacagtgaaactgaagctcttagtttttgtttgtttttttgtttgtttttgagatagagtcttgctctgtcacccaggctggagtgcagtggcatgatgatagctcactgtagcctcgacctgccaggctcaagcaatcctcccacctcagcctcttgaatagctggggctacaggtgcgcaccagtacgcctggctaattttttaattttaatttttggtaaatttggggttttgccatgttgtccaggctgatcttgaacccctgggctcatgctgtcctcctgccctgtcctcccaaagtgctgggattacaggtgtaatcccagcttgctgggccagcttttagggttgatgatatttaacatattttctttattgagattcaacaattttaaaaggtacctatatgcagtatgaaaagggagggtagttttgttggttttctgtatgtgattaagtaatttgttaagatttttgtcctcttcagttcaatataattgcttcggtgtccaatgtattgcctatgactatgatcaagttgagagcattagaaggttattcattataactttgcacttatggtttaattattatttcacagttgtttaattcacatgctgcattttttcacttggtttctatcttctcattttctaagccctaaattgtctactttattttgaaggaggctgtctgcgttagtttgggaagtcagatatatagaacataatgccagaacatttaacgaacctgagagtgtaattgcaagatcagctaaaaagataactgaccaacttttaaaatttatcaagtaagtaatttcatagatgttgtgtaaaagtgactgcatattgtgctattaacaatcatctagttttgccgggcgtggtggctcatgcctgttaatcccagcactttgggaagygaaggccgtcagatcacttgcggtcaggcatttgagaccagcgtaccaacatggtgaaaccccggctctactaaaaaaaatacaaaaattagccgggcgtggtggcgggtggctgaggtgggagaattgcttgaacccaggaggtggtggttacagtgagcccaatcgtgtgtggatcgtgccattgcactccagcctgagtaacaagagcaaaactctgtctccagwaaaaaaaaaaaaaaggaaaaaaaaatcatctagttttgttttttactcagaactatacttttttaatgctttactttagatgacatttctttacatacataatttaagtaaaagtctgagaaactgaataattcagtttttcaactttttaaaattttgaaataattttatactccagaaagttgccatttgcctttcatctagtctccccttaggttaacattttatataactacggtatacttatgaaatgttaaaaaaaaaatcttggtaccatgctattgacagaaagtgtagaatttatttggatttcactagtttttacacccttttatgtttcagaatctaatccagaatccccatcaaatttagcgttttgttttcttagtctccttcagttttttcttgtctttatcacctcatcatttttatgaatgttacttattttatagagtatagttatgttacttattttatagagtatatttaattggattttgtttggtattttcccatgattatgttgttttaatgtttcagattatgtcctgtgaaaatgtttgtatacgtgtgaatattctgtagattttcttaaattcagaagtattcagaatcaaagaatgtaaactgacttggaaattcagacccaggttctagtctgctctattctagtgagcattcttaatttagaaacagtgccatcgttttcagcatctagctgaaaactggggagtaactgattcttgtcagctttcttggtttgattctgtcctaagtcttggagactcatacgtaagttacctcctccccagaatcaccttcttgttcttacttcaggaaaattatctacccatttttgtctcctttatgcttagatatccatatttcagcattctttttttctcctgtgtgtacagtaagatactatttgctttaatttcaattcctttttcccttatatatatatgtatatatatatattttttttaccttaaatcaactgttttcctggtacttattgtgtgaatactgctattgatgatacttagaaaaactcatccatgtattcatccaattgaggccatacatatattatttttggattacctgcttaatttggatacatacttaacggaaaacaagaaaaaccttcaagattctaaattaggatttaagatggctagttaygtttacaaagggttgggggaaaacctgatattcctctgtttgaaattaggcacgtataggttggtgaactgtttatattttaatgtataatttgaatccttgccaacaagtcactacatctgcatactattaaagtgaaaatttgttttttaggaatcaacactgtacaaatatctcagaactttctaacacatctgaaaatgatgagcaaaatgctgaggatttggtatgaagtttgttgattttataatggtttttgttaatttcaaatggtatttttaaagtgaagaaaatgttggctttgtagtaccaactcttgtagtagtccaatgaacaaatagggcatttgataaaattatatttttgaattttctagatgatttatgaggtaatttgttttagctaatatcaaaatatatctaagtgaataactttaggtgtggaatatattctctttctatattttagctagtgaaaggtgtattatataaagtaccttggaggctgggcacagtggctcacacctgtaattccagtgctttagcaggctgagatgggaagattgcttgagccaggagtttgagaccctgtctctacaataaataaaaaagttagatgggggtggtagtgcatgcctgtactatagaacacaaaatgcagaaactataggaatctgtatgtttctggggatttgtggatagaggtaaaacacaagttttctatttaggaaatgcatgaascgtctttttatagctgtaatttcaaattttagaattagttcatgttcttagggaatgaaaaaggattattaagaatgatttttttttttcaagcctgggtgccacaaagatcatctggtagtctttctttggagattttgwtaataacatgttataactctggtaataccaaatgtctttgatatgttatttattaagattatgttattattttctaatgagactctaaatacttaaggtgctctgattttattcctaggatgatagtgatcttcctaaaacatcttctggaagraggagagtaagttactctgcatggttgacttttgtagtttctttttctttgttttaaaatcaattcaggattttagtttttgtctttgaaaagttatatcagtgtagatactgaatattttattagcaaaatgggagaaattactggaaagrtttagtgggagagttggaatttgtactgtattawcagagtgagatggagtaagaagaggccattcaaaaaatagaggctaccacaggaaagacaaaaaaagtagagaaatatggcatggcatgtccatagactgttaagggaactacacctgactggtgtagaggttggatgttgaagtgatcaaagwggctgtgtctggctgttatgattggggtagattatggtgatattgaaatccaaggatttcatttaaagtagagaatcaattgaacagccaaaatagataatacaatttgaaggataagaagatgtgtattaaaggagatgaattagsagtttattccaagaatatagggtgaaggaygggtacctagtcaaggatatttgcttggaatggagaggaaaggaaaattatgacacctttttagggaaaactaactaggatttggtgactgaactttttttaacaatggagatatgttgggatgatgaggttgaggggtaaggagaagggtctatggaactaagtttatgaaagtgggtaatcataatggagtatcggcaggctttgaagttcaaatatagagtaattaaaattaaaggttattaatatgaaaatgcttaagacattttagcccagatcattttaaatttcctccaaatgctccttaaatttaagctttttatgaaatattaatttataccatgtgcttgccttccagaacactgaaaagttatacctaaaatactctaatttgattagtcattttcgtttaattttatttctagactcccaagtgtttagtatttgtatttatttgctatgtctgctgcagcaaatgacaaatttagttgcttaaataataaaaatgtattacctgatagttctgtagattagaagttttcatgggtctctaggtcagaatcatggtcttggtgtggccagaagctccagggagagttatgtgcattttccagcttctagtgggtgtcctcaccttggctccaggtcaccttgttccatctttcaagccaacaatgtagcatttttcagtctctctctgactctgacctttctgcctccctcttataataacttttgtggctatactgggtccaagcaatcaattcaagataatctttcatctcaaggtctatacccttaatgcaaaataccttttctcatgtaaggcaacatagtcataggttatgaggattatgatgtggacatctttggtggggccattattctgcctatcatattatcagatgtgcttcrtattctgcgaaaacaaatattataaacctgggaggtgagaggtcatggaatagcctttcactagataatgtgctcttgttagagtatgcttttcatagctaactttgtaatatttctgaaattggttaagttatatsaaaataacttaygtttcatgcatagtttaaaaatttcatttctggaaaaatgtgttgagagcaacatatatgacattattgtatttttatagaagacagtagatcagttacatttttaccacagtcttacaccaatagtgtgatttttcttaagactgtgaatgtatttttaggtccatgatgggaaaaaaagcatcagagctacgaactatgttgaaagcaactggaagaaacagtgtaaggaactagtgaacttaatttttcagtgtgaagattctgaaccatttagacaacctgttgatttggttgaatatccagtaagtttccattgtttaaatgtttggggcttttcttgttttgcagtgaggaaactggggtagagttattaaactttaaagagaaagatacccaggctttatgttaacttttttgctcctatcactaagttagtggtagaagtattgtttttacatagttttcttcaatttatagacacccttgtgagctcatttaagaatttagacttagataatcagtattacataacagtgggatggatctacttagatttctatctaagtaggcccagcactaggagaactgtgaattggataaacgtgtctgtttgcactctttaaaaagggaaattgaaagatgactttataaaaaaagttggattataacagcacagagtgactgtaggatgcttggagtacatacagcaggaaataaaaccatcccatgtgtcactaacaataaatagacattaacattttggtatatttctatcttttctttgtttttatacctctttttaaacattactaatgaattttaagagtcctctaaccttttcctctcttccatcatttcacattttttagagatctgatgcatttacatttctaaaagcaagaaatgaatctatgaattaaatattgtgtttaaaacctaggactacagagatattatagataccccaatggattttggaacagtaagggaaactctagatgcgggaaattatgacagccctttggagttttgcaaagacatccggctgatatttagcaatgcaaaagcgtatacaccaaacaaaagatcaaaggtaattttttatgtggtttattgaaaaaaactgcctgatctgtgtagataattttccaatgtaatagtaattttttccagtgtaattttccactgtgtaatagaggttagaacattaaagataagtgaataaattaagactattataaagaaaagagcttctgctactgytcatatagcttcagtttttgcctttcatcagttgatgtttatcataatctcctcaaattttataagcaagtggggattaatgggagtaggcatcaatagaaagtgaacaaatttgatacacagagtaagagtctctgtgttttgtatgtataaggatcttaagtggattggaaacatagatcgagactgtaagaatattaaaagtaaaaaggaaaatctgrttgtgagactgctgacagcataagaacatttggatttgaagaaggaacacatgagctatcagattaagaccacaaataatgttacagagccagtggaggctctttgcttgatgtgttagaagctaatattatgacacagggtttttctttttcttttttttttttttctagcctactcaagtgaagtggtgacactgggtttttgagaataagctttatattgaaagttgactcctraggagacaggagtgaatttcaaatctgactccggtgctggctttaaagcagtatttttattttttatttttttttaaagaaaaggttcagggcatggattctgagattagcaggtgattaatggaaggaaaggagaggtctggaaagtctttgggcatgtatagttatttctttatgttatctgatgggttgcgtgtgcaaatttgggggaagttagtgtgaagcatgctggaaattcaggctctgatgtcagcaggctcattctttgcagactccacttggccatactggttttaaccagtttcagccagttcttcttatctcataagcagagggagttttagtgttttatagtaggttgggtttctttctttctttttttttttttgtcattttgtaaacttaaraatttttgttaattgacttctttaactctttggggcatgcagtttcagtagaaggttactaaagttttgttaacatgttacacattgggtaacttttcaaaacttgatgaggcctgtaatccctggaatttgggaggccaaggtaggcagatcacttgaggtcaggagttcgagaccagcctggtcaacatggtgagcccccttctctactagagataaaaaaattagcccgtgttggcgcttgcctgtaatcccacctataggcacgaggcatgagaaccgcttgaaatgaggcatgagagccacttgaacctgggaggcagaggttgcagtgagctgagatcatgccactgcactctagcctgggcaacagagcaagactccaggtagctcatgtgttgaataattgtaaaaagtcatatttaaagtaaaatacttgtttgatcttacaacattttttggtgtctacaatcagtgacatttaactgttttgctttaactgcatttccctgtcattacttaatattagactcctcctgcattactgcctctggtctcaatttgagaactctttcttggattcaggatccacactgcttgctggatcagtttaacgttcaaggctaaygtttccaagcttggatttttgtcaaagtcaccatttgtaagactgttttttttcagcgacaaaataaatttcattcaagtcttccctgygcccctcaaatacatgtttgaggacacataccatacagttcaccattgaaagcttatagttcagtggtttttggtatagtacattgtcagttgttcaaaactatggttaactatatataacataacatttgccattttagccatttttatgwgtacaattcagtgrcatcgtttataatctttctaaaaccttttcatcattccacacagaagctctgtaaccatcaagcagtaatttcccctcacccccagtccttggaaacctctaactttcggtgtctgaatttgcctgtcctagayaatttcatataaaaattgagatcttaccatatttgtcctttgtgtccagcttatttatttcacttagtgtaatgccttaaaggcttatgcatgttgtagcatgtatcagaactttattccattttatggctgaataatattaaagtgtgtggttataccatatcttattcattcatctatcgatggccagctcggctgtttctatttcttgaccattacgagtaatgctgcagcaaattttggaatacaygtatctctcagaaaccctgctcaattcccttgggtatagacctaagagtagaattgctgggtcatgggataattcatgtttaccttttccaggaaccactacactgttttccatattggctgcacctttttacattcccgctggcagtgtataaaagccacagtttgttcacatccttgccaacacttgttgtttttggagttttgkgkgtgtgtgtgtgtgtgtgtgtgtgtgtgtgkgtgtstgtgtgtgttttcttttttttcttttttttttttgagcctgtctcactctgttgcccaggctggagagcagtggtgagatcttggctcactgcaacctccaactcctgagcaatttgcctgcttcagcctcccgggtagctgggactacaggcttgcgccaccatgcccggctaattattgtatttttagtagagatggggtttcaccatattggccaagctagtcttgaacccttgacctcaagtgatctgcytgcctcggcctcccaaagtactgggattataggcatgagccactgtgcctggcagaataaaatttatatatatgaaatactgaaaataactgtcaaagatcatttcagattaagtayaacaaatttcacattcatttgtgagcatatatatatgtatatgagaagcatgtaagaaattcgtatatctcacatactttttaaaaaagttttctggtattggagtgtcttcgccatccactgccatgcacaagaattatatttaagttttgagcattagacttttgcacttattttcaggaaaagtcgtggaggaggatagagtagttctgtacatacatagctgtatccaaaagtatttaagatttgatgttatttaattgtaaacattgttaaaacaaatctttcatatgcattaacgttctaggttatactttctgctactggatgcaaggtatttttgtttcatttttagaattaggtggcattgaaaacagattgcagacagagatgggtatataaaagtgcttttgttcccttgccccaaagaaagacagcgcttttgtagcctaaatagcagccttaaaacyattcaacttcccatctaactttgggagaagggtatattttggggtttgtacatacagatgttagaataggcaaaaacagttgagattcactgacatatagacacaagtcctgaatatagatgcttgacttcaaactactttcttatcatctgagaggtatgtatttgatacttcttacttccagatgtcattaagggaagggggttggaaacagaagaagtgggtgacagccattacctataagcagtgatataatacattgcaagggatctcaatgattacaattatttcttaagtacttttaaggctattttgtaattctactttgtttttatatccttgcagatttatagtatgaccttgagattatctgccttatttgaagaaaaaatgaagaaaatctcttctgattttaaaattggtcaaaaattcaatgaaaaacttcgaagaagccagaggttcaagcaacggcaaaattgtaaaggtgacagtcagcctaacaaaagtatcaggtaaactggttatggcaagcttgctttatttatttatttaattttggagagagtctcactgtgtcacccaggctggagtgcagtggcatgatctctgcctcccgggttcaagtgattttcctgcctcagcctcccaagtagctgggactayaggcgcacaccatcacatctggctaatttttgtatgtttagaagagacagggtttcaccatgttggccacgctggtctcgaactcctgaccgcaggtgatccacccaccttggcctcccacaatgttgggattacaggtgtgagccaccacgcccagcctatttatttattttttatttatttttggagacggagtctctctctgttacctaggttggagtgcagtggcatgatcttggctgactgcaacctctgcctcccgggtcaagcagttctcctgcctcagcctcctgagtagytgggactacaggtacatgctgccatgcctggctaattttttgtattttagtagagacagggtttcaccgtgttgcccaggctggtctcgaactcctgagctcaggcaatccgcctgcctcagcctcctaaagtgctaggattgcaggtgtgagccaccgcgctcagccctatttattttttaagacagggtttcactatgttgcccaggctggggtctagtgatatgatcatgaccactgcagctgcaactttctggtctcaagcagtccctctcacctcagcttcccgagtagttgggataacaggggtgtgtcaccaagcctggctaatttttaaaaattattttttgtatagatggggtcttgctatggtgcccacgctggtcttgaactcctgggatcaagatccttccaccttggcctcccaatatgttgggattacaggcgtgagccactgcgcccagcctgtatgcatttttttaaaaatttaagactgtgttatttaatctttagagtactgtacattctgaaaagactagtcatgggttttatagcttgaaagcatttctgtgaatatagagctgttgtattggtttgtaattctataaatatgtaaaattatagattttttcaaatcttattaaggattatttaaagtgtcatttgtattttgcataagaattggctctttaatatagagtcggagtccccagcacctgctccctgtgtagactgggccacacagtaggatgtgattggctggcaaacaagcattaccacctgagttctgtctgctgtcagatccgtgggggcattcgattttcataggagcaggaacctttttgtaactgcatgygagggatccaggttgtgtgctccttatgaggatctaatgcctgatgatctgaggtggaacagttttgtcttgaactctgcccactcactggccccagtcccagtccatggaaaaactgtcttccacaaaaccggtccctggtgccagaaagcttggggactgctatgtagagaataatgtgatttttatgtatggtcttttgagcatttgattgtgtaagggaaaatgtacccttgatacaatgtacctcagtattactgaggattatttgtaaagaaatgtaaaatgaaggatttattaactttctcagtaattgtatattaatttacattctatattctttgactatgtagtttagattaatatcacatttataggtactttatgttgttacagtataaaaattgagttgtgcaatgtttagtttgtttccatttatattttcaactgtgcagtatatcccttgatgggatttccttgtggttgctctggggactacactatgcatctcaatctattgcaaacaatcgattttatattaatactatttttattacagtacatataggaacttggctctagtatagcttccttccatccccttcctaggtggtggtggtatcagatcacttttttttttttttttttgagatggagttttgctcttgttgtccaggctggagtgtagtggtgcgatctcggttcactgcaacctccaactcccaggttcaagcgattcttctgcctcagcctcccgagtagctgggattacaggcacccgccaccacgcccaggtgattttttgtagttttagtagagggggtttttccctgttttggcggcttgtctcaaactcctgacctcaaataacccacctgcctcgggcttccaaagtgctgggattacatgcataagccactgtgcccagccttatatttacttttgttctctcccttgattattaacggcatttaaaatttttgatattacagccttgacaattattgctttaaagaattgtgattaactttaagcttcaatgtctagataccacttaaaaggctgttttgcttttgttttaagaagcagggtcggctgggcgcggtggctcacgcttgtaatcccagcactttgggaggccgaggtgggtggatcacgaggtcaggagatcgagaccatcctggctaacatggtgaaaccttgtctctactaaaaattacaaaaaattagccgggcgtggtggtgggcgcctgtagtcccagctactcaggaggctgaggcaggagaatggcgtgaacttgggaggcggagcttgcagtgagcagagactctgtctcaaaaaaaaaaaaaaaaaaaaaaaaaaaaaagaamcrgggtcttgctctgttgcccaggctggagtgcatggtgtgatcatartgtcatcgtaatgtcaagctcctgggctaaaacaagtctcctgagtagctgcgatcatagatgtgcacaactatgcccagctaatttttaaattttttgtaggcatggggtcatgctatgttgcccaggctagtgtttgaactcctggcttcaatttatccacctgcctyggcctccyaaagtgctgggattacaggcatgttcggccatttcttagctgttttraaggaaaataggattatctcaatattcattcacccatatttctcacatgccttaaacttccattctcctttctcataattcctggcctagtggccaaccatggtgaatgggtgcagttagatgtaaatagtctggtcttgggacaaaaatcattttgttctgatgcctttttttaacttttcctgtttaggttttgttgatttctcctcttaaccatattctgtctttagggacatagaaataagagaggagaaagttgggtcctattgaggcttacattggtagtatgaatgaatacctatattacgtaaatgttggttcctcttagcatttaatccaaagaatgtaaggtattcaaataattttctgtaactcttacttggaacattgattcattactccaaatttgaataacagtrcgttaaatttagagttaggaaatactactactaatcagtgccagaataaaatgttaatagtgaatattttaatgttttgatgataaaattactctcagtttaagaaatatgatatamttctatttagtcattctctgtgaaccaattatytttgtattttgttaaatactgtttcctttgttcatatgtttggccagaaacctcaagccgaagaggttaaaatctcagacaaaaataattcctgagttggtaggttctcctacccagtctacctcaagtaggacagcttatcttggaacccacaagacaagtgctggtatctcttcaggtgttacttctggtgactcttcagattcagcagaaycatcagaaaggaggaaaagaaatagacctataacaaatggttctacattatctggtgagaagtgaaatactatgttatttctttgctgagcacccaaatgtgtaacactggccrttactagagatttagaggaaaatataaagatgtggccttgacactgaaagaacttacagtttaatggaagagataaacataataaacatggaacaattcgrttatcttctrtaagtgccatgctttgtgaatggtacatttatattgaattgtcaattacrtgatacatagattcttcacacttggtgtgcagcatttgaagtttttgtatctttttaatttaaaaattaagaagtactaagaatcaatgaagttcaaagctgatgacgtagtaaattctaaactgttcatrttgttgccatctggtagcataactgtagctgatgctaactttgttaacattgtacaaatgaggctgtggtgtgtatctatttctgtactgctctgagtggttttgctgaattatgacaatagcatactatttactgttataattgaatcatttatacatatcttttacctagtatttcaataaatagtattgacagcattgaaaaatatacatacagataaaagtttggaatggaagtggactgtgataaaacgtggagaaagacaagcaagttcatgtgtatcacattagaactgtacagtgttttaagggatacattcatagcatggaatgtccaatcagagtatgctggagtaattgaaaatggcactagtgataagtggacacattacagcctagtagcaactatgagaaaatgcactgaaggaaagaaggatgcattttgtgcaaatgaaaagaccgttttggggaatgttacaaacaatgggatcaaacagatagagtacagtcaaagtttagcaactttcgagccttgcagaagagtttggattactgaactgggtyccttattgagtgacagagtcacattatgtttcaggaagattaagtttggcagtgatgtgcagagggaggggaagagcctggaaaaacagggagtcaaggtgatggatggtagagttgacaggagtagctgaggtgggcaaacagtagaacaagttcaaaggatgaaccacaatttggtgtctagtattttggtatcacagccagttttcttttcttccctctcacactctytctctcgtgtagctgttatgtaagaaatgaccttactgtgctgttaggaatgggtaaaaggatggtgagacatgcaaactatgtcttctgaaatgctggaattgaaatgatggtgtcttttttatatgaaatacctatctgatatcacagaagggagtagacatggatccaattaatttaactaatttatttttgagacagagtctctttctgtcgcccaggctggagtgcagtggcacgatcttggctcactgctaccttcccctcctgggttcaagtgattcttctgcctcagcctccccagtagctgggatttcagggtcctgccaccacgcctggctaattttgtattttcagtagagatggggtttcactatttggccaggctagttttgaactcctggcctcaagtgatccacccacctcagcctcccaaaatgctaggattactggagtgagtcaccgtgcccggcctgcagctaattaaatttttaattggaagtctgtttataaaatacataaactatattttgtaaatctacactaggattaatctgttatttttagaaatakaattaaaaactatttggaatgctgattatgtaccttttaatactccaaatttcatcagctttttttgggaatggtttttaaaaaatatattctaagcattttaggaatctgcttttgtagtaatgttatgtaatgttcagagtaatgttatgaactgcttgcttatgtgtgtaaagacaggagaatatatgtaactatttacactttatttttcctagaaagtgaagtggaagattctttagctacctctttgtcatcgtcagcttccagtagttctgaggaaagcaaagagagttccagagctcgtgaatcctcctcacgcagtgggctatccagaagcagcaatctcagggtaaccagaactagagctgctcaaagaaaaactggtaagagactcagtagtacttttatggaatgtatatcaaaagaatccaaaagttataaattgaatagattctygatttaatgcatctacgtaagattaagttaatgtcctttaggttccttagatttaggaaggaaatgaattttggcattaaaaagtgaagaaaaggctgggtgcggtggctcacgcctataatcccagcactttgggaggctgaggtgggcggatcacctgaggtcaggagtttcgagaccagcctggccaccatggcgaarccttgtctctactaaaaatacaaaarattagccaggcatggtgactggtgcttgtaatcccagctactcaggaggctgaggtaggagaatcgcttgcacccaggaggcagaggttgcagtgagccaaaattgcaccattgcactccagcctgggcaacaagagcgaaactccgtctcctccccgccccccaaaaaagtgaagaaaatcattaaaataatagtcatttaaaaatgttgaaataaggaaaatctttttaatcttattgttaaccttatttctaggtcccgtttcattagcaaatggatgyggcagaaaagccactcgaaagagagtctatttaagtgattctgataacaattcattggagactggtgaaattctaaaagccagagctggaaataaccgaaaagtcttaaggaagtgtgctgctgtggctgccaataaaataaagctaatgagtgatgtagaagagaattctagctctgaaagtgtctgttctggtcggaagctgcctcaccgcaatgcttctgctgtagctagaaaaaagttattacataattctgaagatgaacagagcttaaagtcagaaattgaagaagaggagctaaaagatgaaaatcaacyattaccagtgtccagttctcacactgcccagagcaatgttgatsaatctgaaaacagagactcagagtcagaaagtgatttgcgggtagcccggaaaaattggcatgctaatggttacaagtcccatactccagcaccttcaaagacaaaatttcttaaaatagagtcttctgaggaagactctaaaagtcatgattcagatcatgcatgtaacagaactgctggcccatcaacgtctgtgcagaaacttaaggcagagagcatctcagaggaagcagattctgaaccaggaagatctggtggtaggaaatacaatacatttcacaagaatgcgagtttctttaaaaaaaccaagattctgagtgactcagaagactctgaatctgaagagcaagatagagaagatgggaaatgtsataaaatggaaatgaacccaatttcaggaaatctgaactgtgaccctattgctatgtcccagtgttcctcagatcatggatgtgaaactgatttagattcagatgatgacaaaatagaaaaaccaaacaattttatgaaaggtaattcaaaacatttatctttgttcactgattgactctcaccatccttttctcttacacacattggttttttccccccgaaaaagtttcccttgaaacttttttctctttgctgtttctctccctcccatgcattctgtgttagccttctctgttcatcctttatattcttatgtgcatgcgtaactttttattgagtataattttattcacctaacaggcaatcttggccttaagaactatgcctattgaagatttcacttcttgtattgatgatggggatatattatattagagatgggcttgaataaagcagagaggggcacatttataagctgtgatgttgatagcttaagtagtagacaaaaagggtaggactrtttaataaaaagagatgttagtaatagcaaataaaacagttactgagctgtttctattaggaagtttttctaaatgttttccattaataagcagtttagtcttcatttcttttatgaagtaggtactagcattattgttcattttacaggtaataactggagcacaaagtggtgaaataacttgttgaattaagattgtacccctggtacatggggattgataaaatactgtagagcagaagacagctaaaactaagatgaaaagtaattgtgtgattggagcttggggagttacggggagtttcagagaggctgagtgttaagtgattactttgcatatgctagtgctatggtaaacagtttagttgtattcatgttaatattatagtgtcaagatcatgggatgttattgagaatgtgttgaatttgtgaatggtgctgaggatgaaaaagttactgctttaaagtacagtcatgtgctgcataacagtggtggtctcataagattataatgaaggttaaaaatttcyattgcttagtgaagtaatcatagctgtcctcaagtcctagtgcagtgcattaccttttctgtttggatacacagacacagacttaccattgtgtgacaactgcctgcaggattcagaacagtagcatgtcatacaggtttgtagcctaggagtaataggctataccatataacctagatgtgtagtagggtgtactgtaaggtttgtgtaagcacactctgtgatgtttgcttaagacgaaatagcctaacgatgcatttctcagaaygtatccttgctgttgagcaacatatgactatactaataggtgtgtaccattccattcactgcaatacccccttcaaattaatacgaattctgaacttgtttttaatattgaacatataattcctttagacttacaaaagattaatagaaatctgctctttaacttttagattctgcatcacaagacaatggactaagcagaaaaatttccaggaaaagggtctgttccagtgactcagacagtagtttacaggtggttaagaaatcatcaaaagccagaacaggtctcctgaggattactcgaagatgtgcagctacggctgccaataagatcaagctcatgagtgatgtagaagatgtcagtttagaaaatgtgcacactagaagcaaaaatggaaggaaaaaacctytccatcttgcttgtactacagctaagaagaaattgagtgattgtgaaggaagtgtacattgtgaagtaccaagtgaacagtatgcctgtgaaggcaagccacctgatcctgactccgaaggtagtacaaaagtgcttagtcaggctctaaatggagactcagactctgaagatatgttgaattcagaacacaagcacaggcataccaatattcacaaaatagatgcaccttctaaaagaaaaagttcctctgttacatcttcaggagaagattcaaaaagtcatattccagggagtgagactgataggacattttcttcagagtcaaccttggcacaaaaagctactgcagagaataattttgaagtggaactgaattatgggctgcgcaggtggaatggcagaagactcaggacctatggaaaggctccttttagtaagacaaaagtgattcatgattcacaggaaacagcagagaaggaagtaaaaaggaagagatcgcatcctgaattggaaaatgtgaaaatctctgaaacaactgggaattcaaagtttagacctgatactagttccaratcatcagatttgggatctgtaactgaatcagatattgactgtactgataatacaaaaaccaaaaggaggaaaacgaaaggaaaagcaaaagtagttagaaaaggtaaaacttttacagctaacatatctaaaactgtgagacgtcaaagacaaagcaaacgccctasgttaagtgtggatgataatgactgggaggatttggactatgcaaaatctaaaagagttcttcgacgttcaaaaataaaaacgagaaatcagggtagaaggactgtgagataccatgatggggatgatgacagaagtttagaaaatgtgttagatttcaatggttgcaccttatgaccttgagggaaagccagttcatttaagaggaaatggactggcatttatggtgaaagctggctgttaaaattatttttttgtcttacaattcagggaatatatttatatttttctatgaaaagttatgaatgtgactaaatcatgactgttatttttatttgcacttgctggtctttgtagcagcattcagcacaggtgccaaaatatgcttcattttgggggcagatctattttgacagtatttgactacatatagcaagagtttgaaatatgttaaacactagacatcctggttatcaaaaccaatgagcattactttcatggcagcaagtgtcatgcagttattttctgaatttgtcaaagaggcagtagtttctaacccctgttctatagtagttacaacaatttcacaacctatgtttacagattcttcataaatacatgcatactgacactataatcatgggasgtgtaaccatgattagtaggcgaggtacctaccactttttttttttcttcccctggctacttgagtagaatgcattataccagatctggtcactttcattgaaatggtttctaattttcttcccaagtgctgttgggtttttttcttcttaaggaaaacgttgtcacttttatgttataaacttgaatttataaagtgctggtaaattatttttaatgatttgagtgcatgttttaaacctctaggaccagagcatagtcagagcattttcttttaaattgtgcactaacaaaatgctatataatctgtcttctgtccaagatctcctggtttccattgtaagggatttaaccaaaatcttgytcttccataatcttactctgtgaaatagaggaattcgtgtgccttagatttagaagtgtgttctttaatagagtgtacagggctaaaagagtatttaagttaatatgtaggtttcccccatctgtattccaattgtagaggtgagttttgttaagagtacaattgcaaatcttatctatataggaaaatagctaaatgtcattctccatctctttgttttagtttactgcttccatgtgcaatcctaagcattctttgctggggcaactaaatgtatctttattagtgacttctagtccaaatataagaaactgtcatgttttgtgggaaaataattttataatccatttaaagtgaaagtttatcacacaaatagtacacttattttctaaccaaatacttgataggttatgctactccagtgtagatggccattcctaacttgtttgtgcctgaagatggacttgattcaaatggtttacatatttagtgggtaagggatatgttacagtaccccacctgtaagttatttattagccctaattgtgtttgatttcagacaaaattaacccttttctcctgtgtatctttgaagtggcagataaggtgaagcatcagactggtatcaatattagacaatgttatttattagccctaattgtgtttggtttcagacaaaaccttttctcctgtgtatctttgaagtggcagacaaggcgaagcatcagactggtattaatgttagagaatgttctgaagtgttcctattttgtagttatctattccatttgacatagtagaaggtacattttctttctactctgatgcatggggaaggatgtttttggacattatcaactgagataggtgggaaacctcctctcatttgtggcttagagagctatcaccatttcagaactatgatgcttttcttctcagaacttgtgttaagtagatagtaaacagattgattcatgatmattgtccttgactaagactgaaaagactaatgggatgccttttactttgctaattttaaaaactggtgatagatgtcaaatccattaatttatttaaactcttcttaaccttctcttttataatctgttctcaggttttaactccatgtttaccatcatttgcaaaaaggtaccaaaaaaatccataaataaatatggaatacattcataagtacatacattcttttggtataaaacaatattttgacagtttaggcttcattaatagaactattctgattatttggactgcattaattggtcaytgactggccatccaattaccattttttctttcagtccaaaatagttagacccttgcatacagaagtggtattttggtttttaatcagatttggtttcatcagaagcagcaagaatggacctgatgtctttaaaagcatagccgacaatggtagcttctcaagttatgaaataaaactgagagataatggagaaaataatttttatgggtttttttggttatggtgctattcctaaggttaactttgaatatgtgacacacacactcctaagtacctttaaggaaaattaataaatcattaatagttaaaatgtttacattgagcactagaacatgtttggccttttttttctacgttatgcaaaatgcccagggatttaatgcacaggtgtactttaatgtttagggtcagtttgtagtattcttgagaaaaagataaagggttataatttgaatgtgaactgatccagaaataagtgctgtacctttccactgcacttgaagttcaacttaatggtgtatgtgaaaaacaaaaactactttggttgtgtatgtccaaagtcctatggttttattcatttatggttttacaggctttgaagtactcagatttgatttttgctttcttggaaagactcactttaccaagcatataaaggaaaaatgatttcaaacattgacaagatagatgagtgttaacaaagctttcttttttcgtgtyctccttatttaaaaaggtatacttacaatgtgaagtaacttatgaataaaaggaaaagtttatcccatattcaaataattcctaaggtcagcctccctttttgtaagtggcaaatatctgattaaatcatttctcagtttattaatccttggaaacaatgatatagcagttactcacagcttgtaaattacaacagaaaggttcctttcaaatagtagagctgcacctaaagaggaaattgggtttataagaaaatggaggcaaagaacttaagttttaagaaaaagcacttcaaaacagaagggcaaatggaaaaggggratataaaacaaaccaataaaaataccatctgagggtgttactgtccaaaaktaaagaataagatgcatcactaagccctttgcactcgttatgacctcgtaagtaaaaattatcacttagaataaggggtgcacactacaktccctctgtcttctagacttttttttttgtagaagaatcagaaaacaatttactaacctccctgtttgatattaaaaahaggaagaattttaatattttctgtyagtacaagttgaacttgattgtgycaactgaaacccyagaggtttgtrtatcagtagaatgcaagaacattgttaaaggtgcttacratcttttttgttttcctttccrctccattgtatcaattttttgagtaacttttaaatggctagaaaatggtctttttgctttgcccttttaaagctgaaataaccagctccattcttttcatgartagtaagttgatatatttatttatcaggtatcttgcagttgtcmccaaatactgtagttttcttatgttgtatggaaattatagttcaattattttaatgtgatrgagtgcaacragtcattgtagaacttttcacctgttaatgttgaagttatacctctgaatttctgctgtggatatcaaggaaataataaagcagaaaccccaagaaatttgcaacttaacagtttgagactgtctcttaycctagtatttgggaagagaaggaataaatttgtcaaaactaggtgagaaaatagagcattgtgggaaaaactgagtccaactagattagcaaatgttaattcctagctcaaactgtgaatastaaggattgaaaagtaaagtatgtaatgctaagggctgtgttgtcttttcttacgattttaagttttaaaggctgttaaattacagagatgttgcccaaggatacatggggattctcaaaagtaagagatttttacctttttcataatctgccaagctggttcctaatatattgttaaattggtagaaaaatatctttaaattggtgtctgctcaagaattgcttttctagatttgatggagggagggggagagtcacatcatttggattctaccaatctgcaggctctatctttggcaacatgtaaataattagactatacatctgtttctcaagtatggcaagaccaatagtttgaatttaattatcaatgctatggtatactttctggtcatattttagttatgtcagttttaaggtaagttttttcatttattaaagcccttaaatgagattttagactgccaaagagaagaggcagtccaattgacctaactgaaatgagatgaccagtatatagagcctagatggactgtagcagctctacccctttgttttacaaggtaaatcattttaaaaattaccttttttgatcagtgggtaaaagttaaagggatctttaatttttgatatattcaagttaattttctaaatgtgaatcagtccttggactgcaactatatattcacctacaaaatcccaatcaaaaaattacatgagcctgtcaagcagatctttagttttccacttcacataagatcgttaatgttctaaattaatctattcatttagatgatttttgtcagttcttaaatgggatataataaatttagcattttcatcttaacaagcaaaagagttaaaaaacaaaacaaaacactactccaagccaaatacattctagctggttaattccagacttgtcccaagtggttccccaacctcttttccactggtaatttcttttcatgcaggcagaatataggggtgcgagcgctgtgagttttacatatgagcttggataggggaactgaagcgagtcaggagccctgctggaaaaggggtttgccattggattgtctgtggcctggtttctttccagtagtacagtaatagggtagattgaaaacaagtatttacttctgattctgcctgcatttagtgtgaaatgctcttaaggtattgcttctaaaaagcaaattaagcagttaagtataaagtccctgaattcatatttcaaaataaggcttttatgagatttttattaaaaattgcaatagccatcacaaatctgagtttttctaggggtgagagaaaactgtattgtgatgagctagattagttgtagttccagaataagaacaaaaattcagagttgtgtggtgcccatcattgagtaaatgaaccctaaaaatgaataagctaatgaactagttcatggaattatttctgatggtcttttgacctgatgctgccatactgcagtgttaccagctccccctagaaaacggaactgtttaaaaacacagcaagttacagaaaccattttattctacagccattggggtacttcagtttatgggatgtttttggaaacttctgctttgggagggatgaagatcattgataaatgttatttgctttctgagttttggggtcatttcattgcttatcaatgaagggcagacagaggagagaatatctcaagtcttttctgataaaaggcttgcttgagggagcttataacttgcacctagagggtttacccactttgtggatttgatttatccaccaaccacagcaaccaataatgtcaagattctaggagtttatgaaagaggctagtatgttttcattttgagtcagacattcttttctcattctcaaatctgttttaaatgctccaattttaaaaatgccaatgaaaattttataatgcttctgtagtaaccatatgcagtttactttgaatttaggaaaacagttttgtatgatgaaatattgtgcagaatctgtaaataaggtagcttaaaaatwaaaaaaaagtctaattagaatatgattaatccttraaatgtagaaactagagattgtgttgagtcagaactgttatgtttgtatccaggtttctattcaccacatataccatcttagaatacacacatatctgtgagttataatttaaagtggtcatccagggaaatgatcatggagtgctactacagatgtacagttttacactactgatgtgttcttgccatacccaagtagggaatcacttccaggaaaacaagtcctcaagcactcaatgactttgtaaacccatgactgaaacaagactcatctgaggcagtaggactggtgggattctactgacttcttagtatcacatggcaccatcacaaatgcattgttagagcagcaacatccagagttcttaagcttgtaccctaacacacaaatttgacttctaaccctgaaatatcctatatatatttctaaaactgtttgtagttttcttgagaaaaagcactttataatttactcagttttcagtaataaaattaacactgacttgaatgtatttaaaaaaattctccacagttttgtcttcctcagattgtttttatccttattctctgaaattcctgttttattgtctaagacttaagagattcagctttatcaagttagagtacagtgtaattcaaattctccctcccttgggcatagttactgaagttcaaatttccttaagtattttttaaaaacctgattttagttttttttttcctgcagaatcttaacttttccattattctggatgacaaataaacatttattaaaatgtgttaraattagtatttactaggttcctaaattgtcagtataggtactttgatcacacatcaaaatggaatttctgcaacttaaagcattttgttacaaattgtagttgaaatagaattttatctatttgtctggatgaataggttgttgggaatgaaccagttatctgttcttttcttccaaatgcaaatggtgcagctagttgataatagtatattctcatcctactataaagtgcaaatttcaccttaattttgcatattttaaaatttttgtttaccctttgtagcatatttacattttagcatttgctaacattgatttaatgtgttaaagattmattttggatatagggttgacttgttggagatactagttcataattttaaaattcccaagagaagtgtctttgaagtggtaaacacagtgcactttaagccacttctcttcccacagagtccagctgaaggaggtaagggcatgctgcatgagagtaatgccgtgatgagtgtcttactctggtaaaatgccatttacaatgcctggagactgaacactgaacaaaacatagtgcccttagaatttcactggaaaaacatgtgaatcacataagttagttggcaaaaggaactgatgtgtatgtggtggggttgctttgaataaagtatttcctmacctattctggggagaacgctcaactgatcttagagaagtgtgaaatcagtttcatagacttagggaaaaatctgaagtgcttgcactgtgagggcagaggcctgcctcattagtctagctgtatgaacatgtcagtccacagaagcagtttttacctgtactcatctgcccttcagtcagctttgtgacagaagggcaaacatcttcacagaagaaaaagttcagaaggttggcattggtrgtttcattgctacagaataatagtgttacttgatagtatctgactaaaagagctctcattttctagtacttagtagtaaaaagaatgtggtggagtcctccagatgtctagtgtgggtggaggatatcaactggttatttcagtgatctacagccttaccttttgaatgctaartgtctggaaacttcaggcagggtcctacaaaacaaactgccatcaagattggtgtgtaccatgaaggcagttttagatagtttgactgttcatggctgcaagaaagacctaaaattcaagggcccgtgaacttcagatacgtaaaaggaatatcacttctgttctagaagagtactaattagacttgtttgtgaaatttgaaaatttggctttgagacactggtaacaaacatatctgagccctcctaagtttggtcagcacggagtagtagctctggcatcatgtggctgtgtagagctccagtgtgatttcaagccccctctaaaaactgccttagtctgcatgaagkagttaactctccaaagtgctttttgtctggcaaatcccttcacarttttcacctctcgtctaaaagcttccttaaaggaagccttccttgatcccttaggctaggttaggtttccagtctgtgttctcatagcactctgcactttttggttccttaaagcaactctgtgttattttttagaattttaatctgaatctcgtgtgtcacatacctaggtcagaaaatactggaacaatgaagttaagatttagtaattcaaattatgtaaaatgctcatatatatgtttttagattagcagctttatgatgccgatgctgaaggaacttttcaccccattcttacaagtctgctactgttttaagtgacatccttatagttgtagataagcaaatgtaaggttatatcaatgtgaagaagcccttagtatcacattttaaaatttatcatttagcaatatgacttttaaatttattgtttccgaatgagtgttgttgaggaatgttagcagtagtaaaatcttgtgttacaagatttttgcatttacatgaactttcactcatttttcagaatttgttcctagagacagagaacccaatacaaaagtgagaacatgtatgcataatcagaaggatgcagtgcagatgcctagtgaaactctgaaagcaaaaatggtacctgagaaagttccccgcagatgtgctactgttgctgcaaataaaataaagataatgagtaatctaaaagaaacgatctcaggaccagaaaatgtctggattaggaagagtagcagaaaactgccccatcgaaatgcttctgctgcggctaagaaaaaattactgaatgtttataaagaggatgatacaaccataaattctgaaagtgaaaaagagctagaagatattaatagaaaaatgctttttttaagggggttcagatcctggaaagaaaatgcacaatagtgactatgagaatgtagaagtggcatctgaaaacaattggtacacaagtaaactggcagttacattctgctcccagctctaaaattactcccttattggcatctttggaggaattttctaaaagccataatccagtgggttcctcccagtcagctcttgtacagacatgtgctctggggaattctgaggaggaaataaattgcagagtctgtaggtggagaggtggaaagaaaagacaaatggcctgctataagactactattcctttccagaatgcaaggccttgaagacatgattccttagaggaagaatataatgggaagtgtacaggstaggaagaacttgaagtgaacaaatttcaaaatcttaacctgatgctaattttcagggttctccattacagtgtaaaaattcagaccacgacaactatggtgtcatgaggaaaaaaaatcaggcatttttccaaaggaagtgctaatgggcctatttgacttctgagtgaagcaaaaactacccagatccattccctayaattcacatccccaaaggtcaaaaacaaactaggaggacctgggaatttcagctggagatactgattattgagttctgaagtagagtgttggaaataggcaattagagaaagtccattgatgtcattttgtttataatattgcagttcatactgaatgaccacttgatatgactaattcagggaatatatatttttctatgaaagctatgaatgttactatcacggcttttccttatttttacttgtatgtagcagcatttacagaaatgccaaaaatgtgcctcattaagaggcaggtcttaatcagttagataaaaataaaatgtatagcttaagatcaaaacagtcatatttttagatacagtgaaatcttttatgtttctctacagcaccttaaaaattagaacttgaatactttgagtaaacttactacaatctcatsccaacaaactttaatggtagcatgtttggcctatttcattgtggcctgtactaggattagaaaatttggtcgtggtataacaaagaagtgtatttacaataggatttaatttgttgttaatatgtatttgttgaaattaaaattgccagattaaatgaatatactgtcgcatctttttaacatagtaacgtgttactggaaaaattaagttgttgaaagtaagttgttttcccatttaaaaatatctgaatatatgatttgcatgtgtaaatctgaaaaactaaactacagaaacctagggttttctatttcttttttaagtcaaatgcatttttttttttttgttatacagatgaaccaagtgtctaaaatacttgagaaatttgtggttgcatgtctgttttaaaaaaaaggctttttgttttttagcataagccagaatattctaacctactaagtctgtgtcctttgctccytttgtagtatactttcatctaaattactgatccccaatatgttgatacacaggtgagaaagggaagaattcctaataaactgctattacttttaggtgcatggggtttgatttttgagctctaatgaaatgcttaaacttctttccagttcaaattttacacttaatttrtaatatttattgagtatattatgtcctcaacaagtaactataaaatgaaatacttaactcggtgaagactattttatgcaaagtttttttttttttttttttttttttttagcaatttcagkgtaatgaaaraatttaagctttgaatttataatttgctgkggkggggttaatttctgtcagtatttgarattgtattatcagtcttgcataatgaaatccttttttggctaagtatttaattcgaacatatttgcctttttaaaaagtgcttggcctaaacttattgtaactgcatgaaataagcatttgcttaaaacttaacattgtaaaattgttctctctgaaatgtgtgcaraatttaaatcatggccaaatgtattactattaccctatttacagtaatttgctttgcaraaaatatttcttcatcatggaactgtgaaatcaaattgaaratcttactggtaaaaatgacaaattaacaaaaggactaagacaagtggtgcccaaacaacctttttattctgcagttccatcatcataatagaccagttaacccaggagtcctaatgttttaaaacatcattgtggtgatcttgtttattctatctcactaaggatatccagtttcctaarctcttactggctagcaatttcgtcttaattttattgctaaatgttcaaattttgcttccaaactcactttatttttgcagatgtgtacatctgctaartactaattttatgtaaatgattttgttgattatctttccacatcttaaaatgtttctaacagctttgagattttatctcaacaggctctctctgaccccaaagtagtacttaccttcgtgactactgacaaagtcacaaaatgcaggcgatgtcatgtatttcggtacaactaaatctaggaaacggttttttcattgcattactgcatattttcattttcatttaaattatgtcccctttttctcttgcttgaaacagtgctcctcgaactttgtcttccagcacattttaaagagaaccaattaaagaacaatcacacattctgcttattaaaggctatttaaaaagaaacattttgtattagaaaatggccaactttaaaacactattttttacactcataaaaatgttttttaaatcgccttgacaatcatcagcttttgaaatgtgaattcctattgccagagtaaaggtctcgtttttataccaccacgaagcgctgtatttcttgctgcccttgcgtccgcccgtgcccgctgtctgagggcgcgcctggctacgggggccctcagtaccaccgcgccgccacctacctgggcagtcgaaatttggagcgggtgctcagtacactaatgctaccccagtctctcctaacgcagaaggaaaatggaaacggacgatgaggggacggccccacagctcccggacgccacggccagcggcgctggctccgcccctgcacccctggttccgctaccgccacgaacggaggccccgccctcctctcgccccctgcccctctagcccgcagtcctcccacctcctggcgcccgcagggctcaagctgcgaatgaaagcctttgggggccggacgcggtggctgaggcctgtaatccaagcactttgggaggtctaaggaggacgatcgctagagtcctggagttcgagaccagtctgggcaacatagcgagaccccctcccccaatctgtaatttaaaaacaaaaaagctgcggggactgctggcccagggcatgacagcgcgggcgggcggtgtagagggcgtggcygcgagctcagggtgtgcctgggagcgagycctgygcggggcgggacgtagcgcccgcgcggtgggggtgtggccgcgagcttgggctgtgcgcggagggcgtggcctgtgcggggcgggacttattgcccgcgcggtgagggagcgtggtctcgcgcaagccggcgtgcggtccsgcggcgctgcagttgtgtccagccggtcacggggcggctatggcggccacgttcttcggagaggtggtgaaggcgccgtgccgagctgggactgaggacgaagaggaggaggaggaggggcggagggagacgcccgaggacagggaggtgcgtcyscagctggcgcggaagaggtgaggcaccgggataasggcagcgcgctcaccgcagctggaaggtgcgcgggcctggcagccgcgacggcgcctaaggccggggctccgcggtcttccgagtggcccccgcrgttgccgccgctccttggctctgcttgggccctgggtctccgtgaagccgcggcgtccagcggcgccagccccaggtgtgtgtggttctcgcgtggatctgctggcgtttcgtggagtccagggtgaagccgctgtgggagggctgggttcaaatccgttctttaaaggctttctggagcgtttctggagcatttctggaggcttggtgtcttgcggactcgtgatcttcccgcttgtcacactgtcttgggccgcagcgctcccgcgggccccaccacgtttgtcgtggattgttcacggacacaccaattccctcgaaactttttaaacctgcacccaacacttcaattagcatgatgtgtcagtagccgatgaacacgctttaaaaaaattgtttccaaacacaaaaaagtgggagaaaatagtcaagtgagccctgacccctacacaaccgggtaaattcaacaggaagattttgccacgtttattttctctcccgccactcctaagcgaattccagtcatcatggcctttcacctctacatttttcagaatacatctcaaacgttttagggattttcttacatatgctattatcacccctaacaacactaatactaattttccagtatcattttgtagtccatgctcactcacgtttacctagttttttcaaacatgacattttacagtggtctgcgtgaatgakaatcctaacagggtccacaggttacatttagacgtgtcacttcatttagagcaacctcctcttacccctcctaagagacaggactgattgtcttgtccagtgcccccacactctgaatttgtctgatagcttcgttgtggtgtcacttaacgtttgtatcacctgcatgtccygtaaaatgaatgttcatttggaggcttggtcagattctcattcaaagttttgtcggcaagaatscttctactaagtggtgctttctgtttcttattgcaggctatccccagctgtctcacttttagggatgctaagattggttcttgggtcaggtggacagcctgatcactattttagagttctccgtaaacacgtatgcartagttttatctgttggttatcattgtccgagtccatcgttttctgaggatattagttatattctttataaaactaacgtgcattttatttattgtaaatcatacatatagtgcccttttgccatgatactgtttrtattgaagttgctttagtttcatcttgtttcttgtgttagggaagtgcggctccttcgaagacaaacaaaaacatctttggaagtttctttgctagaaaaatatccgtgctccaagtttataattgctataggaaataatgcagtaggtaagtgaaaatgcagaagacttagtcattttgttgaaagaatgaaatatacttattttcttccatcataaaagatttaaaatgtttagtactttaaaaagccacagtagagtgattgtatttctgagtaaaatctctctcctgttcctgttgcatcatttttttttgttttgtttttggtagagatggtttcttgctgtgttgccyaggctggtcttgcactcctgtcctcaagtgatcctcctgcctcagcttcccaaagagctgggattacaggtgtgagccacagcacctggtctgcactatctttttaataaactgaaaaaatcagatttaggctgggtgcagtggctcacatctgtaaccccagctctttgggaggccgaggcgggaggatcacttgaggccaggatttgagaccagcctgggcaacatagtgagaccgtatctctacaaaaaataaaaaaatgaagccaggcatggtggtgcttgcctgtagtcctggctactcaggagcctgagatgggaggattgcttgagcccaggattttgaggctgcagtgagccacgatcctcccactgatcgtgctccagcttgggtaacaaagcaagaccccaactcagagaaaagctttaaagaaaatgtttttagcttcaggaacttaaaactcaaggagctgtttctagtgtgttgaggtatccgggtttatgttaatgtttttgagttaatagactcctttgagaacacaaaactctaaagacagtaataattatcaacatgtttaagtacttaagttttaaggtccttgcatgtattaattctcttggtggattaaagtaaaaacagtgtagagtgcagctaggacaatgtacatttacaaatacacacatagacctttatatttttagggtgttcacaggttgtgatgagaacattcaggaaacccagttaagatcccttcctctgtaaggtwcccctagtggttgtagaacatagtaagtacatgatggcaagtaactatggactcatttatataaagttctgctggcctaaagtttttcagaagagtattaccccgtgagcatgtggtagaaagtctgtcaacaaacctgccttcttgatccctagctctaggattgtcttactcagggtgtgtggccttttacttcttgggggcctcagtttctttttctgtataatggtggtattaggtagacggtcttgaatggctctttcagctctcaaattctacagtaacttgagcttactttttattgaatagaaaatayagcttgcagagccaaacactaacttatgtgaattgttttttacagcatttctgtcatcatttgttatgaattcaggagtctgggaggaagttggttgtgcyaaactctggaatgaatggtgtagaacaacagacactacacatctgtcctccacagaggctttttgtgtgttttatcatctaaaatccaatccctcggtaggtgggacttgtatgtttgaaaagcagttatttaagtatcacttacatgttatttactggtagtatactttagtatggcaaatctttcagttgctctgtcagtgtgcactttttctgatactaatcaccagtagtggtttgrctgttaaattttaaagagaaataagtaggtcaatagtggagccaggaaaataagtattacctaagtgttgtcattcacatgttacatatatggtgatagtttgtggtgtgtataaaacttacytgacaaaaagcgtggaacttgacttttcaggtttttctctgtcagtgcagttgctatgttgcagaagatcaacagtatcagtggctggaaaaggtaagagagaaatgaaaacctgtgaatggttagtctacaggagttttcattttttaagggttcgatgtcttttaacttaaacttatgcagtcagatatttatttctttaaaatattgtgggaatttcttttggaatataaagaataaaagaacttgcttatttaacgtgaccaaccagttgtgttttatacttctgtgtcctcccgtcctcaatgctgaggtacagaagtataaaacacagttggtcctcagcattgaggayggtaggtcacagaagtataaaacacaattggattcctcccgcccatctttctttgtttacatcactttagatcttattaaaaggtaaaagggttcttagaaatctatcaaatccagactcttctacttatagaagaggacatttagaaccacagtgattgaagcttacctataagtgtagtaatt

SEQ ID NO: 9912 - DNA, 56324 bp, Homo sapiens
tggatcacttgaggtcaggagttcgagaccagcctagccaacatggtgaaaccccatctctactaaaaatacaaaatattagccaggcgtgatggcacacatctgtgattccagctactcaggaggctaaggcaaaagaatcgcctgagctcgggaggcagaggttgcagtgagccgagatcatgccactgaactccaatctggctgacagwgtgagactctgtctcaaaaaaaagaaacaacaaaaaaaaggtagtataattattaaagtcccatataactttgagaaaggacatttgtccagtttatcatcaaagaaagggaaggttttagaggtcagagtttggggcmaaaaacatgtttaaaatgaaagcaaactccatgcactttggctatcgaagaatagggcttgaggagaagaacttaaaaagtaaagatcaatattcccccacccagcattaataattttgacatatcatagtgagggactttttgtaaatctattctttcatatattttacatgaaaagctccatttgttgtcatggctttcttaaatatgaataaaaaagagatgggaaatttgcttattgtgcagtatcaatagcctatcttcactaaggtatatttaggaggacatacaataataagaatagttgcattgtatggcagtgtgaaatagactagtaatatatgaatgacattctcattgtaaaagaaataagctgcttgaatgtgtacggaataaaccaggaactaacttgcctaaatagccttctaaacggttgagattctttttagtccatttctatgtatttcatatacacacaatgcatatgtactgtctctagtgtaagctctctctagcataaatcgtgtcaccccataatcagtgttctgtaactcatgttttcatgttgaatcgtgtacctaaaaagtcacatttcttaatccttcctttatgttttctggagattgcatcttattttagtagctcttcctcatgcccatttgacaatttcatttgattttaaaactgagggcctgtgttcatccatgaacactttagaaaagcaatcatttagaaaatggttgattgcctgctggcctggagatgrgctaaagagagtgactggcttggtcagaggtctgagccatcacctgtttggcctcccataggtgttcctttgagcttcaactctctttggcccctcccacttcctgccccaaagttgtcttcactgctggttctcactctttctgcttcccaggggacaacagtggtgcccaggtaagaggaaggggcccagggtggggtgtagggagcactaagaatatttgtctttttagtatgtgacagggtcagggactgggcagtgcctaaatgtgaaggtacaggcaattgaaatgagaaataactgttaatttttttactaattcagttcagtggagtcaaaagaaaactggttttggtgctttggaaaattgttcaagcatcaattaatagtcaaaactggtcaattatctaaatctaccttatcttccaaatcacaggatatagaacaaaaaaaaattgcctaaaaggtgtggttaattttttttaatagaccttatttttagagctcacartaaaattgagtaggaggtatgcagttaatttttgaacattcagggcctaattctctagttggtgtattagccaaattcattttcttctttttgctttctattgtattttccccctcactgatttttggccctttctgtagcacctgaagatggacaggggagagaaaagaagtgggattcctttgaaaaacattttttttaatttaatttttagtttaaaattttttttgagacaaagtctcgctctgttgcccaggctggagtgcagtggtgaaatctcagctcactgcaacctccgccccccaggttcaagcaattctcctgcctcagcctcccaagtagctgggattacaggtgtgtgccaccacgcccaactaattttttgtatttttagtagagatgaggttttgccatgttggtcaggctggtctcaaactcctgacctcaagttatccacctgcctcggcctcccaaactgctgggattataggtgtgaaccaccatgcccggccatttttttttgtgagaccaggtttcactcttgttgcccaggccggagtgcaatggtgcaatcctggctcactgcaacctctgcctcctgggttcaagtgattctcctgcctcagcctcccaagtatttgggattagaggtatgcacaccatgcctggctaattttttgtatttagtagagacagggtttcactatgttggtcaggctggtctcgaactcatgacttcaggtgatccacccacctcagcctcccaaagtgctgagattacaggcctgagccaccatgcccagcccatttttttgctttttgtttttgtttttttcaattacaatggagtcacatcttacaggaggggttaggctcttaaggaagaccatgaggtcaaagtgcagtgaaaattactcttgaaaattttttaatgagccataagacctgggatacaccaagtttttgtcgttttttgtttgtttggggctatttcttttcttccagcattgaaacagacataagtttcttcaagtgagcactggttgaaataattgattggcacttaggggcaggaagataagcacctttaaccactagactcatattctgtgtggggagatcaggaccagttacataatttgccaggtccagtgcaaaatgaaaatgcaaggccccctttcaaaaagcacagtattaagaatctcaacacaacagcagcaatgtattaaaccaagcacagggctcttccaagggtggggccttgtgcaactgcccagactgcacgaacatgaagccagccgtgggaaagaagcttggaacataatgagaagctcagaaactcagataaacacagkaagagaagcctcacaactcccatagagagaaataggggacaagatcactggaagtatttaaattattctcttgtgttcctcatattctgtcctagatgagtcccgtatagctaaatttgcattacattaaatcagtacaatatgcaactccactagaaaagttataaggctgagaggttgcaaatccaactgtaattacatttttagatttttgtcaatgatttattataatttaaaactcagatttcagatgtgtaaaaagaaaaygagtatttctatttcttcatcgaacaaaaattttgatctgcccttagtcttttgccaagagtgatagaccacatttagtctaccgtgtaatttacagggagaaaaaaaaactgtattactgtgagttctctaagtggttcaaaaaggtaagttagaaaaactaggtgtaataatatgtcttcttcaaataaaatgctaattattttacttctaaagaggttgccttttcagattttgttgttttttttttttcctcagaaagccataaacataacctgagcagggaagattttgtgttatgactgtctgagccctctgagcaacaatgtgatacaaggctcatttttgagggaactgccttatattttacagcactccattttttcaaagtgttgtttttgttttgttttgttttgagatggagtctcgctctgtcgcccaggccggagtaaagtggcgtgatctcggctcactgcaacctccacctcccaggttcaagcgattctcctgcctcagcttccagagtagctgggattacaggtgcgtgccaccacgcccagctaatttttttgtatttttagtagagacggggtttcaccgtgttagccaggatggtctcgatctcctgaccttgtgatccacctgcctcggcctcccaaagtgcttggattacaggcatgagccaccgtgcctggcccaaagtgcttttatacacaagtcaggccaagggcagttggtcaggtaattcacagaagggttttcagatagcaagttatttaacattaaagtaacagaagatagtatttccagcatcttttcttatctcagcttggttctctgatgttacagttgaacttgctttgacaaaagctgctttcctggtggctttgagagctacatatctgaactttaaaagaagtgtcatgcctaggatcaggcagctggtcactccagtataaaggacaactaccctgactcatggtcacctgctccaacttatgtcatagctcaaaacaatacttaaatccttacaaagctaacaaaggaagtaatgttgccatgygtcattgtcacagaattaccagaagtttgggggatttgggtgttcatctttctattgtggagtttttagggtggtgatggcagttgtgtggtggttgtcatttggcaggaattgaaattggaggcttctgtcattctsattacttatccaacgaatgacacaaataagagcatgtttgtagggaagaactcaggtggggayagcaccttctattyaatctcttaacctgtattattaggttgtatattttaggagaagagaggaaagtggcaaaaggaggcacagatacaaatttatacagatcaccagctaagtttggccacagtggtttgccaaagaatttcaataactaatacttagagtgcttactgtgcaccctgctaagcacttcacatgctttatttcactttatcctcaaaataacccaaggaaatagctatcattgttatccccagagaccaagatctcatggatagtgaatgtcagagccaggactggaaccatagaggagtctgtgttgtaaccactgaacaactgactttctaccctgctttaaaatgttgcctgttgtttgttgttgttgtttttgaacrgtggtggccaatctgcctccacaatccagacataatttcggcactaaacagaaatactttagtctatacaaacttcatgtaagtagttcctgcatgaaactatttcccaagtaatacagcaccgatttacacctggcagaaggcatagttttgatgtgaacagttgggggaagcttgtttctctacaccctcaagcacgcccacagcaggagctgagcagcaggccagacggcacagagccctcctgggactggttatttacattaaccaaggtggaaacttctcccggagataggtgctgccaagaaccctagaggaagtaagacgctttatcttttgcacgcacgccaagtcttcagagggcctggatgggtgtgactccaaggagctaatcgtcccgtgcaggtgcaaatctagacccgtgtttatgtggaggtgtagacgcaactggagatgacccggttagtggctgacgtgcgtgggaaagcccaccagcagcgttgttggttgggttgtctctgtaagtgtggacagtgtgttggtgggcacccagttccgattgccccgtctagacaggggtgtgcgggcactcaatgttccacgcgcggccgggagctcgcagtgtggtccacgccagtgcgcctggaagcccaggggatctgtccggcactccactggaggcttggcccgcggcttcgcccacctccccagagccccgctcagcccccgctccccccgctcagcccccgctcagcccccgctcagcccccgctcagcccccgctcagcccccgctcagcccccgctcagcccccgctcagcccccgctcccccactcggccccgcccccagtgccctggcaggccccgcccccaacgccgggcgctcccgtcggctcggcggcctcagttccgtaaacacttctcaccccgcccccggcagcccggaccgcaccactcgccgcgcgggggaaccgtgccctctcgcatccgaaacaccctcccatccgagctgttctcggcctctctggttcaaactgacgaagactgtttctctaataggttcagtctgtgagcgctcggctttcrgagactgaagggccctggatccccttgccccgtcgcgccgtcgtccccccgctatccggttttgtgatggccgcgccgtggctgcctccctagagtccctcagsgccctttaaataccgcgttgggggggacrctggggctgggggggtttgttgggctggtgagttttcgaggtgactgtgctgtgctcggtgaggggacgcccagagagccctgacccggggtcactccgtcgccgttctcctcttgtctacgtgctggacccggtgcgtatccatcacgggggaggcgttgccggctcggaggtgaccggccaggtccaacggaggggacaccgctgcagcccgaaggctcccctgccctatctcggaactccatcctgggaaggcggggtcaggggccatcaagctcggctcctagttcatgtcttcccactccgcgtccccttgtttgacctcgaactgccgtcccgcgtgggagcggggagcggggcaccgagtggccgccccgcgtgtcggggtggacacggacttcgggcctcggaggccgcttcgccgctgtttaaatcctgctggacaggtaccagcggcatcccgccatcaggggcccagggcacccccttcccccacactcctcggccgggctggagtagggaactgagccagggtagaggcagggcgggcccggcagcgtgtgtttgggatttgttgccgtggtttccccggcactcagctctgcctccgccgtcccctcccccaagggtttgttttgacaggaaacctggtgctgctggaggggaggggcggccagaggacgtgggtgaggtcgtgcagactgctgctgcgtccccttgccgggacctttggttaaggggaagaggtggagaaaagccgattgggcctgggctcgaacgctgaaccctcaggtgttgcttgtgcttcccaaagctgctactgtaggtggcaccactgggggtaatagcaatgatttgaggtggcatatggatgaacatagttacttgttttcgttactattaagaaaatctgttccattaagtaagcagtttcacaatgatagagtttccttttaaaataaatatatttaaatgcaaaaatctagtcaagatagagacgcggttactaaattatagtaaaggtaaggagggagacgtagaaatagtcatgaagagtggcactcaaacgacttaagtttgggaaatcttagatggttgtcctgctaccttaactgtgaagaaactggacaagttgtccttgtccccagtgggtgtctcagcacccatggtcaccagcccagtcagggactttgctcttcttacctgccaacggataatgagttaatctcagtggttcccacttgaggaggctccctgccgtggtccttttcctctcttctctagggatttcatgcatcaccctgacagccagtggaagttgcctgatttgaagaggcccagggccgaagatacccagtcatgtgtggaagcagcttcaatgccattttgtgagaggttgagggccccagagggggaagcacaggtattaaaacaaaacagaccagcaagtgtgggaggagtgctttcaaatgtgaaaagtgccaggaatccttctccctgatgctgtaatgccacgtgtaacgtgaacatctgctttgtggacagtgactggcttgttggcttttatctagctctttgttggttctaacttgatgaagaccagtattgtctagatgaatggtatgggcccctatccctctgctctatggtttttgctttgctgtggatgaataactttagtgctgctatttaagactgattctaaagcagcattttgcagaagatggaaatttttcacatcatctgcmatttttttctttagagcccagacttagtcctctgactcccttccctttactacacatatgtgaaggcttgtccttgcagctgacctcgatctagtgttgaaggatggtacacactagaagtttcttgaaatttcttttttgcgtgagctaaccttaactggatgggttcaattcctcaaggccctgctgggtaatctgaatatttcactccaaaatgtttatgactgtaagcagttaacctttttgctaatacgtggggtctaactagggattttgcggtgcataaagaatggctccctcctagaggattttctgtcactgtagcggggtggtgaagaattgttttgggtgacgtactccttcagtgatgcccttcacagaatagcacttgagcagccataccaggataagatcagcttgctaccacatgtgcaagtgtccacagggtgatgggtagatggatttggcagagtgggagtggaaagaatgagcagcacaccaaattttctccagccaaactggagtggtagagagcatgggttttagggatccgcttcctggatttgagttgtgcctctacactgctgtgaacccttgggcaagtaacgcaacctctctgggcctcaggatcttattataaaatggggataatactgatacattagctaacaaggttataataaggattcaaggagataaaatatataaagaacttatcatagaacagttattgagtgcttattactacctcaataataagcactcaattactgttagctgtaattgttgttatttgctacacgtgagtttctttaacctcctggaactgtgggtctttgctagtttgaatttttggtgccttgcaaatgcactgaagtaggcactgggaattggagaggagagtcatcgcttccaccagcagcttaaaatctagtgggagacagatatgcacacaagtgtagtactgtaagtgactgcgtaatgggaatatgagtaatgtgagtgaggcagaaaagaaggaaaactcaaggtgtcttatgaataggagtgtggcgtaattagttcatgcagctgtactcactgagctcctgctstagccctagcggtgttctaagctctagctggctcattagatgcagtgagtgtagcaatcagggaaggttacctcgtagttggtgacattaaatttcaaatctgaatgacaatagggagccaaccacaaggagatcagggagaggaacatttcaggggcagagaacagcaggtatgagtgccccgaaataggaagtttggcatgtctgaggaacgcaaagaagatcatgaagggttagtgggagaacactgcagaataaggtgggcagagttaagatcacagagggttgtaaaccatggcccagtgacttaggaaaagggaacccacctagggatgaactcttaaaaaggattatctattttgccttttctggagggctctggcctatttcctgttttattctttaggcactgttcaagaaggacatcaggacaagtttgactgtctaraagagttcttgtaatagagtggtatttaagctatcacagcagtgggcacaatcagaatttcaaaactgcaagaggttggactgttctgaatttgaatcttgaagtttcagttcagcctgtcatcttctcttttaaccttctatttggaaatactttcaaacttacagataaagtcgtgagaatagtataaggaataccatgttgtctacctttttstcagattcacctattaacattttgctctatgtgctttattattttttctctcttgcatttgaatcatttgagaaaaagttgtatatgtcatggccctttattcctaaatacaaaaccacagtacatttcaacttcagtatatttaacattggataacagacagtagattcaaatattgttaacagtgctattgattgactgatactgtcctttacagcatttttgcttcagtataggatccactctaggatcacctattgcactcagttatcaagtgtttttttttcatttggaacatattctcaacctttctttgttttttatgacattacattttcggaacttgtaacttcttttaataagaataaaataatagttgacatccgtcaggcacttactaggagcttaagtacttgacagatactatttcagttaatcttcacaacacttctacaaggtggatactattattgtcccattttacaaatggcragttctctgtttctagtcagtaaataatcaagaggagccgggatcaagaacccagtccacctagctccagaggcaatgttcttatggcttcagtgacatgtattatcatcagtgtatctttgcarttctgaaccagtgcagaactatttgcagatagagttgctgcagaaaggaaatcaggaagtaaagctgcacacgagctgaggaatcacaagcaaattaaaaaccaatctcctctctatctgtagtgaaatacagcactagccccttcaagtccttgtacccattcacacctcttaaatgtcagtagtcttactaccattcatttattcaacaataaatatttgaataaatatttgaatgcttgctgcattccagtgatggtctcagaagaaatgacattatatttattatcacaaagtgatggaataatacaatcaaaaatgtgaatatgacagtacttttctttgaatagtgacctgctatcgtgttggaggctttgcttggagtcatcttcagtcttttctgttgactttacctttgaccagtgattaaatcctccaggtatgatgagatgtgatgtttctgaaaagttgtttgatttacttgtgagttgcagtggcaaaggttaggtagatctaagtttgcataaggagtattacctttcttaaagatacagcctggtttcattatcatcagtctaaaggataatccaaaatagtttttaaagcaatctaaatatcctcagtgccttttgaatcaagtaggtttgtccccaggtgacttacttggaaactcaagaccgagaaaggtaagagcaggtatgaaggaacttgcrgaagaccattcacacagtgatgggccattcgcttttggtttttgtctgtcaaacaagtgccaagagttctgttctatgttaactaccagccttgtttgtctgttgaagaatrtggtgttatcctgacataaaactgttcttccctccagagtgtttaattcctgaggcaatgatattaacaaaaaaaagcaaataatagaaaacatttgtatactgtttactgtgtcaatgactgttccaaacacgctgcatgtattgggtacctgaaatctcacaccaaccctatgaattaggtattcttagtaagcctatatgaggaaacagacaaatttttaatagagtaataatgggcattttggcttcaaatacaggtttctgtttggatacactaaggcccagttgtaatgtggaggcttctacccactaaacaagagtttctaaacattttgaagcttttaaattttccattgcagcccctgtgccaggaactctacctccagtgaattgctggaagaaagtgtagtttcacattgttaagcatgactgccataagcacatttaatttctcagaacttctagtgatgcctcatggaactctgggtttggagcatcatatattccttgctgagagaaaccttatgactggcccaacctctcagaaaaatgtgcataaagtcacacggcacattaatgatgaacccaggccacaaaccctggactcctgactcccaattattttartctttgcacttttctgccttgttaaacacagttaagaaacctaccaagtgtgctatccagctaaagtagaaaaatgaaatggacagttaaaactattaagctagttcataaatyctcatggctggaagctcttattcamtttcacttggaaaaacagccagagctcatttgagggcaaccgwagtagagaaraattaagagcagagcatgcatagcacagcggttacattacaggggaataactgggggaaaaatgacttaaagtggaaacaaactttaagatattcaaataagagcatgacaaggacctgagaatcttgaggtttaaatctaataagataggcttaagcagtagattctctgctctaaggcttgggctttggcagtaccagsctggttaacgtgtcatgatatcaggttgcaaatgttctggttgaagctgtaccaaatgagattcagggattctgatttagctgacactgaatgaatacttgtcatatacttggcgctggtcatggacaagacacaaactctgctttattaaggagattcagaagtagccatgggaagaaaggaacaaggaactaatgtacaaggaactaagcgctgtcatggagatacaggagacgcgctgcagacataccaagaggagtgctattcactttggctagaagcaaggcttcctggagaaggtagcatttgcaagaaatgccatcagtgggacatcaaatgttggcaaagagaggaagcaaactagaggggagggtgaacattccatttaggatttggggtttggtggcagtgaaaggtttgaagtagccccttttcttctgtcttctctcgccttcccctgagcagattggagtttaagctcaggtagaatttagtcttcatgagttagaggaggctgtttcaccactgaggatgcaagggctcaagaatcttatagccagtgttcatggctttgggattctgggataaggtgagtgtctccactccactccttgcccttcagcctgcacaagtggactctagtggttttctgcttgcaaaagtggtgggctcagcaaggatacatttytgtggcaggattgaagacggttgtttaggtgaggcaaggcgcaaatgaccttagacctttcacccttattagatccctctcagactcatccttgtccccatcaccatccaaggaattaaaaaaattactctttttctctcaacaaaggctagtgccccttctcccgctctgctaatcctgagcctgcctctcctttcttgtgttttctcaacaatgccttattcccccttttcccatctagtagcattcagtacacagttttaggtagctggacttgagaaccacaagaatagggcattgtctttgtttggttactttccccggtgctcagtgctcaagtaggcacttgttgaatattaatggaatcattgaagaaactgcaggcattttcagacatactatacatagttgtggtttcccattctggccgctttaaaagcactgcatccctcattgcatgggctggtttagstttaaaaggattcagtgaactcttcctctcattattgtccatccaggatttgaggtgcctttctccttgagcccgggtttccccttcagtgtcaggtgataccatattcacatcaaggtcagctccctcacgggcctggctggtgctcctgggaccaaggcctggtcatcctgtgtgcctgtgatctgctttctgggtagtgtccaaacctgacggcccttccctggaaggattctcatgtcccagaaacactggacatagacaccaagggactggttttatcatgtagtaaatccccttatccctctgagtctgttcccccacttgtgagtcaggatcctacatgcttgtgcactcatagggttgtgatgggtactttgtaaattgtcaaatcctaaccatatatcaggtcttaatcttcatatcacagcagttcatgtggaaatggagggggaagaagctaaagacttgccagccagaggtttcatgcggtcttcccctttccccaggaggttcacagaaagcgtaaagaggctgatttcacagctattttatctgaaacaaagcaataggagcaataatagcagctaacatttgagtactgtgccaagctctttaagatgaattctattcaatcttctggcaacccaatgagaggttagtctttcagtccagtttcactatgaggtaggtagttaagtgaccttcccaaggtctcatggcaaaaggcagaacagaacgagagatctgacccaagtcccacactcccgccttctcatgtttcagcaacccaggaggagagagcatgtgtcctgcatctttttaaaaaggacctgccattacttagagcttcacatttatagtgggtgtgtcctgagtaagctcacacctatggctgtggaatcccttttcagaaaggcaatctcgatgacctagtgatctggcctagtccggccaaggtgctgggggaaggatgaggtcatctgggggcctttccaacacagtgacacttgtggggacagttgtctacactggaagaagcattggtggtgcctgtggaagtaccacagaacattgaygcagggtctgtttgtctgtgcaggtgctacctttttacccacacttaagtgacgcaaaatgcccttcaatggcgagaagcagtgtgtgggagaggaccagccaagcgattctgattcttyccggttttccgaaagcatggcttcgctcagtgactatgaatgctccaggcagagctttrcaagtgactcctccagcaaatccagctctcctgcttgtgagccgatgggggagcaggggttgtgggtggcaggggtacttctagatatgtgttggatttgaaaactcagaaacgcctgagagcaacagacttcccctcctttctagatgcaccagaatagcactgcagaggcactgcagctttccgggacacattctcagaaatagccactaaagtttacaacctgctgatttttattttgatcactgcttccgatctgtttcggtctgatgataagtcaggacttcaaccccatctgtcttttctcccaaacagcagaaagccattccttgagattacttcttagatctccactgaaggataaattcaaattggtcttttctgattattcctgatttacattgaaggaaactggccttcattgaaaggtcaggaaggaagtgaaataatctaaagggtttcatgttgatttcaaaaaaatattgtgcaaatcaccccaggaaggtacccacaaggagaattactacattaggggtgtgagaaagagttaaaagagaggccacagcaaaaggagatatctttttcccgtttttgcatgtagaaactagagatgggtaaagcagatgtgtttgcctttttttttttaattggcactttatttastaaatataacagctttaactggcaaagcaaatgcaggaaaaagcaactaatgtttaatatgctgaactgtccacttcttacaaattgcttcatttgtattttaaatttttacattctcattttttaaaacttagaagatacataagaatagagaaaagaaaacattgcctatgatatcactcaaagacgacagctggcagtgctttgccgtatctttatccttcacatagacatatgtgtgtatatgtgtgtggactcttcttgcttagtattataactaaaacatttactcatgattacatgtttttgaaacattggttttatgaatacttattactttaccaagtgaatgtacggtaaaattaaccattgattaatcactggacatttagtttccatttttttttttttttttttgctgttataaatagtgctttatgaacatcttactgcatgaagcctttctggraagacttttggatatcactggattattggaccaaagtatatagacatttttaaggagaatcttgagtcagacctggcaaaagaaattaacagcagccaccccaggtttctgtgccttttctcactctttatactgtatgtggtgttgttgcatctgacaccagggtacctaggcatcctgaagaagggttttaccaattctgtgtatcacctttctcttcttcctcctctttccctgatcctcctcctcatcttctcctaaaaattaggtagccaggcgcagtggctcacacctgtaatcccagcactttgagaggctgaggcaggcaaatcacctgaggtcaggagttcaagaccacctggccaacatggtgaaaccccatctctactaaaaatacaaaaattagctgagcatggtggcatgcacctgtagtcccagctacttgggaggctgaggcaggagaatcgcttgaacctgggaggtggaggttgtagtgagtcaagattgcaccactgcactccagcctgggagacagagcaagactctgtcttgggaaaaaaaaataaattaggtagtaaagtattacctgtcactgctgttgtttgacacatgattttaattaaaagaagctaagatttccaacagtgatttttaaaagacatgatttattagaatagtttcttagtataatctttagaaataactcagattcttcatttactatttcctactgagaagtaaaatatctggcttctcagatttattctattttacttttaattatgtaaatttattgagttcttactatcttcttctttacttaaattatctcattcggtcacctcaggccaaccctgtgaggaggaaggctatgcctcagtgaaatccaatgataaataccaattggcaaaactcagagtgaacctaagtgtttatactatactgcctatacatttaaaaattacagtttttggctgggtgcrgtggcttacacctgtaatcccagcactttggccaaggcaggcagatcatctgaggtcaggagttcgagaccagcctggccaacatggcgaaacaccgtctctaataaaaatacaaaaattagcctggtatggtgacatgtgcctgtaatccagctactcgagaggctgaggcaggagaatctcttgaccccaggaggtggaggttgcagtgagctgagattgcaccactgcactccagcctgrcaacagagtgagactccatctcaaaaaaataaataaataaataaataaataaataaataaataaatattacrgttttaaaaatcagttatttcatattgagtttacttaatgagacttctgaattacagaataaaaataattttatcaatttcctatataatacatataataagtgcagatttcaatgggcactaaaaatgaggtaatttaattttttttttttttttttttgagacgagtctcaccctgtcgtccaggctggagtgcagtggcacgatcttggctcactgcaagctcctcctcctgggttcacgccattctcctgcctcagccttccgagtagctgggactacaggtgcccgccaccatgcccggctaatttttttgtatttttagtagagacggggtttcaccgtgttaaccaggatggtcttgatctcctgacctcatgatctacctgcctcggcctcccaaagtgttgggattacaggcgtgagccactgcgcctggcctggtaatttaatttttaaaagtaacttataatgggcctatattaataagttggtctcataaatatttgagacaatgttatcaaatatggtaactgaagctattgaaggagttcttaaatttttgaagcctttattaactgagggaattcacctattttaatatatagtctcctgacctataaaactctgaagtatatacattctgataaattaaaccttatctgcatcaggaggcttcgttggatgacaacttttcttctgcaacattaactggcttttgtttttctttcagcaacaagccctccaagggttgtaacatttgatgaagtgatggctacagcaaggaacttatcaaacttgactcttgctcatgagattkctgtaaatgagaactttcaattgaaacaagaggctctcccagaaaagaggtaacckgggggcatttgttgtatataaactgctgaagattctgtgtgtgtgtgtgtgtgtgtgtgtgtgtgtgtgtgtgtgtgwgagagagagagagagagacagagagagagatagacacatatttacactgattcctggaagttcttgtataatatcctcaggggtaaacatttagttctctaacaaggtcttatacttgttttaaaaaaattctcgctgggtgtgatagctcacacctgtaaccccatcactttgggaggtggaggcgggaggattccttgaagccaggagtttgagactggcctgggcagcaaagcaagaccccatctctgtaaaaaataaaaataaaaatattatccagcatggtggcatgakcctgtaattacaggtaccggggaggctgagtcaagaagatcatttgagcccaggagttcagggactgcagtgagctctcatcatgccactacactccagcctgggtgacagagcaagaccctktctcaaaaaaaaaaaaaaaaaaattcctgtttgtgaccagcccggccaacgtggtgaaacctcacctctactaaaaacacaaaaattagccggccatggtggtrgggcgcgtgtaatcccagctacttgggaggctgaggcaggagaattgcgtgaacccaggaggtggaggtttcagtgagccgagatcgcaccactgcactacagcctgcgcaacagagtactccgtctcaaaaaacaaaaacaaaaacaaacaaamaaaaaaattcccctaggatacatattacccataatctttagaactcagtttatatgtcacttcctgagggaagctttttctgacattggtgaaccccctagactacaattaatccctttgctacagacacctgtagcccttgctgcctcctttttgttaagaggtcttataattttatgtttgatgtccatcttccccacttgattgaaatgcactatttatggaggagctatgtctgtattgtttgttgctgtatccctattgtctagcatagtgcctgacatacagtacaggctcaagacatatttgcacattgatttatggaaaactgatactcaggttctgaagaataaataaatgcacctgaactgtcaaagtgctaaaagcaggcaatccagaaatgtctggaggtaggaatcacagctgcaagaggcacttcctggttaacctcgccctccgacctctagttggagccacccctttggatcctacttcagcctttctggagtcagtggctcacaggtttcctgagacaaagagaagaggcttgagactattattacagatcagtcgtctttagaagcaaagttggttcgtggattgaattttcaaccttacagtaccaattataaatcctgaggcattctatcagttaagacaacttagaatatttgatcccattcagaactttttcatttgttttaaagcaggaaaagtaaaggaagtcaatgtaataactyttcttctttaaaatgtggatcatagtcctcttggggatgttgttcatttaatattaacattttttaagcttgccatgtatcgtgggtgtatctgtttggtttcctttggtaactgcattttgccatgacccttgataccagctctactgctacagccctaggctaggccaccgtcatctgtggcctggaccctttcagtcctaactggttgccgtgtctcctttcttagcccccaacagttcatcttccatatccmgtagccttaatgatgtttttaaagaatgagctatattagatgatttctttgccaaaaactcttcaatggttttcacttactcagagaccaaaaatctaagcattttcctatggcctggatggccccactcccctgaccccrtctcagtgctgtccctcctgcttgctgtgcttcagccacactggcttccttccttacctcagggttcaccaatctggatcttgtctcataaactttgttcctctgacttcttctttttgaatgttcttttcccagaccttcacatggctctttgctctccccttctgagtctgaacacaaaggtcactgacttaaagaggctttttcccaccatccagtgaaatcagcaccctctctgtaactgtgtaccacattgtcttattctttctcataggtctgaaattgtcgtattcatttttaatgtattttttgcctttttgtccctgctaacatataagctttttgaggtcagagactttcttttcactgtagtattcccagttcctaaaacagggccctacacatattggatgtttaataaacatttattgactaatacaaatgaattttttgagatggagtcttgttttaaagttaaaatttgtattttttatgaggtaaagcaaaagacagggcatatctgtactttaaattcaaaagtggcgagtacaggccatagtgaaggcattttaggctcagacagactgtggggtttgaatcctggctttgctgagaccatacctgaacctcacacttcccaagaataagaagggggctacactactcacttcaaatgcatactcactagcataaaagtgccttgcacataaatactttgatactatggaaaatattaatctctcttcccttcagtttctgccatggctagaaaatgtgagcaagggaaacaaagtacagagttaggacacattgcctttgtttaaagataaagtcttagccgggcgcagtggctcacacctgtaatcccagcactttgggaggctgaggygagcagatcacctgaggtcaggagtttaagaccagcctgcccgacrtggtgaaaccctgtctctactaaaagtacaaaaattagctgggtgtggcrgtgcaygcctgtaatcccagctacttgggaggctgaggcatgagaatcacttgaacctgggaggcggaggccgcagtaagctgagactgcgccactgcactgcagcctgggcgacagagtgagactctgtctcagaaaaaaagagatatacttatcaaattatgaattcattcaccatgcatgcatttgttaagcagtcactatatatcaggcactgtactaggcacaatggtaagtacctacctggaggacttatggcctctgcttaggaaaggtatatagctctgtggggaaagagcctcgtcagtaattacagtggagggacatgtggttttctaaaaactattgctaaatggtagagaagttaggtaggaatgtgtattttaacgtgcacctattttaagggattgacataaggggtgaagcaaggtggccaattattctattgtgagctcttcctaggaaggcttctatttcaccagtttggtctggctaactttaaatgggacacctaagtctgaagttggcaggcattcaaatgcatgtgcccttggggccaatctgttctattccatgccatgaaatttcagctggtgaggaagagcaactttgccatctcatcccaaaaatgtagaacaagtctaaagatctatatagaagggtagctacataaattatgaaatctctttaggacagaatttcatgaagttattgaaagcattttcaaggtctaggggaaacaagacagaatgttaaatgaaaagtatatattttgtatatatgctcttagctatgttaaaataatgcattcaacaagaaaaatattaaaagattaatggattaaggacaattattctgtgttttttttacattttataagatttctacaatgaggatgtttcttttataatcaggaaaaagttatgcttattttaaaaaacaattcattttattgccatagtttggctggtcgagtgaagcacattgttcaccaggccttctgggacgtcttggattcagaactaaatgctgaccctcctgagtttgaacatgccatcaaactgtttgaagaaatcagagaggcaagttgctttgttgtctgtgtcagttagcgtcttactccaggtgggctgctataacagactggcatagcctgggtggcttataaacaatagaaatttacttctcacagtactggaggctgggaagtccaaaatcaaagcaccaccagattcggcatctggtgagggctcactccctgattcatagatggtgccttcttgctgtgtcttcacgtggcagaaaaggcagagaagctcttyagggtctttttgttgttttgttttgagacggagtctcgctctgttgcctaggctggagtgcggtggcacaatctcggctcactgcaacctctgcctcccgggttcaagtaattctcctgcctcagcctcccaagtatctgggactacaggctcatgccaccatgcctggctaattttttgtattttattttattttwttttwttwtttttattttttttgagacggagtctcactctgtcgcccaggccggactgcggactgcagtggcgcaatctcggctcactgcaagctccgcttcccgggttcacgccattctcctgcctcagcctcccgagtagctgggactacaggcgcccgccaccgcgcccagctaattttttgtatttttagtagagacggggtttcacchtgttagccaggatggtctcgatctcctgacctcatgattcgcccaccttggcctcccagagtgctgggattacaggcgtgagccaccgcgcccagcctagggtctcttttataacagtacagttccattcatgtggacctcacccttatgacttaatcacctcccaaaggccccaccttctaataccattccattggggattgggtttcaacatatgaatttggggacagaggaaaacacaaatattgaaactatagcagttttttccccccaaagattgttttatgttctttagtattggccactctttttcaaaaaaggatcaagttcactggcagagtttccccctgcacctcctggagtagygtgaaggctggaaaaatagtgccatggacacagcttagggtgatgctaaagcgcrgagactctggtttagtgacgggttctctctttaagtctctctttcctgagtacttacagggtagtcataagaactaaatgaggtgacagttgtaatgttagctaacatttacaagggcttgmtctattccaagcactagattgttcatttcttcttatcagaacactgtacagtagttgctcctgttattcttatttattaaaaatccaagttttctgactcatccagggtcacacaactttgtggggtagagagggacttgaactgagccatactggctcagagcgcaagctcttaagcatgtactgtatggataagcacagtgtcctctgtaactgaataatcaataaataggctgcttgtatataataaatattctatatgtaaaatatacttaatcgaccccatgggatattttcatctatccttttttaaagagttcttttggagccatgatctgcaccttgttctttcttccctgaacttttacctgtagacgttttgaaatgcagcagatcctcgcatcatattgatttgttcaacactttttctttataatgttgatgagaaaaaagatagattccagctgggcgcggcggctcatgcctgtaatcccagaactttgggaggcccaggtgggcggatcacaaggtcgggggatagagaccatcctggccaacatggtgaccccatctgtaactaaaaatacaaaaattagctggatgtggtggtgcacccctgtaatcccagctactcaggaggctggggcaggagaatckcttgaacctgggaggcggagattgcagtgagccaagatcacaccactgcactccggcctggtgacagagcgagactccatctcaaaaaaaaaagaaaagaaaagaaagaaaaaagatagattcctagctggggctgccatctgtgtggagtttgtatgatctcctcatgtctgcatagcttttctttgggtactctggtttcctcccacatcccaaagatgtgcatgttaagttcattgacaagtctaaatggtctcagtctgagtgagtgtgggtatgtgagtgagtgcatcctgcagtggaatggcatcctgtccagggctggttcctgccttgtgccctgagctgccatggtaggctcctgccacttgcaaccctgaactagagtaagcaagctggaaaacgaatgaatacaaattattgtaacataaaaattcataaagtcttcgatagtcatacagatgcacamcaataaacaatgtgccgtgaaagtgctcagtgagcctgccataattattatttatttttgaactgtgtggtggtaggaggtgttccttaagaatttttgtttgcaaacatttcttccccartttaacctaccaccatggcagctgtcactcactgattcaccaaaaattgggtcaatcattatcttgtttttattaatttttcttgtatgtatagctcacatttatctcagtgtttaatattagaagtgtttggggtctttatttagaagtttggtgattttttttgtgaccagaaatatgccatagaaacttaaccgttgtttatatcaattagcctatcttaaaattggtttcattatatatcatttcacttaaagttgcaatttccaggaacctgtcagcaatattaagtaaggacttactgtgctttcagtaatcttgcttccttgctagctgtttttattctgacaggagcaggagtttcccatggtgggggccctttaattcagaagatagaccttgctatttagggttgagacactggaatgctcctctgatccacccatgcagtcagtgccaacttctgtggcatctgaggcactaaaatgtgggcaaagagcttggtcatctagacactgaggtgaaaagtgacagcttttattcacatcatgatgctgttaatttttatttctttccctgtagattcttctctcttttctcactcccggtggcaaccggcttcgcaaccaaatctgtgaagttttggacacagacctcattaggcagcaggctgagcacagtgctgttgacatccaaggcctggccaactatgtcatcagtacgatgggaaagctgtgtgctcccgtgcgagataatgatatcagagagttaaaggctactggcaacatcgtggaggtgctgaggttagcacttttgctgtttgcatttcctagagtatctttgagttcattcagaagggaagttgggcatcagggaacacagaataacaactagtaccccaaataaattactgaccctagaagaaaaccatataagcagagaccatgtcaattatttactgtatgcagagagttttcacatagaatgatctgacaaggttgttagttggcacatagtgggccctgaagatgcaatgatgaaaaagacagatataatccctgactccagggagtctaatgggcagagagatcttgaacaattaattacaattgtgataagtggaaggggaagtagagggtcttaatagagcctccgacaagggacctaatttagtcaaggcttctttattagttagggtcactagctgctataacacataaaccctaaattctcagtggtttatccagtaaaagtttgtttctcatgtcacagtccaattcaggggtccttgatcagacaaccctccacgtgtcatccagggacccagcctcctcctgtgcttggctctacccttgctcaggtccttasagtcctctccattcagctggcaaatgggaaagagaccatggggaagacatatgcaatatatagccacctcagcccagaagtgacacattctctttgaccatgactagtcacatgatcccacctagattgaaaggggagttgagaaaggtagttacagcctggaaatacttttcacagccacaaatttgcactgcagggagggagattgggcctttagtggtcagccagccacatcttctggagcttctctaaggaagtggggtgcatattatgtcacgaggatctcatctggctacatagacgataacttccttgtgatccaagagggaagaagagtctgcaacactttttgccattgaagcagagttttcttttttgtgtatggtggccayattgagaattgagttttatgtaaatgttttggaaaggtaggagaaagactggtctgcatgtagtgggtaatttactttgcaatcttgggcaggttaatagactctcaaagtgacactctctgtcaaatgggtgttaagtatccttagagtcgtgctcggctctggcagattgtgattcctcagttataggatccttgcttctagttgtcgtattaccctagtaagatctcaaatctgtgatgttcatcatggtcatttgttgagcgcccactgggtgccactgccccctgcactttacrattgttatctcattgactgttcacaacatctctacaaggttgaggttgtcctctttcacagatgaggaaactgaggctcagagagactgatttacttgtgtatatgcccacaaatctggccagttgcaaagctgggtttgggcatgaggctgcctaactctaaaaggaagtgttttttcctcagtgcctcactgccttgtcctttctttttttaatttttcttattccctaaggaatagaggccatataccctgtgtcctggctctttaaaatttcaggggttttcaaatgaaaattccttcttgaatttttcttatatcattaagattgtttatgcttcaagtaattactcttgagatctgtggaaggacacatttgcagtacacgtgtatgagcttctatgaaacatgaccctaccaaatggcaattggaactttaaaaccattttggggatgtttattgttttcagcctggaacatagatmattgttagtgaatttcagcttcacttcttaatcatctctctattttaattctaaaatttttagacaaatattccatgtcctggacctcatgcaaatggacatggccaattttacaattatgagtctcagaccgcaccttcaacgccagttggtggaatatgagagaaccaagttccaggaaattttggaagaaactccaagtgagtataatataatgtgtatttatattgaaattaggttaaaatgatgattttaaatgttaaaatttaaattaaattaaattaaattaaattawataataaataaaatttaatttaatttaaattaattaaaatttaaaatgttaaaggttaaaatgaaaattaggtgatgttttcatttttgacttcatatatagtatcactaaagaattttggcctttctattaaacatttttttaccttccaaaattgacatcacaaacttacagttgtttattctgtccaggaactgtgctaagcactattcgtttcttcattcattcaagatatatttattgagtgcctcctgtgtttcagacactgcttaggtgcagtggatactgcagcgaacagaatggaatacagttgccgtccccaaggagctgacattctagtaggcatgacaaataaataaacatatattgtcaggtgtattattaagtgstatgaagaaaaataggataaagggacagtaatgggtcagaagtgaggacagcattgttttttagatgtgatggactgggaaggtctctgtaagtaacatttgagtaaagtttgcaaagaaatgaggaaggggcatgtaaagatggggaaaagaacgttctagcctgagggactgcaggtacaaaggcactgaagcagaaactgcttatgagtttgacaaacacagggcagacattgtgacgggagtagagttggtaaggggagagtggtaagagatgaggctgaaaaggagataaaggcaggtcacatagagcattgttagtaaatgagaggagtttggatttcattccatgtgcggtggaaactcatcagagagttttaatcaggggagcaacatctgattttcatttttgaagaatattcttgttcctggctacagaataggtcatgtgggaacaaagagggaaacagaggtaccaattaggtggyattacagttgctcaggcaagaaatgatggtggcttgttccagatggtaatggtggaaggagtgagaagagaccagattctggatacattttgaaagtggagtaatcagatttgctgaagattggataagggagaaaagagttgagggtgactctaaggtttttggcctcgtacaaccgggtgaatggtcatacagtttgagtgaaactggtgagaccaggagaaagaaggttgggagatgacatggaatcaagagttcagtttggtgatgtaaacttttgagatttcatttgacatcaatgtggagatgtyaggtaggcatttagatatgaattaygagtttacaggaataatggaaactgtatatgtatttgggaatcatcagtatatgtatgatatataaagccatggaactgggtactagttaacacttagaaaatccttatcacactctaagtactttacctgtacaaactaatttaatccttgcaacaactatatgaagttaccccccattttatgggtgcggaaactgaggcactgtgaggttaagtcactggcctatgtaacacacttaaaagtataggagctcacctaggaaggcagcttggctccatagtccatgttcctgtccattatattacactgggtgagactacctagggggagtgagtgtggactctgaaagaaactgacgtggggcactccagcagctagaagctgaagttgagatgaggaggagggtctaacaatggagactatgagggagtagccagagaggtagtgtgacagtcaggagaggcgggtgtcctgtaagatacgtgaagaaggtatttggagaaggaaggcatgtttggatttgacaagcattgctaagtggtcaagaaagacacaggccaacttgaccattggatttgactgtttgatgatggtcagtaaccttgatgagagtggtttcagtggatttgtgtgcattaaagccagactgggcagggcacagtggctcacacctgtaatcctagcactttgggaggccgaggcaggcacatcacctgagatcaggagttcaagaccagcctggccaacatgctgaaaccccttctytactaaaatctaaaaattagccgggatgatggcaggtgcctgtaatcccagctgctcgggaggttgagatgggagaatcgcttgaacccaggagatggtggttgcagtgagccaaggtcgcatcattgcactccagcctggggggctgagcaagactccgtctcggaaaaaaaaaaaaaaaaaaaaaacccacacacaccagactggagggggatcaaggaaaaataggattagaagaaatcttagctcatcaaatcttcacaattaccagttacccagtgaagtaggtactgttattccctttatcttacaggcaaggaaactgagatgccagaggttgcacagctgcaagaggctggctaactgctcattggcaaactcttgacaccagcctctggggtttaattaacyactatttaaggctgagttaggtggtttctgccgagataatcaacacaatggccttatataaaaaagacaaaacaggcgccacatttaaaggggccctggcaggcaggagcacatccaggggagagcacattgatcatggaggccacctgaggaaccgtcgaggaagctgggcatgttctgcttggtaacaaggagactcaggtgggccatggccccatccaccctccctgttgacagcaactcagagastggtgaaattctgtagggcagactaggattcatgagagggaggaagcagacagctggttttgaccttcctgatagttggagctgttttaactttggaatgggcctattatagcagtagtcagtgctagctaacattttgtatgagcacttactacatgctaagtccttactgtaccactttagtagtctatkcaagcatcacactagccctatgaggttggtactgttatcaccccctaatacaactgaggaaagtgaggttaaggtacttagtctagatgactactagtaaggggtagagcctgggtaacccagatgtgtctctgactcaaagcgtgtgcatttagatactgtgcaaccctgcctctcttcaaacaagatatcaactgtgggggatattgcagagggatctctcacatcatctggcagattatttagtcatctggatagccagttatctagtcagataacttttaagttttgttctataacaaaaactctatgactccaagggctatgttgttttagcttcaaaggggagggagtaaagtgaagtagaaccctacatcgaacctggatctgaaacctcaactgtggcaactgtccacagcagcatttctctgagacttagtggttgctttcatttgtgtacctgtgtatgtaagcacatgtacaaatgcacccatatctttmatcaagatagcttggaatcttgagcaaattctctaatagggtgaattatgattttcttcatctcaaattatttgcctattttttttctgttttttttctttccttcttttttttcccccctgtttgtctttaagagacagagtctcactctattgyccaggctggggtgcagtggcatgatgataacttactctagcctccaattcttggactcaagggattctcctgtctcagcttcccaagtagctaggactacaggcatgtgccaccacgcctggctaatttttaaaacattttttgtagagacgggggtctgtgttgctcaggctggtctctaactactggcttcttcctgcctctcaacttgctgggattacaggcatgagccactgcacctggcttgcttctctttttaaaacccaggcttagtgacctgtaatccatttgcaacttttctattgacttggatattttcagagatttaagaatagagcaaacccagctttgcatataggtcattattgcttagcaagagaaatcaagagtcccagaagcagagtgtatgtcagctgttaattatgtccccaagtcactctgccaaaagtcagcccctgtgccctaatatcaaaataagagcctcaaaatgttggatttctgtgtacacatgattatataagaattattagaaaattaatacagagaagtactctagatttctgaattggctccaggaaaatattttattttgcctaagaggagattttatataattgcctattttaaatatagccaggagaaccttaggaatgattatctgtactaagtaagtagcaacaagataaccacattagatccaacatgtaaattatctgtgaaaatagcaagagattatccctgggtgggggccataagtaatttttaagatacccagaaagaaaggctttatttagacaatacgtcatatctgatcaaatgttttcatgaactttatttcatgttattctttaaaaaaattctgtgggacataaatatcrctttcagaatatttgaaactctattgtgattgccttcacctgtcacatgaggggttcaagaaatatttatggaatattttaaagaagagcaaactgatgctcagtgatgacctccttagactcagaatcattcagctaagtaaacagtggaggctgggcgccatggcttacgcctgtaatcccagcactttgggaggccaaggcgggcagatcatgagttcaggagatcgagaccatcctggccaacatggtgaaaccctgtctctactaaaaatacaaaaattagccgggtgtggtggcgcgtgcctgtgatcctagctacttaggagactgaggcaggagaatggcttgaacctgggaggcggaggctgcagtgagccgagattgcgcctctgcactccagcctgggcgacagagcaagtgtctgtctcaaaaacaaaacaaaacaaaacaaaaaacagtggagctaggactggaaaccaggtctcccaaatccaagtccagattaaaccaagctgctactttttcagccttctttgaatttttcagttttgtgttatattacctgagttgtaytgcaaggaacagaaaccaactctagctgacttagccaaagggaagtgaatggaaggatggaggaagtttgcagaatcaaaggaaaagccaaaatgtcagaaatcagaagaatgtcacaaatctggataggaaaaaccaagggatagcaaggctccattgtcacgatggttgatgtgggctgtaaacgtaggccatccctgaacactctcaccactcagatcccgggaaggagtcggctctgytgggcacgtgactctgctcggccagcccctggtcgggaagatggggcctctgaattgagactcacaaaagaaaacatggaaccagaggaaatggtttctcagagaaagccagcaccaaaagaagggaaagtgagatgttgccaggcaaaaaaaaaagatgtcatggataaggaaactacatttttccaactgaaaattggggtagaagcacgtgtaataccattgcttgttctggtgtctgtctctcccttactagactaggaacttctcgagtgcagggactgtgcttatttacctttaaatccccagtacttggtacaatacctgggactgagtaggtgcccagtggttttcgtcaaataaacgaatgagtggaaaaattcttaatcctgtccccaggaaaagccgaggttgcaggtgcctcatgaggctgaccttgcttttggaaccagagagagcagtcaccgtgccagcctgtgagrgtgaagtctctgccgatccctaagagaagagccaacgtttcactctaaacgcatgctccttctgctttaccggtcattctcaagtctgactacaaattagaatcatctggggcgtttaaacacagaggcctgagccctgcctcagacagaataaatcaaagtctccaggagctgtgcccatgaactctttttttyctttttaaagctccccaggtgattctaaagtcagccaggattgagaaccactatgccacactgttgcttttgttcaaggtaactaaatgggctcttaaatgtgtcagctgtaaatgattaaacttgcagtataaatgcttattactgccacattgtaattatattcacgatgatttccactcgcgctctctcagttggatgtcttttaaatgaaagactgcaagtcttttacatctttataaaacagaactagcaaaccaaaaacaacatttgccaactgaggagaaacaagagttgtgaaattctgggggtggtgttgctttagtgtggcaaacagaactactcataaattatccctgctcaagtgctgggtccaagaagaatttcagtctctctctactctgcacctgtgttcaggctgtatttcttggcaattgtcaccttataaattctaccaaatgtataattgtataagaactgtggtataaaaagcaatttgtttctagtgggaaaccttagaactgggcctaaagcaaaataaagtgaattttgtcctaaggcagacagccccagtagagaattactgcctccaaactttcagcctcctggaatagccttggcatgtcaaatttcatttagttcatgatgtaagagacattttattcaaagttagaagaactacttagagcaaaagtaaataaaaactatttgtcatctaagtccgtggttctcaacgtggttctcttaggggtgatttttgccactgcccccgccccacaacatttkgccatgtctggagacacttgtatgtcccatcctggcagggcagggcgggaggctgaggaagggcatctagtaggtagagcttaggtatgctgctaaacattttatagtgaacagggcagccctcaacaacgaagaattatccagtccaaaatgtcaatagtgccgaggttgagacaccctaaataaagaattggaatgaatccatttcgtgatgacccaaggaaccatcttatgctccaggaaaatttgggcttcaataagcaaggaagtctggtggccgttgagcacttgggggttgttttgtgtttggaatcagtctgatttcagctagtcatggctgctggtgggtgcctccttcttcttgccttctttccattgtctagagggagccatttccacttgcagaagcgagcccttgcagaggcatcttttgaagcaactctgtgtgagttgtttgtcatagaaactgctagcaagggaactctgctaataataactattaggcacctagtaacctatattrtagtaatatttaagtgccatatgcttaaaaatgaaatgaattcaagtataaaacctcatttccagtgatacatattttttatccagaagaattgaacttgataaacttgtctaaagtggaaggacaatctaactggacattgtytttaaggtcatagtctttaaggtcaaattaagtatgagactcaagttcagtgatttcttccttcctcactgcttccttctccctttcccatcttgacttctggaatagcccttgccaaataccagggatcatactgcataaactagattttcagtgtctgcatgttttccagataacatctcctttaaagcattggcttttctttaaggagatctgctgagattctgctccctcaagctagcacgctaactggtatctacaraaagaaaagaaaagaaaagaaaaaagccaagttcccaaaaaagctcattttaaccaccccactgcttagcctactcactctttttattccacgggtgatcactttgtctgargcaactttgttaataaggcagctgttgtgtatcaggcagagaacctgactgggccctctagagacaataatccccgtctttaaaggttgtttacagagtttacagttgctaacacttaggggacatttcctttgtgccagaaacggttctaagtgttttgcatgtactagtttgttgaatctttaccacagcttcaggaagaatattatccccaattcacagacagaggaaactgaggagacattaggtaacctgcccaagacatacagctaatgagtggtaaaggccagaccgaagttgagactgcctggctcagaggccacggctcccaactactgcaccagccacttgctctgcatgggggagcytagcacaagttcttagtcacatgttgattgctttgatattaggttgcactaaattgagattcattcatctgcaatgcaaatttgactccccagtcaagctgcttcttcattctctgtcttgctttctaaactgttgcagcagtctgttgctgatcagtctctttgcactgcaacttatgtttatgttcttgtcaaatctgtttcaaggaataaatgtaaaagacttgcctgcctaattatactgggctctgtttgacagataatcagttttagaaatggacactgtcagtggtaagctggatgtggtcggtacagacttgggagccatttgctatactttaaggaattttgtgagctagtaaacacagccattactaaaaattaaattatataaatttacaattaaatacattatattaaaaacaaaggtaaaactctgggaaatcattaggcagtttcttattaaacgcagttacaacctagcaattgcaatactgagtctttatccccaagaattgtaaacttacattcacacagaaacctatacataaatattcgtagcagccttatttgtataaccccaaactgaaacaaccaaaatggctttcaacaggtaagtagataaacagactgtggtatatccatacartagaataccactcagtaataaaaaggaatgaactattgatacatacaacttggatggatgcttagaaaacaaagcyaatctcaaagggttattttgctggtctgctcaggctaccataacaaagtaccacagactgggtagcttaatattagtttatttttcacagttctcaaggctgaaagtccaaaatgaaggtgccagctgatttggttcctgatgagggctttcttcctggcactgcagacatgcctatttctcagtgtgtgcagatggaaagaaaaagaggaagctcttttttttgtctcctcttttaagggtatcaaccctcatgacctcatctaaccctaattacctcccaaagtctccatctccaaatgtcatcacagtggaagttagggcttcatgatagaaatttgggtggcaggtggacacaaacagtccataacagctacatattgtatgattctatttacataacattcttgaagtgacatagttttggtgatcagtggttaccagaatttagggttgaggtgagagtgtgactactgggaggtaacgtgaggagatattttatggtgatggaatagttgagtatcctgatggttacagggatccacatatgtaacacaatttcttagaactatacacacacaaaggatgcatgcaaaaactggtaaaatcagtataagttagtggtattgtacccatgtcagtttcctgattttgacaatatactatagttatttaagatgctgtccttgggggcagctgggtgaagggtatacagtaactgtctgtactattttcacaacttcttaagtcttttattttgaaatagttaaagctatttcaaaatttaaaagttatttttaaagccctaaaaaacaatgaactgtgatacataagtcggtgtggataaatgtcagaaacactatgctaggtactttatgattccatttatatgaatttctagaaggcaaactgattcatgcagttaggagttaaaagtagttgagtgaggtgcacattgactggaaagggagacgagagaactttcttgggtaatggatatggtttatatcttgttttaggtggtagttgcacaggtatatagaatagccaaaactcaccaaactgaacacttaagagctgaacattttattgtatgaatttattatgtctgtaaatataaacatatttatatatgtgaaaaaaacaaaataattataaaaagtaaaggtaaacaaatactaaaaacgcttcacttccaaattatcttactattgtctatagtcttgacattaaagaatctcaagactgtacatataacaggtataaagtacctgttatatctggatgatggaaacactatgtagcagtgttctgtactgggcatctctgctcaacttcatatttaatgactctcctcccacttgctcgttctacaaatgaggaaatcaaaagctcaggagagaagtgagggctatagatacagatttaggagccttatggggtatgggcggaaatagaaaccacaggaatgagtaagatggtctagtgagattgaagagtaccaaatcagtggggattgggtagagtgcttggaagtatcaacatttaatgaacaggcagaggaacatcttcctgtaattgaagggagatgcacctgtcttctcaacccaagtatgagatgcagaagcacagctaggggaaaccaggaaaaagtggtgtcagaaaagccagggaaagagtttctggagggctgtactaagagatgtctgtattacagagatgtttaaaaaaggtaggaaggacatgtttgttggatttgacaaccaggtggtggccttagaaaggttatgggaaggatttatttcagaacctctctagcctatattctgtatcttggtagatggcacaggcattcattcagatgtccaaggtgcaaatctgggagtcatcctagaatactcctttcctattctctacatgtaagtggtcaccaagacctgtgggtactccccctaaatatttctcactttttccctctttacccctcacttccactgcccttatccattcactctcttgtttgaaccactgcaataatttactctccctccactaattcagtctttctttccaagcaatttttctgacatacatatctgatcatacaggttccatgttgaaaataatattattcagccgggcgcagtggctcacgcctgtaatcccaacacttttgggggccaaggtgggtggatcatgaggtcaggagattgagaccatcctggccaacatggtgaaaccccatctctactaaaaatacaaaaattatctgggtgtggtggtgcacgcctgtagtcccagctactcaggaggctgaggcaggagaatcgcttgaacatgggaggtggaggttgcagtgagctgagattgccccactgcactccagcctgggtgacagagtgagaccccgtcttaaaaaaaaagaaaagaaagaaaataatattattcaaaactccccattcccatcgctggtgtttgtaacctggggactrtcaatctggtaagagagaatgacaattgtttgtggacatgtgcacgtgattgtgcacattcactttgggaaaggcatatctccaattagttattaaaagtggtccaagacccaaaaatgtgtaataattatactctattttctcttcagattgtataaatctttcaccttttaccaaaaatgtgtgaaaattaatgccttttctctaaataccttctctgcacaaactcaaggctggcttctaaccacccatccaatgccatttgctacaaccctcttacccctagttctttatggaccagcaatacagatttgtttgtggcatccagaatgtgacatctagaatgtgccatatgctgtcttttccagagcayttacagagctcttcctcttagattctttcctggacagcctctttcccacaattactagcattcattgtactctgttataattgttagtttacaggtctgcctttccatctggactgtaaactccttgcagggcatggctgtgtcttctcattcatgcccagcacccaacacagcatctgtcaagtggaatacaccagtgaagggatcaatcagctgtagaacaaatatgtggccttttcactcttaggtgctcttgatcagactacagaatggataaaagaatctgtaaatgaagaattattttctctttctgagagtgctttaactcctggggccgaaaatacctccaagccaagcctgagccctactttggtgctaaataatagttacttgaaactgttacagtgggattatcagaaaaaagaattaccagaggtgagtggttttgttcttcacccaaatttcccagtatttttattcttaagttctaactttgaatcatctggtctgtgtttcatgtggtttaatgactttacaaaaatcagataaaaatgggaatttggaaatgacattgcctgttttgtattttcatgctattgagctaccctttctatttttatattttaaataaatatgttagacacttatgacagatggagcacgtcttcaggaactaacagaaaagctgaatcaattgaaaattattgcctgcctgtccctaattaccaacaacatggtgggtgctattacaggaggcctgcctgagcttgcaagcaggttaacaaggatttcagctgttctacttgaaggcatgaacaaagagtaagttccaaatttttgcatctgctccctcttgtattaaggytctgcatgtgtctcagagaacaagaatgaccttggacatctggatgtgagattcaggactgtgctttagagaagcttatcttacacctttttctagaatttcctttaatatctctgaaggcttagatgtcctctcataggaagggagaggtgttttccatgacaagtgccagggtgagtgtagtatttccacttacaatgaatgtgtacaacagcttttctttgacagtgctttggaaaaaaacaaatgaaacacagaaatctgccaagcttgatgtttagaattgcgcaattttttttttttttttttttttttgagacagaatctcgctctgtcaccaggctggagtgcagtggcgcaatctcagctcactgcaacctccgcctcccgggttcaagcaattcttctgcctcagcctcccaagtagctgggactacaggcatgcgccgccacgcccagctaatttttgtatttttagtagagaccgggtttcaccatgttggccaggatggtctcgatctcttgacctcatgactcacccatctcggcctccctagaattgtgctattgaagagggctttcctccagttgttctgacttcatcatttttctgcagtgaaatgtttactgacttcacaaatccaccttgctacgaagtcttcagaagtgctgacaattctgcccttcagagatgtgacacagtccagtgaagattttggtttttgctaaatttatctccagtattacaccttcatgaatgctagaatcccatttagattttgcatttacatcatccaataggaattcctatctaagtcagaaaattcttagtcttggtgaatggccagatggttctatgggtctcttatggatcagcttctgctggttcccctttcaggtgtcttcagaggcatgtcctctttattcctgtaattgaagggaaatgcacctgtcttctcatcctcccacctattattcagagagcatataaattacttgatgaaatcctagactattaagagccaaaaggagcccatgtagttacagaatccaacttctcattttgaactgaagcttacagatagaatagaatttgccttgggctgcaaacagaaaagggcagaccaaggactgagccctgatctgacctttctcctgattctgatgctcattaatattccaggaccaagacctataatgaaaggaaacctctgattttgcagttggtcttatcttatgatttccctgcatgggtagtcattactttccagaaacttttatttattaagcctttagggaatacccagtgctgctgaaatgttattataaagtatacagaaagtggttactaagaagacaggctttcgggtcagatggaccagggtttaaatcccagctctgctactgacttattatgaacacttgaatatgttctcaaattactatgagcctgacttcctcacttgtaagaagggaataataattgtattaatatctaccttggagttgtgagaacttaagatgattcaggtacagatgtgtggcacgtaatatgtactcaatgaatgctagctattaataactagtcattaaatcatcctctttataaytgtatctggttgtttatctggttgtttcattgtttaaatttttttcctgtgttaggaaatcaatacaatcaattctcaattatcctcattacggatggggcaatagcattcatagtattaaaaaaagggatagtactaaataatagaccaagatgtcatttatattgggtttgatgatgcatcttgaaaactagaaggagtttttccctcttcattgtgagtagaaggcatggcttatgctaagacaactttttttgaagagctgaaagaggatttattgattaattgatttttgctttttttccctttttcaacttttattttaggtgtaggggcacatgtacaggttttttacgtgggtaaattgagggtcactggggtttggtgtaccagtgatttcatcacccaggtagtgagcatagttagtttttcaaccctcaccctcctccagacctccacctttaagtgtaggagccagtatctgttgttcccctttatgtccatgtttactcagtgtttagttcccacttataagcragaacatgtggtatttggttttctgtttctgaattaatttgcttaggataatggtctccagttttacccatgttgctgcaaagaacatgatcttattctttttacagctgtatagtattccatggtgtacatataccatattttctttatccagtccaccattgatggtcatctaggttgattccatgtctttgctgttgtgaatagtgctgcagtgaatatatgagtacrtgtgtctttttgatagagtgatttctattcctttgggaataaacccagtaatgggattgctcagttgaatggtagttctgttttaagttattttagaaatctccaaactgctttccacagtggctgaactaatttacattcccaccagcagtgtataagtgctctcttttctctacaaccttgccagaatctgttattttctgactttttaataatagccattcaggctgggcacggtggctcacacctgtaatcccagcattctaggaggccgaggcagccagatcacttgaggtcaggagttcaagactagtctgcccaagatggcgaaaccccgtctctacaaaaaatacaaaaaataattagccgagcatggtggcgcatgcctgtagtcccagctactcaggaagctaaggcaggagaatcacttgaacctgggaggcagaggttgcagtgagccgagattgtgccactgcactccagcctgggtgacggagtgagactccgtctcaaaagaaaagaaaagaaaaaaatagccattcagactggtatgagatggtatctctctgtggttttgatttgcatttctctaatgattagtgatgttgagcatttcttcagatgcttgttggctacatgtatgtcttcttttgagaagtatctgttcatgtcctttgcccattttttaatgaggtcgttttttgcttgtcgagtgtttaagttccttgtagattctagatattagacctttgttgaatgcatagtttgcaaatattttctcccattctataggctgtttactctgtggataatttcttttgctgtgcataagctctttagtttaattaggtcccacttgtctatttttgcttttgttgcatttgcttttgggtaattcatcacgaaatgtttgccaaggcctatgtccataatggtgtttcctgggtcttcctttagggtttttaaaggtcttatagttaagtctttaatccatcttgagttgatttttgtatctggtgaaaggaaggagtccagtatcaattttctgcatatggctagccagtttccctttagcctaagaactcactgattaaaagcaagaaaaatctagggcagtacattgtagtggataaaaagtcggaaggtaaaaattttattacaatsagtctatccttgggttacagaattccaacgtcaggtccagtgtgggcttataacaaattccagtcaaggcagaatgccaagaacttatttcttattgctgttaatgatgataaacatgataacctatttttctcttttccttcttccatgtgcctgataatctgctaagagctaaatattagacacatagaagttcagtggtagagccaggatttgaacccagctccacataacaccatagcttatgttccaactcgctccgttatactgcttcctatcattgagcccttctctcatcctttaattcccattttgcagagttatcttaaggaccttttctggatagtgagataaaattttcagtcatctttccctaatagtgtggacccaacaaatgccttttctaattacctatttttccttacctactaaataactcactctttaattacctttacaactttctggactctatatattggagattatttatcagttacttgaataatgtgaaggagcttattatcyttggtcatgatcagccaaaagttctaggtatttgacctctgaatatcttcatttgttgtttttgattggtgttatagatttactgctcaggcatagatgaattgagtctacttcatttatcaagtgcattttttaaaatgtgtgaatgaatccactcagaccaacaagtttaaraagtaaattggtgttttctgtccctttctgatagccctgcaatataaatggggttgcaggtgcatttttggggaccacattttctgcttatgcttttctatttaaacactgctacacaatttaatgattttaagcatttagaagtctgctacatcagaaggttggtggttgggaggagttactattttatragttcattctaatagaggttattattgtctgtataagagaaatttggtagacatctaaaacaagtctgtatattaaaaataataacttgatgaacaaaaactttccctggtggaatttcattttatgtttcataggacctttaacttgaaggaagtcctgaattctattggtattcagacttgtgttgaggttaacaagaccctgatggaaagaggtttacccactttaaatgctgagattcaagctaatcttataggtcaattttcaagcattgaagaggaggacaatcctatctggtccttgattggtgagtccttttattgatttctgcttcaattccaatttgctttaacttgctgattttgactaacattaagtcagtcaaattttgatcttaaacacattacccacttttggaggataaatattgaaaatatcaagaaatattaatgttttcaaaggcctaggactcattgctgcttctgtgtgtcatggagttgggggatgtttcagggcctattatctattcagccaatagattttatgacaagaataacagagtgctggagtaatgttaaaatcctagatcaatgcagtaattcaaaccagctggcagtatgttcacagatagtagatatgagttctgctgtgagcagctctgaaggaacttggtcaggcttaaagagacaaagactaaaaatgtgtggatccgggagacatagtgtgtaggcttctttttgtaatggtcagccaggaaattgactgtctcaaagtcaagctgtgttggtgagttgggaaaatggataatgtatcagttaggactttttctgctacctgtgacaagaatctaaacttctaaactagcttaaacaaaatgatcatttattttctcatctaactgaaaagaccaggggtaggactggcttctggtacagcctaatgagagttccagctgtcactggcactagttttcccrcctccagctctcaacactaccttctcctgggccagctgccttcacaggcagacttttctcatgacagcaggatggctttagctccagcctacaaccttccatatttaagtccagtgaaaaacaaggaatctgcctccctgttggctcaaacagtgaccccatcattgagtctcagtggctccagttagcctgactatggttcatgtcccattcttgaattggtcatggtggcctgaggggaagaaagttaagcctgagacatgtattcacctcctggagccaaggaagagtcagttttctctgtaacacctgatgagagtagggaggagatggttacccccaaataaaatcagagtattgtggccataaggaaggggagaagctgccgtgtggtacaaagcagttgtctactacagaggttgaaggatgaaaaccaaaagtagaagagtgtagaattagaatgtactaacctgctaggactaatctgcaaattttcaaagtacaacattgacggccttaagaatacaaatacattttattattgatttgaggctttcaaatggtgktgttcatccttatccctggggacatggaatgctggggatccaagcttcaactttgcccccagaaaggaacagtgttggtgtatacracattgtgggctgctggagaggctgctcctaagaggggacagttgataacaataacagattatgaccactgtcacctgtggccaagcccttatctatataccttcacatgctgacatgcatctgtcctcagagcatgttgtccccagctgaacaggtaaaacctgagagatggtgttctaggaggaagagggatagagtagggactgagacactgcccagcagtctctgcagcatactgccagatccccagtagtgtgcaggcctcatgaggacagcgtgcaggtttgttcactgctatattcttgtgcaatgctgcacgtgcacatatatttaataaatatttgtgaaatgggtaaatgcataggagacttggagaggttaaataactttcactcaaagtcccataacaagctgggggcagagtctgtcttccccagcctgtctgactccagagctcatgttcctaactgctctgactggcacgtcagtcagagctggagcgctgttgcttgctggcagagtggccagagtgtcagagtgtactctgtgacttttctttggataagggaaatgctygcagtatcagaaggaagagggaagctgagggctaggagattcctcttaaaatctggtaaagcaacttttgtccacccagctttccccagtccaactttcctgtccttttgcaaattgaaagcatttttaatctcattcaaagtactgttgccctagcaacttaagtgactcacttgaacgtctcttcttcgactctggaagccaaggacacgcctttggcagggactccgtgtggctgctcctaactttacaaacactccggtcactttagcctttgcctaaaaacagactcatctgcaaaagaggcaaaagaggcagaaccacttgctgacataataaggattttgaaagggtttcatttttaaaccttcttatgggaaagcgtttggatcatatctgtgatgatatagacctgggcctctgaaggtcaggcaactagtctaaagggaaagtagtacacagttaactctaaatgtatgcctgcagaggagttagaataaattaaacagagagattcctggaacctgagaagggcttgatcagtgttggccatggttttcctctgctaagggtacccacagtatgctttcttttgttctcagttgatgcgctatttatttactgaagggatyataatccccaattcccattacaattcttaaccttttgaaaagatattagaaagggatttttctgtcgaatacatactaagtaaaaattatggattacctgctgtgtaaattatttgcatgcctacgtctactttttttttttttgagatggagtcttgctctgtcgcccagtctggagtgcagtggtgtgatcttggctcactgcaacctctgcctcctgggttcaagaagaatacttctgccccagcctccctagtagctgggactacaggtgcggaccaccaagcccagctattttttttgtattcttagtagagacggggttccaccatattggccaggctggtctcaaactcctgacctcgtgatccgcccaccttggcctcccaaagtgctgggattacaggcctaagccactgtgcctggcctgccatctacacttttaacaagtaatttcagttgcacaggtgatacaataatttctccttgtagaaaaattacagacaaaggccaggcacggtggctcatgcctgtcatcccagcactttgggaggccaaagcaggaggatggcttgaggccaggagtttgagactctcctgggcaacagatggagaccctgtctatatataaaaaaagaaaaaaaatacagataaggcttaagtcacctttgtttgccttcttcagtccccattttcccctggctgccacggttttcagttcgttatttatctttatagactcttttcagtccattctcacttaagttcagtcagcatttacaatgtgtctgtcacatgacagaccaagaatataaagataaaaaagatataaacctcacgctcagagagtccactgtccaagaagggagagagacaccttctcaactggcaatcatatgtcacgatagtctggtaacagatgctaaggaaagtcacagaaaggaggtaacttttggcacgacattgaaggatgcctctgattctgggcagagatgagatgaaatgagatgagattgaagggcattctagtaaaaggaaagaattctaagacatagacattggaaacaagttctaggtcagacctagctggaatgtatgatttttgtgagcattctttggtgataagaattttagtagtatcatagttgtctatattcaatgtggcatattttccttagtaaaccttcttattggtgaggtttctgttcccaaagccagagaaagcccttggagcagcctgagctatagcaggtcttttctgtccagtattattaatagttgtcctatactattgcagcctgatttccatatgcatttctatgcttttgtgtagtcgtctcaaagtcaaatacattgaggcagtgatgcaggaagggcagggaaggtggcacaatggtgtgctggttgggatgtcccttcctcagtgtctcctgattcttggccatgtgtgaagtaccctgtaacttatttagtattaattaattatgtttgagatggagtctccctctgttgcccaggctggagtgtggtggcatgatcacagctcactgaagcctcatgagctcaggcagtcctctcaactcagcctcctaagtagctgggactacaggcacacaccatcatgcctggctaatttttaaattttttttgtagagatgaagtttcactatattgcccaggctggtctcgaactcctaggctcaatcagtctcccacctcggcctcccaaagtgctgggattayaggtgtgagccactacgcctggcaccatgtaatttattgttcaaccagggtacttttgagagtctctttttaaaattatgccaggacaacaggtgtaaattttgactgtcctggggaaacctagatgtgtggtcccccttgccatgtggtaatttgggcccccaagtttgccagatctctagatttttcaagagaaagcagaaatatggatttctatgtgaaatctcctgattttaaatggcttctgtttttaaaaaagacactgcatgggccagactggcaatgccagtttacaaactcagctttagtgtatgtaattataatcatgaacatttaggattaacttttgtagaagattccccccaaatagggctctgcctttttttttttatcagtcagctattgctgcataacaaaataccacaaaactcctgagcttaaaaaaaataagcatttattattactcaccagtctgtgaggcgaccggstggctcttttggtcttgctgaactcactaatgtatttgtggttcagctgtgactcaggatggaagctttgctgatcctggctggactttctcaggtgtttgaatgctggttggctatgggttggtctaggatggcctcagatggaacagctgggtttccctctccttggtctctcatcctccagcaagyccaggcctattctcatggyggtagtaggtagacggtggacatgaacaagagtggcctcttgaggccaaggcatgaaactggtactctggcatttccaccgcattctgtattggccaaagtaagtcacagggccagcccagatggaaaggatgggaaaaacacactccagctttgataggaggaactgcaaagctaccttggaaaggggatgggtgcagggaggggtaaagaattgggaacattattgcagtcaacctactacaattacttgttcttgtttttaaaaattatgtactttaataatggacagataaaagtatctttttttccccttcagataaacgaattaagctttacatgagaaggctactttgtcttccaagccctcaaaaatgcatgcctcctatgccaggaggcctagctgtcattcagcaggagctagaagccctaggctctcaatatgcaaacattgtgaatctcaacaaacaagtgtatggaccattttatgcaaatatacttcgaaagctgctcttcaatgaggaagccatggggaaggtagatgcttcacctcctactaactaaagaagaactgacattggacgagagattggaaatccagtactttggtatccagtccacttccattgatggcattagagatccagcacattctcagtactgtggtgcagtattagcccaaatctgtgtaatgggtaatattagcattacagaagacacacacatcacatagaccctcagaagacgtaaacrtcacatagaccctatttgtgcatcattttcaagtttaaaacaratatttgtaatgaacagaaaacaatttgtaattaattatattacctatataatacttgtaaatgttttcttaaccatttatatttggcttatgacatttaacccctaaggagttgtttttctcacttgttattatcaaacctaatggkttttaattttggtacaactccttaaagggttgaaggttgtracaataactgagggaactgatgttctgaataaatgatgtgaagtaaacacaattgtatttgaaatgtacaattacattttattaatgtgttaatagaaactttcaaagtaagtcctcaaattccacaaatgtaccaaatcacactttataataccaatggtcagtatttatttagaattttaatgtattaagtacattttcatgctatatacaaacttcagataaaacctcccttgtttgtttagtgaaaatagaagcaactcccttctcaaattattctagaagtttgtttcttcttacaatttagtctgctctccaagaaaaacaatttttgcacaaatctcttagtgaatgtccttgcagttctcaggccattgataaggtttatataagagtttaatatttttatgtgaggcagggctcatttggtttacttgtaagaagaagaaagggagtcaatgataaaatgagatcccattctccatgaagttcatatctgaaaaagaaacagttaaactttggatttcttacccatataacttaactaccagatgtcttttgtgctgatgaaagctttaccgtgttatgaccaagatgccctyctaaggatcattatcatttgcctttttttttttttttttttttttttgagacgcagtctcactctgtcgcccaggctggagtgcagtggcgtgatctcarctcactgcaacctctgcctcctgggttcaagcaattctcctgcctcagcctcctgagtagctgggactacaggcgcccgccaccacgcccagctaatttttgtatttttagtagagacagggtttcatcatgttggccaggcttgtcttgaactcctgacctcgtgatccacccaccacggactcctcaagtgctgggattacaggcgtgagccaccatgcccggcctcatttgccattcttttttttttttttttctttgagatggagtctcactctattgcccargctggagtgctgtggcacaatctcggctcactgcaacctctgcctccyggattcaagtgattctcctgcctcagccttccgagtagctgggattacaggcatgcaccaccatgcccagctaatttttgtatttttactagagacagggtttcaccacattggtgaggctggtctcaaactcctgacctcgtgatccgcccgcctcagcctcccaaagtgctgggattacaggcgtgaaccactgcgcccggcctcatttgccattcttgagcrttaaatcaaaccttgcaaagttgggcactagttgccactgagactttagagaaatctgcttatcctggaattactcttcttggagtgctgcgggaagcactgcagttgggaggtacttggtctaaaaagagcttcatttgcataaaatacatttttgattgttttgtttgctaaggactcaattgagccctagtaatttggtgaggtcgagtgggtagaaaataaaaagaagcattcctttcttccccaaccttcttttcctcaccacaaccttcaccattacggtgttacttcattattttatgaagttctaggaaatgattgtgtgaataaattgtctccattgtttatatttggggaaatctgccaaaatttgaggaaagtataaacgtcagtttttttttttctcacaatgcccaatacatcagccattctctccacgtaagctgctgcatgcaagtggagtattactgaagagtacaccattggtcttagctatttttttctcttcctgcagtcctcttctgcccatgttttcctatacacagcaactataaggtgctgaagacatttggttttctcttaagctgaaggagttctcagctgttctgtctttggggcatgggcatcagggagattctgacagtagaaaggtattatgtagtgtgatttttttgttgctttctggggtgaactgtatacttaacaggtggtgtacttttttattaccagatttgaatccagctgatgctcttttatactacagtggccagcaggaaaacaatgtacaaactttttttttttttaatgcatttaaaatgaagggcattctgcctttttttttttttttttttttttttttttagkggcaaagtcaatctyaatgtttcaagtctggatttaggcaactacatttactaggattttttaaattgtatcccttagcatgttgtttatttggtttttacttaaatgtttacttctaatgttttcctaacatggtctcattttgtaatgtaaatttgtattaaatgccatacacacattttcattcttctgctaaaacatgtattgkgtgcacttactaaattttaaagcattaaaaattatttcaaaatagccagtgtctctgttttctaaaccacttctgggtagcttggggctggaatattggatagtctttattggatagtctttattggatagtctttttagaatgattcttgtgctgaccatcagagccttacagacatcaaatcatgtttattcacacattcattcattgagtcaacaaatacctattgagcatctgctgtgtgcctgccaagaagtatcccagtggttgtgatacatasatgataaaacatactgtcttcaagaagtttacaatctagtgagaaggacaaacttgtgaacagttacaataaagtgtaatgagggttaaaaaataaggccggggctggacgcaatggctcacgcctgaatcccagcacttcgaggccaaagcaggtgcatcacttgaggccaggagttcaagaaaagcctggccagcatggcaaaacaccatctctattaaaaatacaaaaatcagccgggtgtggtggcacatgcctgtaatcccagctacttgggaagctgaagcaggagaatcacttgaacctgggaggcagaagttgcagtgagccaagatcttgccactgcactccagcctgggtaacagagcaagaccctgtctccaaaaaataataataataaataagcatagtgctagggagaagatggtcaaactctatttcataaagaagataattctttagctaaaacctgagagatacataggaacttgccaagaggccacaaaacaggccaagtgcacagtaagtacaacagtagggagaaatggtgagccagggatgagagtaagttggaagaatgaaagtgatgaatgagaggtggccaggcgcagtggctcacacctgaaatcccagcacttcaggaggtcgaggtgggtggatcacttgaggtcaggagttcgagaccagcctggccaacatggtaaaaccccatctctctactaaaaatacaaaaattagctggatgtggaggcagacacctgtaatcctagctactcgggaggctaaggcaggagaatcacttgaacccaggaagcagaggttgcagtgagccgagatcgtgccacttgcactgcagcctgggcgacagagggagactttgtctttaaaaaaaaaaaaaagtgatgagaggtgaaacaagaaagatgaaaaggttctcggatgccatgctaaaatttgggcggggggcaggggttgtcctgaaaaggaagaagaatcattgaatctcttgaaacatgagaaggtcacaaacaaaatctatgttttggaaagattgccctgacaacacttgttgatgctagaatattcctaygtctagtgtatgtatgtttacatgcactcacacgtgaagacatgataccagcaatttaaatggactctggttaactgaagcagaaaaggagtttattggatgggcatgaaatacctcacagaatctagttaatcagagaggaaccaggtttggaaaatggacaggaaccaaggcgatgcaagctgcaggagtccgtccacgctggaatcagtgctgcaacttcagagattgatttctcaactgtctttccttctttgcctcatttgcttaagatctaaagtcccacatatcaagattcagttgagtgagtcttaagtgcccaggctttaatttgcaggggatggagtgagggaatwacgatccttacactcctgtggtcccaccaaagtcatccaattagagatttctcccaaattgagagggcatgccgagaagcagaaagagaaaaataaatccactgtaatgaacattcatgaaatctttaaaatttggatgtgagaaatgtgtgagaccacccaaaccagcagtgcttctgagaattatacaaaagatgatttaaggaaaggcgtagttacaagaagtcaacctttcctaataagtgtaggtgaactgctgaacaaacagcccccaagtctcagtggtctcataagctcatttctcaaagcatagttcaaagcaggggggtagagtggcgttggggggcgggtcttccatttagccatccagagacccaacgtcatccatgtcatgactcygctgccctctaaatcttcattcactcagctgatagggaaagaaaaagactgcccacttccactcatgttccattggccagaattcaataatgtggcctcatcttactgcaagggaggctggaaaaagtgcccaggagaaaggctgtcatggatatgggtaagcattagccgtctccacttcgggtcccttccagtgaaccttctcttcccgaaaataggtttaaaattatgtgcctgatctttctgaaagagggggtaactgaaagaggggaggatttgaaagccagacccaggagaatcactaakgagttctgtagttgattggcaaagtgtgctataggaatggggagtacctcctttgtgcaacatatttgtgcttctcarttgcatctctcaagactaaagttcagcctgttctacctctggggatgttcaattccaaaaattttccactaattgttctgtaaaagcatgggactaagagctgtaagaacttagttggaattcactcctactacttcatagctatatgaacgcgagccaatcttttaatcttgctgaacctcaattttccaccctacttccctaccctactatcttcctacctcacagttattgtgaaaataaagtgagtcatatttgaaattgtctgtaaactctaaggcataatgtagccagaatacattataataactgtaatttatgagtcctaaatctctttcaagcttcaaggggttttagtatttggagatgtgatgatcaagtacttaagtacataagaacaaaaattttaatatctcatcagaaccatggttcattaagcccaatattgtcattggcagagaaacccaagggtatgcagaaggctgcggttattgtccttgatgtcaacgtcaaaggctagcgacaaaacccwacatgttctaattccatttagtaatcaattatgacattatcctctatgatttacttcaatcttttaaaaggtatatttgtattatcatattgtgccctcttgttctgtttttggagtgaggccttaccttttcatttctaagcttactatgttagctcctttcagatttcaagggaaaggaacagaggtatttattgcaaacttctatgaagaagaaaggaaatccaggaatttgtctcagcagctgtatttgtaggtgtggtgaacctgaatatagtttcttttctctttcagaatataagaaaaaaatattaatagccactgagcacttaccctatggcagggactacccgaagcactttatgtaaatatcacagaactgcacagcacattgggaggcaggctccatcatttccatatgtggaaaacgagaatcagagaggctaaggaacttgcccaacgtcacagagctggtaagtgtatttgaacccaaggagtctaaccctgraatgtgtgtcatccatcaaaagtgtttctcagggccatgggcacactggctcacgcctataatcccagcactttgggaggctgaggcaggtggatcacctgaggtcaggaatttgagaccagcctggccaacatggtgaaatcccatctctactaaaaatacaaaaattagccag

SEQ ID NO: 9913 - DNA, 13445 bp, Homo sapiens
ctgcactccagcctgggtgacagagcgagactccgtctcaagaataaataaataaataaataaataaataaataaataaataaataaaataaactgtcccgtttgttctatttccccagcaagaggaaaacttgggcaacttgatccatgagaccgaatccttcttcaagacgagagacaaggagtaccaggaaacgataggtcagatcgaggtgagggctcgggacgtggagcccactcgtgaggctctcctgaggtccacatggttgagatcctggygatcaaacacccatgtgtcatgggcaggggctggtagagtggggcaggcgcaggatcgggagtcaggaggcctcggggcgagtaatgtctttcttagggcctcagtttcctaatctgtcaaatgggggtggtgatccttgcctgcctcagagaattagaaagaatatatgtagctgagatgatcccataataaccacagagctgacattcgagtgatagtgagtgacacaaggtgctgagtatgcccggtatccttacctgtgccctatgcagtaggcaccgtgcaccccttttacagaggaggagatgaggctggaaaggaccaagtgacttgcccaaggccttgcggccaggaagcagcattgaagtataattctctctggctccagaggctgtgcatgtgatcacttctataaacgatagtyattgctattatgcaggagaaagggaagcccagctccttccctagaggaagtatcacttgatagaggacaagagtcagaaacatgaaaaagccttcaggatttttrtaatcrggtctggataaaggaacccaaagatgttgagttctcagaaccgggtggggtgcatcagagccaggctgctgctggggttgctaagcaaccattcccctttggccagaaggagttctaggggaagtggacccatgtgcagagagcagagggtgagggaggttgatgtcyggaggcagggtcctgatggcatggtgtccaatggtggccttgatggcaccatccctgaggaatccaggaggagaggttgccgaggcttctgycacgaggatgacttgccctcacccttattcctcattggttcctcccagctcgagctggccacagccaaaagtgacatgaaccgacacctgcacgagtacatggagatgtgcagcatgaagcgaggcctggacgtgcagatggagacctgccgccggctcatcaaaggctcygcagacaggtacccrcccatcctcccaggggattcagctatggcatccttggaggggaattcccaaggctgcaactcggccatgtgtcatgctcccaacctgtctctctgtccgtccatctgtccgtccgtccgtccatccatccatccatccatccatccagtgactattagcacacctatgtgccagatgccttacatatctaacctcatgcaagtcccaccaccaccctgccctttgttgattcaatagatacttgscaaaggcctgctctgtgcaagacggtggggccagtaagtatagcccctgccctcaaggagcttaagccccattttctgctgaaatggggagcagaggtggacagggcatgctcccatttgctcacaggaagtgatttcccttcctttcccatctgttagtctgttctcatggtgctataaagaattgcctgaggctgggcgtggtggctcacacctgtaatcccagcactttgggaggctgaggtgggaggattgcttgagcccaggagttcacagctagcttgggcaacatagcaagaccccgtctcaaaaaaaaagaaatgcctgagactgggtaatttataaaggaaagaggtttcgttgactcaccgttccacatggctgaggaggcctcaggaaacttatagtcatggcagaaggcacctcttcacagggcggcaggggagagaatgagtgcctagcaaaggggaaacccccccttataaaaccatcagatctcgtgagaactaactccctatcacaagaacaggatgggggaaaccgcccccacgattcaattatctctaactggtccctctcatgacacgtggggattatgggagctacaattccagatgcaatttgggtgggaacacagccaaaccatagcatcctcttccaacccagggcctgtccccaggagactgacaagtgtcaggcatggcacataaagcagagcccctgccttcaaagacacacagccttatcgggggacagccacgctgagaatgagctaatatgaggagaatgcctgccacacagcacaaatacgttgtcactgttttcctcgttttgctgcattactgtacgagagggagggacagctctgtgggggccagatctgtgtgcagggccgtagccttgcctttcagacctttaactcctcaaacccccagaacccagtgtggttatctccattatccagacagaagagcagaygctcaggcaggttaaacggtttgcccaagttcccccacccccagctcatccgagatagaatcagaactgcaccccagtgatgttaaccrtatcccgcatggcctccttttgagctctgagtcattcaggttttacttagcacctactatatgcccagacatgggttaggtgcttggagagtaacagccaaacttgatccacggtccagctcccaaggggctttcttcctagagaagccaacacagccagaccaagtaggggctggtgcagggggttacctcgtgagcttaaaggatcttaaggatagctgagtgaggcaggagctcaggaccaggcccctctgagagtagatcttatagaagtggcagctcagccttcccactccttgacccttcagaggcccagggctgctctctgaatttccccactctcttgtgcttctcaggaattcaccgtcccccagctccrtggccagcagcgactcaggaagtacagatgagatccaggatgagttcgagcgcgaggcggatgtggagcccatggtcagctgatgactgaggccctgcgagcctggtggtcttggtgatggggccctgccacctctcctcatggggccaggaaggcccctcggagtggggttcgaagccacaccacacagactttctctgccctcccttctctggaggcccygagggactgctgcttccttccttccttccacaccaccaacgggtgccccgtctccatcccccacccacccaaggaatggtgctgtcaatttctattgttctccacattacaaatgcagacttctgtgcggactttgcagtgttaactgtgccttctcccttaagctgagccactttgagctccaaagaattattcctagcaggtgtttttatacagaactctaagctgagggccgggccaaccggccgtggtgtaatgtggtttctgccgtccgtcccacctgctcctctgattggccatgggctatgccctcccttcctcctgagccagcccagactcggcctggagcttggggtgctctgccaacccccaggaaggagccgcttgcctctgtgagctttctaggcctgggtagggaccaccccaattttctcactccctgaaggagagaaaggtggaaggaagggaaggaggacacattttaattttttggggggatcgagtggcaaagttgaagggacaaggcactgtgaggggaaggcagagsctcactgtgtttaaactactatgcaaaaaacaaaacaaacaacaaaagcagcttgccttatatcattgtggaaggcaggacctctcctgggctcctggcttccccctggagctgggagagaggccggggttagggtgatctgtgtggcagcactgactgggtagtgtgggtttggccgaggttggtcatgaggcyggggttcccgcaaggcactggcctccctgaccgcttgctyccttccggacctctgggttcagggcgggggyggagggatccttgatttccctgataacttgatgttcttccctccctcgccagccaacaatagaggcttagagatctgtaatttctctgtgagaaagtctgaaggggccaggcctggtctctgctcccttctacccgccttgggttaggactgtccggcagttgcctgcttttggctgctggcaggagagaagcagggtgggctgctggcagtgcaggagctggagtgagggccatcctctttctgctcctcgacacacgcaagccgctctcagcagttccctcgactggccagtcggggtattgatctgagccagcatcccccaagacttgaatggcttgagtgggactgcrttgaagggcactgtgtggcccccttccaaatctcagcttggagccagctgagcaggctttgctttattattattttttaagcctactgcagtgggtctgttgccaattttaattttttattgtcccaggagctccctctagtggtcaaggtagcaaaatgtgcccaaggactagaacttgggtccctctgccttgcctggaggcagaaggagggggctctgggtttgactgggattgtggtccccaggggtccgtggcctttaaggctcttctctcttttctgtttccsccacctgtgttacagtcttaaaaatactgtacataaaagatatatgtagagagagagagagagcgtgagaatgtgttagtgactatgtgtgatgtaatttatcacgatttggtggccttcgtcatgagttttttcctttgttttcttttgctgggggcacctcccacgggtcccctgtggcagtctggctgtgacacttccatagtcagcatctcttgttagccaaacagttccctttgacaggtacttggagggacaatggttttggaagagagacggcccttctctctcctcactcacccttgttctaaaggttacagggttcaaacatacctgattcttgttgttattgttgttgaatttttattttaaccaaaggttatcagagccagttgggcttggacctcagctgctaaaaagattttccgtttcctcgagggcaggaaaacatccaccctcgtgggtctcctccgtccagggccgagggaggcattggayaatgtggtatgggagtttcgtgggcagcgtggaagccggccctgggttgttccccaaggtggtgggagggtgacagatatatctttagacttaagactgtaaggcagcagtgttagcatgggagtaactaaggttactgtggttatcggtgtccggcggtattatttttactttcctccttgtatacataggtcatttgtctttgaggactagggtactctagggagtttgaaaactgcaggagccagaaagagatcctggcctgagagtcccytcyggctggcttttaatatctgctctcctcttgggagtgaggacttggggcaggtgggtaggagagggaaagccagagtgtgatgggcctgcctcctgggctggttcctgggtccggcctgcctgcctgcctgcctgcctctccaccacatgcttttttcagttaatgtcagtgggccctgcttgtcccctcaccatgagcccacagcttgccaagaaagaccccaacgctcgctggggcagcaccagtcctagctgggacgaattggtccatcctytgtaaagctgtaaatrcttaattttgactttctatttctaagcccagtgtcatattgacactggtattttagaattttctcagatgggctctcctgcgctgccctctgtctcctgtttttgggggttttatacaaacagaggattggggagggataggaagactagcatccttttggctccctggttggttgtgaaatacacacacacacacacacacacacacacacactcgcactcctctgagactccgaacagagaaaaaaattattggcaaatcaacacatttttctttctcgtcttgagaaaatgtcttgaggtccctgaagggccaaatccatcgtggactaactctgtgggtagagctcagatgacctagggagaattaaaccacttamgcttggagtgggaggagagggggtggggtgggggagaatataagatgtaacttaagctaaatgtaatctatttataaagcaagagactctcatctatttttatgaaaggaagggttttttaatctagggtaggcagttgtggtagcccagcattttcctgtggacgagacatggtgcatgttgttgctggattgaatggaacccattcctgtccccyggcctcgtcttctgtcctcacttttggtcatccacacccatgagcagcttcagcagagtgtaggtcccacttcaccccattctcctctcctctgacccctcagctccttggaagtcttggggtggggatctgagggggtgggtgggctgcaggaaattcagaaatgtggtgggtgggggaagggacaaggcgcattagggagggaacaagctgggctctggggataggctctgattaattagttactctgactctggtctgccgagatccatttccaacccagttgcgttgggagagggttgggaggcagcagagcatgggtracagtgggagcacacgacttccttggagcctgggcctttgcgggtcccaggtggtcaggcagctggagcaraagtggaaatggcttaagatgctcatagcccagccccggctgtgtctactccaggccaagcctgggctgcagtccttgctatgttccccccagggccctgrggggagggatcagggtgctgggggtttcctaggacaggggtcttcccccttgagacaccaagctctggctctagaagagctctctcctggagtggggagtctggaggggactgggtgggtgcaggtaaagccagattctctctggaagggaattttctakgaatggatgatttccaggctcagggtgggctgtgtgttagttctgagcaaatccctcaccaagacccttccctcccaagccctcaaagaaatgaggcaaagcccttccctgcaagaccccttgtggaygtttttgcatctacctgatttttagccccacccagggagactttataccccatgatcctgccccaccgttgctgttgtctgccagctgggtctagcatcacagggaagggggggatttatactcayggaaagactactgatcctaccggaaaccaacctgtttactgtactgttgtaaatatcatgccctttatatcctgtatattggcttcttttaaataaagtgaaatgtcttagaactgatggtgcttttttttgtttttgtttttaaacagaagatgaatctggtgttgggggaggggtaggaggacggaaggccacagaaaccctcaaactcattagttaattagccataaaataggggatttcatatcacctgttacatttgtagctcacaataaaagctttggaagatgacaaagcaggaatcattacacacattttactgaaggggaagagaggacatgagacatcacaggctcagtaactggcttggcctggtttggaactgatgtccttttaaccacaaagcccccatttttccaggctctccaacgtgcccacaggaggtcaccttcccaggctctggatttgacagtaaccaatgttctagtttttcttgtcaatgggcatgttcagggcaacattgcccaaatgtgaactgagcccacctgtctagggttttctccaaaggtgaagacaaatagccgccaccaattccaatttgctttttgccattcctaatacttggcayttaggtaatctccctctcctactcttcatttaaatgtttacattctcccaaagtacctcaaatggtgtaatctggagaaaaataagtggcttaagatcacgggggctttgtgagttgggtactattacttccgttttacagatgaggaaactgaggcccggaaaggatatgtagtctgcctagtgccctgcttgaggaaccaaaatcagcatgggaactgactcctaagcaggtgcgcggttcatgctgctggaagaaatataaacaaattagaacagagagtaaggaaacgtaacattactttaggaatagattgggtccctgagacctcgtcatcagagaagacttcagaatccaagttttaaatagcattctagtgtttaccaagcacacaacattttgcaaagaaagctraawtttttacttgggggtaaaaggctcaggaacaactggttttgcggccaaaggctttaaatgaaaagctaagcgttggccagctcaggttttatcttgcattgatcgtaatctgcaaggaagctaagaagctggccggccccgcgcctggagggtaggtggagagcggctgggtcctggccaagaagctggaaggcaggctcattccaggggccgcagcccccgggaagaagcagggggctggccgcgctgtggccctgcggggtcgaggagtctggtagcggacaggtttccagccttgtacaagccaccggcagcccgagagaagtcagtcggactcccaycgaacccggggcscacgccagagggccggrcgcagcgagtccttctgccccgcttcagcacgtgtcccatttcggttatctcattggctctattcagcccctctctgctccgctttggaaggctgccgcaggaccgccccgctgattggttcagaagctttggtgtgtcactctgactggtcgacagagttcacgccctctctcccgggtcataccataaagagaggaggggaaaacgcatgcatttcaggacttcgctttcgggttcccttgtcctgtgttgtgtaatgcccccgttatggcactagaaatattttttattagccgaagctaaatatagtgggactttggctgatcccgagctcggaggacagccggggtgatccgtttccccccgaggatcgaggtggtgcgctctggacggggttgtgcattctcgccgcgcccgggcggacgatccagcgaacagccccgcttctarccmgagatgctgctgccggcgcccgcgctccgccgcgccctgctgtcccgcccctggaccggggccgggtgagtgagcacggggcccggggcggcccgagcgcgcgcctggggcccgggagcctgagagtcactgggcgtcccccgcgccgcactccctccctgccggacccccaagctgcctcggtcaacgccgggttcctcaggggctcccctccgwcccccacccaggcctttctcccactgagatcccttagcctcctccctcaggtagtcaccttcctttagcgaggggacccctcttcccgaatcctgcgaccgagtagggtgcctcggtggccctgccggttcccacgctcggaaagtagcctctgtagtcactcacctcactcctaatactggatcttcgcaatttgctggcttcccctgaggggcccttctatttttagcacaccacacatctcacttccccaccctcgtctcacgttcagtgtccccatcccgccccggattccccgagtcctctccttctaccaggatttctacctctctcttttccgctccccacacaccccgccgcccgtttttttttttttttttcaagttaaatgttggacagaaaaaaggattcctttcttcttgtaggtggaataatcatatttatagagtgcttataatgaaccaaatgctggccgggcaattggcaggtgtcttatgaggattaaatgagttaatacatggggagtgcactgaacagtgcccagcacaaaggcagcgcccggttattattattgccacgatcatcatcattatcacctctatttaaacttctcactcctgtgaggcaggtcattattccaaataatgaagaaacccaggagcagttcaggggtggacctgcccttcaaatcccgatttgcaaacctgacattgtggagccaggtgcctggacccttgcccactcaatgacaaatattctcagagcccctccagctcggagctaggtttggagaggtaggtgggacacagaccctgccccagaggggttcctagtctggtggggctgcccacctgtggatcagccccccctcccattkgargtttgtttgcttgacccctggggctgttagtggcagkgtctttcctgatgagctgtgccctttctgagttaatcagtggccctctcccttcccccaagggatggcatggtggtgctctgagcacawgtgagttkcaacactgctgtgtgtcctctgtgggtgragaggggataggaaagggcgcaggaagaggacatgggacagaggggttcctcttctaggctgagactggggccacacttgccatactcyckgtgtgatcccgtttgcaggccttccctgcactctgagactcaggaagatggagcttatagagtcctgtgtttactgagtgcctactgtgagctggtgctctgccaaacaccctagagatgaggrgtacccagggaatttacatggggtggggcctttgaggagttttcggcttaataggggagaaatgcataggaaaaccctccaatatctagtagaaagcaatccatattctaaaagataagcccatgataacaataatgattatcaagcaatcaagcaccatgggcctaacaccgagccggtaagtactgtctcattcctgtattatcatgggaaacgatctgccatcagagatatatgactgaaattacatttggtctaaatccagatttatgctctgaattatgaggcctcctgaattgagaggggaaagagaaagagcattttgcagctggttccctgggctcaagttacccctttgatacagcagctggccgcatgccctagacaggatttctcaacctcaccactattcgcatttggggctacattttggttgctgtggagtctgtcctgtgcactgtagaatgtttagcagcgtctctggcctttacccgctgcatgtcaggggcacccccggccctgacaattacgaaaaaaaccctggccctgacaggaaacacaagttcccagacattgtcagatgttacctgggggacaaaagtcacctccggttgagagccagtgctctagaggaacagctttgatgtttgatcacttgttcatttactcagtgaacatttagagcacacccgtgacatgccatgtctgcatttatggagaaacagtcgcagggcattttcagtgacatccctcagtgtcctacgtgtaaaactctagtcctgagaaaaaccgctgcttttgaggaacgggtataggagatgcttcttagtgttttcttttttgccttgagtgccaggaatctctgctagttttaaaaaatacccttgatacatgttttcttttagtttaatacatgtcaactgtgaaaagtacagataaggcaaaaaaatagaaaaatcacctggaattgtaccacacagaggtacccactgttaacattttgattcatgtcctttaactttccatgaatagatatgcttttaaaaaaaacctcatagaaacaagctcatctgcccatactttattgtagcttgttttttccctttatacacttgtctgccttacagtatgttcccaggccctggaactgtgtctggcacctggtaagcccttggcaaacatttagggaatgaatgaactaatcatgtgagcccttccttgtcaatcgatatttatcacggccagcctcaggacaatcaccataaagtgtggcctttataggtgggcccagggatggcagctggtgacaatgactgccatttacttttcatgtggattattttactcagcctctcagcaacctatgatgtaggggttaccacccccatttcacagattaaacaactgaggcccatggaaattaaggaaaacttgtccgaggccttgagctggtgaacaccaggcctcccaactgactgtctctttcctcctttaaccctgacttcctgtttttttctcaatcaactttaccatcagtatcctcagttctctttggaaacaggcaggatacagattaatagccagcccaggcatgtagtaggcttataagagttcacttctgttccttatttcttgtgccaagcccagacatgactccagctcagcccgtctgacatcagggggcttgtgggccggaattggttactaccgtgtcccctgcagtgatcctgggtggttttggactcttctcaggctacctgatggtttaattttcaaaatatcaaaagcacacaatgcttttccyagtctgcccagcccttggatgggcacagcttgccctgggtcgagggctggcatttcccaccattccttagacattctctgctcttgaactcctccaaccagtggctggggcagtgcctttggcctggaatgtcctgctggccacctcrgtgagcccatccagtgctttgtggccttggcaaggcagcttctgtcccttcagtatcctcgtctgcaaaatggggatgattgtattaacagccacgtagcaggtggctgcaaggattagcggtgatgtgatcagtggtttcctggatgctggtaccgaatgcgtgctctgtgagtatttgagttggagaataattaaaacctgtgattatcatcacacttctaaagtagtgaaagcgccattgaggcagtgcttggcagtggcacccctgggagcagcctgcctcctgtgccctgcatctggcccggcacacagtaggcgttgaacggttgctgttgagatggtccagaacacagcatggcttggatcctggctccaactcttggcagctctgtggccccgggcaggttactcaccctctctgggctcccttatgttctcatatggaaaataaagatgacagtagtagtcacctcataggattgtcctgcgtgttaaatggtctcatacatggaaagcactttggagtgcccagcacctgaaatgctcagtaagtgctgctgtggttatgatgatccccctctcccaccaatgggcttcctggagtgatcatcttcgatcaggaatatcaagacagcagggcccagcagtgaaggatggtggcaggaggggaggtatggaactcagatgtcctcggtctcttctgtttattccaattaagtaccccagatgccaaacctcttctgttattattgttggtttgtttgtttgtttgttttggagacagagtctcactctgttgtccaggctggagtacagtgtcatgatctcagctcactacagcctcaacctcctgggctcagtcatcctcccacctcagcctcccaagtagctggaactacaggcgcacatcaccatacccagctaatttttgtattttttttttttcgt

SEQ ID NO: 9914 - DNA, 43028 bp, Homo sapiens
ttatgtcagatggtctctggtccaggtgctattgtttttctatttcctcctcatgttagcttatatattagataacatccttttgagaagtttcaaagttagctttaaattgttgctatttctacctaaatgcaacgtgccttctagaatgcatgcacatgaaattcaacacagataacacgttttgaagatcctctcaccctcagggatagtgtcctgattttatttttgagttaattacttgactcttgccaccccagtttcttccaagccgtgatttagtgcatatttaatgcagactaagcatgccccaaggcatactcaccttgttaggtttttaaaaggaaaagattgacctcacataggagaaattagttaaattgaactttaagacaagtacgtggggttgctccagcagcaactgaaatgtattatagtagaatttcaccacgtatgcacctaatgtcttggaactcaactatgtctacaagtgcatgggtggtgggaggctgagaaaattggaggagacagtgaaaggaaagatgaagacagacagggagagaaagaatgaacaatcaaaataatgcaatgagagatgcaggaaagaataaaaagcaacgtgaagggtaattatgtgggaaactctaaataaatataatctaataataacaatgtctcttgcaatttaaaataggtaaataattaaaaatgcattacaataataccatacatattgaaagctggtaaatggaagatatattaacatccttacattttcaagaaagaggtaaaactactaatttacattaaactttgataagtcaaggatgcatgttttagtctctatggtaaccactgaaagaatacttaaaagagtatattctttaagtgaatggagaggcagtggaatcataacaaaaacgcttcatctaacagaaagcaagaaagaagacaaagataatgaagaacaggacaaacagaaagcaactagcaagataatagatttaaaaccaaatttatttgtaatggcactaaatgtaaatggaataaatgctccgattaaaagatgaaggttgtcagataagataaaagaaagttcaattaaaagctatttcaaaagaaatatctaaaatataagaaattaaaaggagtaagaaaaagatatgccatgcaacaaaaggtgatgtccttatgtttatatgagacaataaatgcttttgtaaaaccaaaaagcattgctagtgatagggacatttcataaagatgaaagttttgatttaacagtaagatatataattataaatctgcatgtacctaatgacatctcctatatgtgaagcaaaaatctaacagaaataaaaggagaaatagaaaaatttgcaattataatagatttttaactgctatttctctcagaaaatgagagaaaaggcagacaaaaatcagaaagaatagaaaagatttaaacaatacaattaacattttatctaaatgatatatggagaacattacaacaacaaatgaataaagtcctttttcaacaacacatcgaaatatttataaaacgtggttatatactgtgacataaagtttcaaaaaacttcaaagaataataacatacaatgtatttctgacagcagtggaatataagtggaaattatagatagatgatagatagatagatagatagatagatagatagatagatagagagatagaaaactagaaaatctccctgtgcttgaaaattaagaaacacacttcttaatattccatgagaaaaaaatcagaaatcacaataaaaagaaaatattttaaactaaatggaaaagactacatataaaaatatgcagaaagaacttccaatttctggtaatgttacagttgtatcagactgacccttttgccaataacaattacgaaccttagacaaaatttgaaaaaacaattctttgaaggcaatgcagaacagctaagagcaggcagaaactgcaggagatatagctcttgaatgaagaaaatcacactgggtgatatccacatttatttggcttttctcctgaaggaattcccctagttcacaacaaagagcaaggtccatcagcaagcagctattatattagaccgtggagtgacattggtgttcaagactgccagagcagctgaaaattgaatggagagggaaagggaacaggtgggagaaacttaaaaagctggtacaaagtacactcaaatatctggctgacctctgaactatactctaaataaatcaaaagaaaaattagcattttaaagtaattgaaaatgaaaacatggcagataaaaagttgtgggatgctgataaagcaggaccttggggaagatctacagcactcaactccattagaaaagacaaaaggtctcaaatcagtggcctctgtttctagaagaaaaaaaaacccaaagtaaacagaagacacgaaatagtaactatcagaacagaaactgatgaatttaaaaacaggatcaataaaaattgattcaaccaaaaactgcctctaagaaaatcaataaactccttttaaatttattgaacatagactccaaaaatagattcacacacagatggtcaactgatttgagacaacgtgccatgataattaatccaatggagaaaagattgatttatttatttatttgagatggagtttcactcctgttgcccaagccggagtgcaatggcacgatcttggctcactgcaacctctgcctcctgggttcaagcgattctcctgcctcagcctcctgagtagctgggattacaggtgcatgccaccacgcccagctaatttatttttttgtatttttactagaaatggggtttcaccatgttggccaggctagtctccaattcctgacctcagatgatctgccctcctgagcctcccaaagtgctgggattacaggcatgagccaccacgcctggctgagaaaatattttttttcaacaaatggttctagaaaaattggacatctatatacaaaacacacacaaacacacacacacacacacacacacaagactaaaacctcaaccttctttcacatcacacacaaaaattaactcaaaatggattgtgaacctaaagacaaaatctacgactattaaatttctgcaaaaaagaaaaaacaggagaaaatctctgtgaccctggctaagcagagactttacataggacacaaaatgcacaaagatttctgctcttcaaaagtcactgtaaagaaaatgaaaagacaaagccacagactgggaaaaaaaaatataataaagggcttgaattcaaacacataaataaataataagacaaacaatccaatttttaaataggcaaaatttgaacacttaacatactaccacatacctactagaatggctaaagttaaaataggacaatatcaagtgctaacaagactacagagcaattacacctctcagtgttgctagaaggaatgtaaaatggtacatccactttggaaaatggttcagcagtttaatataaatttaaacacagacttaccatacagcccagcaatcccatgagtagatatttacctaagagaaatataaacttatgttgaactacctcacacccattaggatggctactataaaaattttaaagaaaatagaaaatagcaagtgttgacaaagatgtgggtaaactggaacacttgttccaggttgggaatgtaaaatgatgcagctgctgtggaaaacagtatggtagttccttaaaaaattaaaaatagaattaccatatgatctagcagtttctcttctgggtatatgcccaaaagaattgaaagcagagtctcaaagagatatttgtacactcatgttcataatggccttattcacaatggatgtaacccaattgtccatcagcagataaatggataagcaaaatgtagtatatacagactatagagtattatttaggcttaaaaataaagaaaaaaggaaggaattctcacatatgctacaacatgaatgcaccttgagaatattatgctaagtgaaataagccagtcataaaaagacaaatactgtatgattctacttatatgaggtacttagagtagtcaaattcatagagacagaaagtaacattgtggttgctatgaggaggaatgaagaattgttgttgttgttgtttttgttgttgtttttgagatgggagtctcgctccgttgcccaggctggagtgcagtggcatgatcttggctcactgcaacctctgcctccttggtaccagcaattctcctgactcagcctcctgagtcactgggactacagctgtgtgccaccacaccctgctaattttgtatttttagtagagacagggtttcaccatgttggctagggtgacctcaaactcctgactttgtgatccgcccgccttgacctcccaaagtgttgggattacaggtgtgagccaccacacccggccagcattattgcttaatggatatagtttcagttttaaaagatgaaaagagctgtggagatggatggtggtgatggctgcatagcattaggaatgtagttaataccactgaacaatacacttaaaatgcttaatgatcaattttacattatatgtattttaccacaaacaaatttgaaaaaaagaaacatgttgacacaaaaaacccgtacataactaaaaaatagattatattggattacataaaaatgtaaaactttggtgctacaaatgataccactaagaaagtgaaaagacaagccacataatgggaaaaaaacttttgcaaatcaagtatctgataaggggcttgtaaccagagcatataaagaactcttacaactcaataataaagacaatttaaaaatggataaaggatttgaatagacatttctccagagaaggtacacaaataggcaaaaagcacatgaaaagatgccgaacgtcagggaagtgcaaataaaatcacaagacaccactccacgctgggttactatacttaaaaaaaaaaaaatcaacaataacaagcattggtgaggatgtggagaaatcagaatcctcatacattgcagttgggaaatggaaattaccagtaggggaatgaataagtaaataacagcatatccatttgatggaattcattcgaccactgaaagcatagtgagtgaacgatctcaacggtgggctgagcaaagagatgcgtgtggcagggctatgtgctgtagatggggagttggaagaatttgccctaaggtgggctggaaggggtgggtagtgggttggggggagtgatgctctctttgatctgcaggtggtggaagtattgattcttagcctctgcctttcccccaagagatgctcaatctactatatccccagccagttcttgcaacccataccttgctgggctgggctcaaagctcccaggtggcacccaggcactgaggggtggactgttcggggatttaggcccttccagagcgccccctccacttccaggcacccccaatacacatacgattttttaaaataaatattgcaaacataggttcaacacaaaactcctaatgtgcactccactcccaaaatagattgagaactcctataaattccagcgttggcactctgggggcaactgagcccttctgtgcgctatgtcacctccccaaaggtcagggagagcagtcacaaaaggacagctctagccccagaacttcagttcattaggcaaagcctgaggttccggggcatggggaggagagaagggatcagctgaggagccaggaaacctgggttctgagcctggttcggaccctcagcaagttatttcttctctctgcgcctccgtttcctcttctgtaaaatggggcatgggcaaggcctggcaggggcggggctcgaacccgcggaaggcgacggcggctccggcccctcccggggcgggcggtcacgtgcgcgatcacgcggtcctacccggaagcgcgcccgggctcctgcaggcggggcgctgtgcgcgccgcgatccggtacgtgggcctccgggctgtcccctctgggggcggcgatcctccctccggagccccccttcaaccctcccggaagtgaggtagggtccctaggggtcccggagcggrcccactcctagcctcacccactccgggcgtgtggccgtgggccggtcgcttcctcgctcggggccaaagttcctcagccgtgaagaggggtggatgtcacaagtcaagcctccttcccagggtggccgtgaggttcgggggtggggggaggtggggatttggggtkaaactggacagaaactggcgtgctrggcaaacgggagccccgcggcggcgaactgctgactcgctctctccagagactcaggggcagggccgggctccgaaggtgtgggaccccagaaggagctgctgaagacgggaccaagggccacagggaggtttgctggggtccagatggtgaaagtgggcgctgggggtcgccccaggttggccccccgccatctggagctcctttcgtcagtgagtcccctccgagttccctttctagggcaagatagcgaggtgaagcggaagtctcagtgtgacaccggcgaggttctcttcccagcagcctttgggaagcatccccctgtttcgggaatatggcattcgggccaatcatgtgggtgatggagcccgtctcagggttcggctgctaaaggccgaactcgtaacagcagtctctgtggcgggtagtcacttgcctcttactggctcacagtgcttgacttcctaattaagttttctgttgttcctgccctctattcaaatatgaatgattccggaaccagattgattaatcctgttatttgaagaagggaagctgggaaataggaataatgatccccacacctatgtaagaacgcagtttgctaaggttactttgcagcttgcctggtcactcccatgatctaaccctgtagggaggtagagtaggggatgttgctctgtttctccgcaggagtttgaggctcagagaggtttatgggacttggcaaagccaaaactagaacctggtcccagatgcctttcctgttagtttccttccattcatcgtatcatcccaggatccccactcccttcaccgggactgcatcctcaccacctgggatgtgctatgctgtctcccgtcagtcactcctagcaagctccctggggctgcttggggagctctgagtgacccgcagaagtgagagcacttcatgggaacaaaggaggaaggaacaaaagtgggcacctgctctgtgcaaagggctgtgctggccgggttcctattctccattatgggaggtgaggggcaggatcccagatatgttcttagcagactgcctcagggcctggagagaccagggaccacgcagcccttctccagcttgtcctttctcaacgggcagcagtcaagaccagggcatctgcctgccctcatattctctctgttttaagyatttgcaggaccagggatgctgtgctgctctcccatgagccagtcaccgagtcggtctgctgmagccctttctgaacctctggccgtctggatgctccactgtgcttgccaaggtagatgatcttgccccacctggggaggacagggaggcaggcagcatccaccctggggctttgggaggcagatggaatgaggtaggcagtggactgagtgctactgggctctgcacacctgctcatcccctccccagccctgcatcctgaggccacccccatcctgatgcctcatctctccttcacccctcgaatccaggcaggtcatcacagcctgctgcatctttaaagctcctcccagcccccaccaaggggtgagcactcattacctgacacccgcacctagatgaccgccttcatgaccttgacctgcccatctccagccagccrgtcacttctccgctcacaaccacagcctccattccatagcccactgctccctaacccatacactctggtcagctttgtcacatgtacctgggagtcccagagcagcctcttcaggtccacccgcctctcccagcaacctccttttcacacctgttgcactctcagtgtctgccttggcattgagtaattctgtgggaataggctgcattccttcttcactgtgctgttatgtctcctggcatttgccataaataccttgggaccagttgcaccaagttagtttgggaggaattcagtaaggaccactaagctggacatggggatgacggaacacaagacctggagatgctgtgatcctcccaagaaaactggaaatccacttgtgtgagagttacagcagagcttcctaatcattgtcatggcttagcgcacataccacatgattatatctgcgtgacaccctgaggcacataagaggatttgaaaccactgcctgaggcctcttagctgcagcagccagcctggagcactgtcctcaccagcctggtcaggctgccccaagttttagaagatcgagggtttgccgcacgcagagggccatggcacacagtgtgggaagctgtattaaagatcttccagtgggtgaatagttaagacatttcttacataatcaagcacagagtgtgtggtgtgtgtgtgtgtggcgggggggtggggaaggagatttgggagggctgaagacactggtggctgtggccctagaagctgcagcctactaggtacaggggctttaggcagcctctgttctcaccatgaacagggagagcagcatttgaatgaaacttctgtggtgctgaagtaaattcaggggctttgaggctcatcttctggagctgttttttgtttgtttgtttgtttgtttgtttgtttgttttttcagacagagtctcgctctgtcacccaggctggagtgcagtggtgtaatctcggctcactgcaacctctgcctcccgggttcaagcaattctcctgcctcagcagttatcccgagtagctgggataacaggcacttgccaccatgcctggctaatttttgtatttttagtagagacggggtttcaccatgttggccaggctggtctcgaactcctgacttcaggtgatccaccccccttggcctcccaaagtgctgggattacaggcgtgagccaccgygcccagccctggaactgtttttatctgagggagagatatctctggactgcccagagatggaggtgcaccagtgccctcygatccacaccaggcactaactggctgccgtgagcatggcctccctgggcattcggctccatgtctaggccaagacctsggtcccttcctgtgccagtctggttccagtaggccccgtggtgggtctgttgctgtgctgagagggaccagataccacagaggaaagggccccagccttggcatcaaacaggtctgggtccagatcccagctttgccacttcaggctgtgcctgtgtcctgctctctaaaatgggggtacctgaagagttctactttgtccagttgtgagggtgcaacaaaaatggaagtcccttgtgatgcctggtgtgcagaaggggctcactgaatgtttgctgaggttggggtcctcttcgttactcagactgagctcatagatgttggggctggaggctgaccttgaccttgcctttccctggcagatgaagtgcgtcttggtggccactgasggcgcagaggtcctcttctactggacagatcaggagtttgaagagagtctccggctgaagttcgggcagtcagagaatgaggaagaagaggtgagtgcagggtaggcagtcccaggaggggtggataggaaggaaccatacaaaactcccagcaggcagagaggcaggaaaacctgtgttcaccctgtcctgggcagcatgagcagggtgctgggtggggtccagcatccttcacacctagacccttatcctcaaggttggcctcttgatgctctgagctcggtgaccccacccccacaccccaccagtcctctctggactaaatgagggcaagaagaagtcgaattttatcacgtaacagaagaacttggagccatcagtttctgtaacctaaaaagtttaacaaggctgggcgcggtggctcacgcctgtaatcacaacactttgggaagccaaggtgggccagttgcttgagctcagggatttgagaccagcctgggcagcatggcgaaaccctgtctctacaaaaaaaatacaaaaattagccaggtgtggtggtgcgtgcctatagtcccagctacttgggaggttgaggtgggaggatcacttgagtccaggtggtagaggctgcagtgagccgagactgtgcccatgcattccaacctgggcgacagagcaaaaaaaaaaaaaaaaagtttaacgtaagctgaacacgttaattttttaatagctgtattaaggtatgattaacataccataaattgcacatatttaaagtgcataatttgataagctttgatatgtatatacctatgattctatcacaatcaataaaaggaatatatctaccacctcaaacatttgtaatcccttctttcccatccccatcgcataggaactgctgatctgctttctgtcatgatagattagtttgtatcatatggccttatataaatggagtcatacagtatgtgcttggatttagtttggttttggtttgactgctttcactcagcataattattttgtgattcatctgtgttgtggcatgtatcaatcrttcattccttgtcattgagtagtaatctattgtatcaggatgccaccatttgttcattcatttacttgttgatggacatctgtgttattttcagtttttgactawtacaaataaagcaactatgaacatgcaygtacaagtctatgtatacatggatgctttcatgtccaaggacagatacttaggatagactggctaggtcatgtaggtgtatgtgtaactttttaataaactgccaaacttttccaaagtggttgtgtaatttttgattccacctgtagtgtttgagagttcagttcctccatatcctcaccaacactatagtccgtctttttaattttagccattctaatagatgttcactagaatctcactgtgttttaaatttcatttccttaatgactaatgcttttgagcatcttttcatgtgcttatttgccatatcttttgcccagtttttatttgagttgattgtttcttcttcttattcttactgagttttgagagcttctaatatattttggatggaatcctttatcagatacatgttttacaaatattttctttcagtttgtggcttgtgtttgtattctcaatggtatctttcaaagagcagaagtattagaactcgagtttatccattttgcatttatggattatgcttttagtgttatatctaagaaatctttgcccaacttacaaagagttttctctacatattmttttgaaagttttatagttttaggttttatatcaggtctgatgatctactttgaatttttgtgtgtggtatgagctatggattgaagataattttttttttgcatgtggacatccagttcaacagtttaacattacaactcagaaatacttgtcattttcacttacataatttccactctacattttaaaggagtaatttattttgaaaatgttttccagattaattttgggttaaaaatatttttactggggatgcagtggaaggtgttcttacatttctgcagcatgggctgattgcctctctgtccctttctgctctaaggggtctcatcatccagccaatgagtgagctgactccacctcagggagtccatttaccatcaacatcacycgtgttctcatcacagtctttaggcaaacacaagatatcagagatcatagacattcaagtggttttatttaagctaactgttaggcttttttattttttaacagtcaatacatataatatttaaattaagaatttttaaatatttcagtttttaaactactgttacaactatgtcaacttaagaagcaaactatttggtggcctttctcttcctctttattgaaaacctggcaaaggaacgaactcctgaattttcagttcctaaaaatgagtagtgtaaaggaaaggtggtctttaaagttttttttttttgttaatgtgcaacacattcttttctcatcatataaataatgagttaattgtaggaaatttggaaatacaaagagatagtttttaaatgacctataattccatgacccagagctattagctttttaatatactttctttgggtctttattttttctatataattgggattataccacatttacagttttactgcctgtttttttttccacttgccattatatcaagatatttcttctatttttttaaatagtctcagaagcataattcttaatggaaacattgtactccagtacatgaatcagtgtatcatcctttatttaaccattttcctcatayggacatawatattgctcctaatttgctatatcactcttgctttaagaaacatttgtgcttaaattttatctcatgtcagataaaktcctaggataaatttaggataaattcctaaaaataaaaatgttgagtcaaaagccattcaaagatattgtactactttataattccgccaagtaatatatgagtatgctcctttatatacaccaaatatttttatctcccctgtattagtccattttcttaccactataaagaaatgcccaagactgggtactctgtaaaggaaagaagtttaattgactcacagttcagaaggctgtggaggcctcaggaaacttacaatcatgtcaaaaggcaaaggggaagcaagacaccttcttcacaaggcagcaggaaggagaagtgctgagtgaaggggaaagagcctcttataaaaccattagatctcatgagaactcactgtcacaagaacagcatgggggaaactgctcccatgattcaattacctccacctggtttctccrttgacatatgaggattgtggggattatggggattacaattcaagatgagatttggatggggacacaaagcctaatcatatcattctgccccaggaccctcccaaatctcatgtcccttttacatttcaaaaccaatcatgccttcccaacagttccccaaagtcataattcattycagcattaaccaaaaagtccaagactgaagtctcacctgagacaaggcaagtcccttccacctatgaccctgtaaaataaaaaacaagttacttccaagacacaatgggggtataggcattgggtaaatgttcccattccaaatgggagaaattggaactatggggctacaggacccatgcaagtccaaaatccagtggggcagtcaaatcttaaagctttgaaatgatctcctttgactctatccacgtccaggtcacactgatacaagaggtgggctcccaaggccttgggcagccctacccctgtgcttctgyagggcacagtcctcttcccagctgttttcacaggctggtgttgagtgtctgcggcttttccaggtgcatggtgcaagctgtcggtggatctaccattstgggggctagaggatgatggccctattcttacagctccactaggcaatgccccagtggggactctgtgtggaggtgtctgaccccacattcccttaatcactctagcagaggttctccatgagggctctgcccctgtagcaaatttctgcctggacatcctgccatttccatacatcctctgaaatctaggtggaggttcccaaacctcagtttttgatttatgtgcacccgtgggcccaataccacatgtaggtcaccaaagcttggggcttgcactgtctgaaacaacagccagagctatatgttggcaccttttagccatggctaggacgcagggcaccatgtccccagagtgcacaaagcagcaaggccctgggcccaacccctgaaacagttttttcttcctaggcctccaggcctgtggcgagagggcctgctgtgaagacctctgacaggccctggagacatttttcccattgtcttggtgattaacgtttggctcttcattatttatgcaaatttctgcagccagggcttgaatttctcctcagaaaatgggcttttcttttctattgcatcatcaggctgcacattttccaaacttttatgttctgcttcccttttaaacataagtcccaattccaaaccatctattagtgaatgcataaaactgagtgctttttagagcacccaagtcactccctgaatgctttgctacctagaaatttcttccaccccaaatcatctctctcaagttcaaagttgcacagatctctagggcaggggcaaaatgctgccggtctctttgctaaagcataacaagagtcacctttgttccagttccaaataagttcctcatctccatctgagactacctcagcctggacttcattgtccatatcactatcagaattttgttcaaaagcattcaatgagtctctgggaagttccaaactttcccacatcttcctgttttcttctgagccctscatactgttccaacctctgcctgttacccagtttcaaagtcactttcacatttttgggtatctttatagtagcacctcactctcygtggtaccaatttactgtgtcagtccgttttcgtaccactataaagaactgcctgagactgggtaatttataaagaaaaaaggtttaattgactcacagttcagcatggctggggagaactcaggaaacttacagtcgtggtggaaggcaaaggggaaacaaggcaccttcttcgcaaggcagcaggaagaagtgtcaagaaaagtggggaagagccccttataaaaccatcagatctggtgaggactcactcattttcatgagaacaagttgagaacagcctgggggaaccacccccatgattcagttatctccaccaggtctcccttgacacgtggggattatggggattacaagtcaagatgagatttgatggggacacaaagcttaaccatgtcatcccctcaccaaaaaaaagttctattcctgcagaaaaagctatagtcatgccctgcttaatgatggtgatacattctgttaataacaaactcatcattaggtgatttccttgtcatgtgaacatcayagtgtgtgcttacacaaacctagatggtgtagccaactacacacctaggctgtacagtatggcctgttgctcctaggctgcaaacctacagcatgtgactgtactgaatactgcaggcagttgtaacacaatggaaatgtttgtgtatctgaatgaacatagagaaggtatagcaaaaataaagcagtataatcttatggggccactatcatgcgtggtctgttgctgaccaaaacattgctcttcagtatgtgactatactgcttttacgatgagtttctatcaacatctagattcataagtgacttctctattaataaaatttgttcaagaaaatcatggtatatgaataattcagcaaatatttgaattcttgcctgtttatggaattctcgcctatctgtggggtattcattaaccaaatattaattgggaacctaccatgtgccagtctctcggggtaaagcagtaaacgtagcaacatgatccttgctttcatggaacttagagtctaaagaaggacattgtacagtgaaccagatggcaaataagtaccatgagttcagatagtgacaaatagtctggagaagttaaatggggtatgggatggggagtgacagaggtggagggcggtagcctgaggtggccagaaaaaaaaaaatctgagctggaaccagaatgataagtaggagccaytgtgaaagctggacagactaactgtgggagctgggtacagtccttggttcccgaatgttggcaggaaaacctactccatagtgctgtgtcccacttgtacttcaatgctgcaccttcccgctggccagttgcctgtctttcttttcaaggcaaggtcttactcagcttcttgtagacttccccagctccaagttaggactgtgccttccccatatttcattcacgtctcctgaaatcttcttgggaagtctgctgttttcttcctttctttttattccactacrgagaatttgagttgtaactgttccactggctttatcccattttattcacacatttgcaacaaacttgtccagttcctttttgtttttgtttatttgttttgttccttcttttggagagctgagagaatggatggaggaagagcttatcaaagtcaatgcaggcttgttatggaaaataggaaaagtacagaaacatacttaaaaatagagggaaaaaaatcactcctaattcctctatccagaagtaactttaatagtgttggctttctcagtattttatcaatacttcgttttttctatgcattcacattcttgttttatttttagctacaacattgtatcagaggaattttccatgtcattgaaacactctaatattttaagtggctatagacccttccataattttgatgtgctgctatttatttaacwatttccctgatactagatgttaayattttttttccagttgtttgctrttataaattakgcagtagtgaacatctttgtgcatgtatctttgtcccaatctctgatcattttccttaggacaaattttccaaagkagacttattgcaaaaaacagcatagactttggtacatgctacaaacttccttccagctccccgttcagtgctccccacattccactgttgtaatgaggcccaattccttaatgtttccttctagattcagagcctaaacagcaccattacccagctggccctccccattcttcctaaccaccacccgaagtgttggggacagtctctttttgctcccctccctaccaggacagtgataccctcccaggagggtctaacactatggaacccttgatatcaaggcctgatcttgtcccttccttwgttcttggtgtctggcccactctaagctgtgaaattttcccccatttttgcagctccctgccctggaggaccagctcagcaccctcctagccccggtcatcatctcctccatgacgatgctggagaagctctcggacacctacacctgcttctccacggaaaatggcaacttcctgtatgtccttcacctggtgagtctatagctctggggcccatgttcctcttccctcagcttgatggggagtccacaggcctctcttatttggaactttagactcctttagaaggcagaaacggcatcttatcaaacccgcctgggacccgagcctcccctggcttgtctgcagagaccagggcaggtgaagggagtgcccttggggctggctgacactggcctgcctgtgcctgcagtttggagaatgcctgttcattgccatcaatggtgaccacaccgasagcgagggggacctgcggcggaagctgtatgtgctcaagtacctgtttgaagtgcactttgggctggtgactgtggacggtcatcttatcygaaaggagtgagtcttcaaagctggtcccctctgtcctttgccgagcaccctcgctgggccaggcagcgtgtgcccagcccctgtgaagctgccatttttcacatactgcccccagctgggtccctrggtcagagaaacagctcaagtgaaccttggagaccatctggtctgaccctctgactttatatctggtgaaacagagcagrgaatggaactcacttgcctggggtcatctagctggttggtggccacatccaaactggatatttgagctcaggactctcagtccagtgctmtttccatcctcccaacatcatcrcccgtcattacaaatctggtctgagctagtcctctctggcttctcaagcttcagactctctctccagaaaaacacaaacccatgcacattcatacagtctcgtgaaggttttctcaggagacagaccttaaaacctgtctctgggcccacagtaaagaacttggggaaagagaatcatggttcagagtatacactgaggtgggagggaccccagaaaaggcttgtagttgaaaygtagacctagaaaagagaagttcgtagtatcaccaccccctgattctctaagatggattgggaagctgcggagtgtgaagctctgggactttagttttgtggcgatatgagcaactacccatattgaggcatttctcaaatgcacaaacattgtttcatgagtcattttagcccagataggtcatggtgtcagtggcaaatgctgcaggtggcagatgcctgttacatgaatcacagtggccagtgcagacgttgccagcatccgagatggctgcgaccctgagtagggccctgatgatggaccagatctttctgtgttcagtggcctctgtgtgagaagcttaagcatcaccctggctctctctagctggctttgtatgacatgtgtttgtgtgacagaggctgaggagtgaggtgatttgctcagctgcctgccttcckgctccgtgcctatcccaccccactccacagttagagctcggccggaaacctggccccctttcccagctgtgtgggcaggtcayatgggctcaccaagctctgatgctgagctgagactgtggtcctttggttgggtgtgggggagaccagctttcttrtgatctctcccgccctctctggctctgcccccaggctgcggcccccagacctggcgcagcgtgtccagctgtgggagcacttccagagcctgctgtggacctacagccgcctgcgggagcaggagcagtgcttcgccgtggaggtgactactgggcgcgggagtcctcaggacttgaagctgtcaggtcagagggggcgtccasctttaagaccatgttttaaccctaatgaatgaaggcacaagcagcccctgaaactcgtgtattcagagagagttgttctttctggccatatggagggttgggtaccctgatgggctttcccrtggtaaaacagctcgatcctggataacacakacttttaatgyaatttttgggttcactgtaaattacagraatctttgaagacagttccttcaaccctcccctccttttcccacaaaattatattgagctggaactggaggggaaagcagtggagaaaaacacagcgctaaaggcaagattccctgagtgcaaatgataccagcactacagccagtaaatagccttaggccagcagcagcataggagagctgagcctgcaactctaggttaagcccagccccaaaaagttaaagtggctactggtccttttataaagccctagtaaataaaaaactaaaaaattaaaaataaaaactaaagtggctgctggtcagtagcactccttgccttcctaaagaggtaaaccaaattctctttcaagcagtggttttcatactccagtgtgtgtcagaatcctctgtagggcttgttaaatacaggttactgggcctcactttcagcwtttctcatttagcgagtctgggatgggggctctagaacttgcatttctttttttttttttttttttgagatggagtctcgctctgttgcccaggctggagtgcagtggagcaatcttggctcactgtgacctctgcttcccgggttcaagcrattctcctgcctcagcctcctgagtagctgggattacaggcacrtgccaccacgcctggctaatttttgtatttttagtagagacggggtttcactatgttggtcaggctggtctcgaactcctgacctcatgatctgcccactyggcctcccaaagtgctgggattacaggcatgagccacagtgcccggccctagaacttccatttctaaaaaattcccaggtgctgtttattgtgcttgtccaggaaccacactttgaaaaccactgctagagcaggaaaggtaaagatcaaacaaacgtgaactcacaactgaagaaaatcagatatggaagaaaataagccaccaygagtgagagtcaggaaaatcaatcaccaacagatttagatcccaaggcacttgatacattggaactattaggtatagaatataaaataactatgaaatatttaaaaatatgaaatgtagaatcacaaaatgagataagaagaaactctaaattgaccaggcaaatttgaaaaagaacacrtacagatattttagaaaagaaaacatagttgttaaaatgaaaaactcaagggatgtgttaaatagcagatgagacatagctagagggagaattaatgagctggaaaatagatctgaaggaattcattctcatacccccactcattcactcttccaataaacatatagtacctattatatgctaagaggtgtgccaggccatgggaataaagagatgaataaagacatattcactgcccttgaggggaaatcagccatgtatatactaaaagatataataaagaatcctggtgccatattaggtttttcatcaaaagctatggtggcacaagagatggagtggtaaactctttctgggacattaggaaagacttcttttaggaggtgacctaatgccattagyataaaatccaaactcttcccaagcctaccaggccctgtgtgatctatcgctgcctatttcactctagcttcatcttatgcctctcttgtccacrcttactgagtgctagtcacatgaaacttctttaagtttcaggaaaactctatatttagatctgtccaatatgatagtcattagctgcatgtggctgttgaacatttgaaatataactagtgcaaattgagttatgctatgcatgtgaaatatataccagattttggtaacttagcacaaaaaagaatgtaaaacattccattaataaggcttttatatcatatggtgataatattttggatatattcagtaaaatgaaatatatcattaaaattaatgtcaactgtttctttttacttttttaatgtggtcactggaaacatttaaattatgcatagggcctttcttttatttctgttggacagcaccattgcaaactctstccccatctcatggcctctgaatatgcagtctccttgacttgcagtgttctctctctccctctttctctggtgggccatctggttgtttagatattagtttaaaggtgacctaattcagggacatttctttggacaccctacccaaggaggtctctgctatttctctctagcctagtgctgtgtattttgtacttggtgcttacttacaaatggcacttactttatttccttgtgtattgccttgcctcatccactggagtctagtgaccagacagtaagcctcaggaaggctgggacctggtgggtcttagtccccctgtttccaagtatctggtgcagagtccaagctcactgtggacagagtgaatgtccccactagcccagggcttggagtggggcaaggttgttggtgatatggcttcctctcccttcctgccctggctaggccctggagcgactgattcacccccagctctgtgagctgtgcatagaggygctggagcggcacgtcatccaggctgtcaacaccagccccgagcggggaggcgaggaggccctgcatgccttcctgctygtgcactccaagctgctggcattctactctaggtgagctcaaggtctggcatgtggtggctaaaggctccctggccttctcactcccctatggcctctgcctgaaaagcaccacctgcccagccaagaatcacctcctccatgaagcctgaaaccttcccagatttgattctccaacctttttcagctcacccatttctctgtatcattccttcctggaacactgtcttagagtctcaatctagaacttccttttatgttgttcttggtccctggtgctttcccactgctaaatcattttcttttctttgttctatacaaccaagttttattttgaaatttgacgagttaattaattgtatttgtgccttgcccatctccagaagtacattgctccttgagggcaggggccaggctccacactcctttaacctgcctgccccgtctcctgctgggcatgtgctgatgggtggccatgctcctgtgtctgcagccacagtgccagctccctgcgcccggccgacctgcttgccctcatccycctggttcaggacctctaccccagcragagcacagcagaggacgacattcaggtctcagggcagctttctgggcagagggaggccattagggaggtagttcagaaaacctgcctgragatggtgggcaggctccccctggggactccatgttttctaagtcacaattctgggtgtgtggttgggcgtgacttctttcccactgctttcagatgtaaggggaattctggagtgcacatggtccagtgggttaaaagtgcagatttttcaagtcagccatggttcgaaacccagcttcaacacctggctgtgtgagctgagcccgtacttgcacccccagagcctcagtgcccttatctgtgcaatgggaataacaaagcatctacttctcaggggtatttggagggacaaaaggggtggttcccacagaacctggcactgcctggggcatagtgaatgcttagtgagtgtcagccaccaccatcgctgttgacctcatcaccaggggtagtggtgggttggataccattgtgttggaatttctcgaatttccacagaacagaccgcctagaatcgaatccctgggaagtctgaggaccacacacccaggactgcacccggaacgggtggaggggtggaggggtggaggcttctctgtgaagcgctgggaggcagaaggggtggagggagccaggtcagataggagctaaccagcctctcccctgccctgcacagccttccccgcggagggcccggagcagccagaacatccccgtgcagcaggcctggagccctcactccacgggcccaactkgggggagctctgcagagacggtgtgtgctgtgcacttcgtggagtcaggggcaggaggggatcggcctctgcaggcgaccaggcctttcccatccctcctgggagagcagggacagggttgagccagctgggagagcctctcaacctgagccaccttctccattccaggagacagacagcttctccctccctgaggagtacttcacaccagctccttcccctggcgatcagagctcaggtgaggaccggaggaaagcaggaggaaacaatagctagctgcgagcgacaggcagcccaggacatctgtcttaggctycagtggaccyccgtgcctcctaaggcttgagtgcaggtacccgtgttcctagagcacaggacgctgtctgcggctccccatcttccctgccagctccagcctgaactcaaggaytgttaagaccactccactgatccctaaagctgttgatgacaagttgattcatttaaaacttstgtacatgcattctcagactcatcttttttgtaattaaaattaaaaattaagttaaatttagtaataatcatctaatttctatacattctaaaatatattcagcatctgtagtttatactttgtttctccaaagtatgtgggtaaacaataaaaaaaaactatraatattcaaaatggttgaggtgtggtggctcacgcctgtaatcccagcactttgggaggccgaggcgggtagatcacctgaggtcaggagtttgagactagcctggccaacatggcgaaaccccatgtctactaaaaatacaaaaattagccaggtctggtggcaggcgcctgtaatcccagctactcgggaggctgaggcaggagaatcgcttgaacccgggaggtggaggttgcagtgagccaagatcatgccactgcactccagcctgggcgacagagcaagactctgtctcaaaaaaaaaaacaaaacaaaactacaaatattcaaaatgttaacaaaaaatggacaaccttgcttagagaagtagataaaccaaaatccagactgttgtggtcactatgaataaacattacatttatttytgaagttcttaggtaaaaaaaaaaaaaaaaaagggtcctgtggtccctccacatcatctgatggaagaaagaaggccagggtttcaggaggagaaacctactggggactaggatttgaaaggaatttattatgtggctgcttttaacccaaccctggcacattggaatcaccaggcagcttcagccagcccaattaagttacagtctgtgggcctgggwcccaggtgtgaatacttctaggaaattttcccaggtgagttsagtgtgcctcgggtgcaaaccactgctgtgcacagatttaggttacagcatgctttgccccctggctgcatattgaactcacctggggatctttaacaattattgaagctgagcctgtayccggagatgctgactcagttggtctgagctatgccctgggcgtcaggattttgtaaaagtccccaaatgattttcgtgtgtagccaaggttgacaaccactgggttagatgcttttaactttaggtctggctagaagcctaggaccccctgagactgtgtgtgaactcactgatgcctgtgcattcctggggtgagggttcctagctatcttcagattccctgagctcttgatgagcctgagacctgttgagaagcagagttctgggtaatctccgaagttcctcttaccactcccttcctcattcatcaccatcttcctcccagtccctctctcttgatagtggttttttatgccttaaaactgtaaaaaataatgctgttccaccgtgcagagaactcacaacttacaaatggtttgggttgcactcatccatttgtaaatcaggtgtttaagatgtaggaacacacttcccccaaagaaacatgattataaatgagggttgtttgcaatgaaatataagaggtaacagtattattacagacacataatatttcagatatgtggtgggttcagtaggtttttgtgcgttatattaggaaggaaatccacctcaattcccagcacacagcaggtgctcagtaagagcttgcyggttgaataaatgaatgggcaaacgtggactgtgtgtgctgactcctgaggggcgggttgaggcctgaaggaatacaggggacagaacaaggaggggattgggggcaagggaggggggaggaagatgcccctctaccccctgaccaccattaccaaacatgtcctcaggagcttgattctcagcagctggctctgggggcagcttctctgccaggcccaggccgccttagccctggtactgcagagttcaccttgtgcctgccaacttaggatgaaggggtgttgccccagccacattagcacccctgcgtggagctggcagccaagggctgaggttgtggggggcacctgggccccctaccccatgctgttgagccattgcttacatctcatggtacttacatcgttatgttattacctgtggcctgcaggtagcaccatctggctggaggggggcaccccccccatggatgcccttcaggtgagtttctccygtgcctgcctgggcgccagctgatctgagatgccgcagtgagtaytgggggctctgagggtttygcctccagggtgactctacccgtgccagccctcctcctgcccaccccagggctggtcagtgcaggtgcctgtcctggtgccagagctcagcccagaggcagggtccaggaatgggctgtgaggggtggcgaacttgcccctcccctcccccaggtgctgtccctcagctccattgttcttgggagtgaaagtccaatagaattttttttttaagtgagcatgtatatttattgtagaaaaatcgggaaatacaaaagtaaactataaaaaagggaataaaaattactcttaatyccgtcctcaaaatgagattaacatcttggggtgtttccttctagtctttttttcctatgactttacacacacacacacacacacacacacacacacactacatatgtacacatgtgtatttttaaaatcagatttggatactaacgtgtttcattatacttttttatttaaacatttttccatttcctaagcactcccacagtgtggtttgtaatgattggkagtccatcacatgcatatgttatttatctagcaaatccccaggaaaatcgcgtcatgtgtccagtgtttgctgttaggtatgacactgaagaggaatttttgtggcatctctcatgatttccttaattctataattttttgcactaaaggctttcttgcttagatccctctgtaaggctggagccttgcccatttggtcactttatgcctcagtttccccaatttgagtggctgttgggatgttctgagggtgattgaaatgatacaatgttgaacattagatacctccatctgttgcaaatgtggggaggggacctctccccgtccactccccatccacgagtgtttccctgccttctcggtcctctgtgccaccacccagcccctctgcccctgcccactgccctgcttggcacccgggccagactctgggcagaaaggcccaggagcagctgagggagaggggcaacagcgaaactggagctgcgagggcaggttcagcagagtgcaggaatttaaaaactggagtttcttggagctaaaaatgattatttcttgtggttcacagatagggccgcaatgggtgggtccaacttagggatcccacctctcactgcagctcttcttcctctgtagatagcagaggacaccctccaaacactggttccccactgccctgtgccttccggccccagaaggatcttcctggatgccaacgtgaaggaaagctactgccccctagtgccccacaccatgtactgcctgcccctgtggcagggcatcaacctggtgctcctgaccagggtaggagagcccctcaccctgccctgatgatgcttagggttggcacgtcttccccaggggcagccccgttcacccgcctctcggcccttaccctcagagccccagcgcgcccctggccctggttctgtcccagctgatggatggcttctccatgctggagaagaagctgaaggaagggccggagcccggggcctccctgcgctcccagcccctcgtgggagacctgcgccagaggatggacaagtttgtcaagaatcgaggggcacaggagattcaggtgagacccaagttccagtcctccccacctggggaagaggcagggctggcagcagggtacatccggtccacagcagctgaggggccartgggcctgggttcctgtccgggctccacctcccccgggcctacgatccttgttttccctattatgaaatgatattgaaaacttagctgctttttggttttcagaatctttttatgtgtgtttggcagaatacgaattataattccccttttttaggtgtggaaactaaggcttagacaagttwtaacttggccaagattatgcagctcatgagcagtggagccagagcccggatgcagtgagcaagtgcagtcgggatccgcccgtcacgggcttcctctctgcagcggggctgtgtccccgggctcacagggcaacacagggatgtgcaggtcacggctccaccccacccccagtgagcttagggcccaggtggggagctgagaccaggagacaggtgagaatgtgcaggcagtagaaacagtccatcaccccgtgctctgacaaagcccagatcagggcctggacggcagtggggctggtggggcttgactctggatttaagcagtggaggcgcctggtgtttgaggagctgggacccattgtggctggagtgcctgtcagtctgaaggctgcaggattggctggaggaggcagtgccacatcccgcagtgcctcagggtgtcctaaggagcactttcactagaacaccaagttcttctgctttatagagatcccgtgaggccgccccctgcatggctaccccatgcccaccccataccctcccagcttctgcagcagcacctcctccgcacaccccagccgctgccctgtgtgtgccccccaccccgaggggctggcctggttgctgtgacggtgctactatgtgtgcctgtgcccgtcagacagcgagcccctggaaactgccctttaaataaacgctgctgagtgactagaacatggcacactgaagtctgcagggggctggtggggcctgccagggtagcctgcattggccagaagggcagatttgtctgggggccctgtgccctctcagagcctgatctgagaaggactttggcctggacctcactggaaatatggtcgggatgcaaacctgccccctgtcttccttccagagcacctggctggagtttaaggccaaggctttctccaaaagtgagcccggatcctcctgggagtgagtsktgggcctcaggacaaggggtgggtcgtgtgcccaggggactgttccctgggaggccacatctcctccaccactgcccttcatttatcagcaaaataatttcaagaaaggagatttcttcccacatacgtggagcaccgcgtggagaagctgggaagctccttcccattgcctgatcagctgtggctgcccccttaggtctttccatctgtctgtcctgggtgcaggagcagggtggtccacctgggagtgaggggctccccaggttggtctgtcctgggtacaagagyggggtggtccacaagggggaagggctccccaggtctgtctgtcctgggtgcaggaacaaggtggtccacacagggcgaggggctcccctaggtcccttctgctgtaatgccctcctctctcgtgctcaggctgctccaggcatgtgggaagctgaagcggcagctctgcgccatctaccggctgaactttctgaccacagcccscagcaggggaggcccacacctgccccagcacctgcaggaccaagtgcagaggctcatgcggtaagtgcagtgcggccccctgggtggccagggcagggtctggggcccgtacttccttcacgcagcccgagcttccctcggcagggagaagctgacggactggaaggacttcttgctggtgaagagcaggaggaacatcaccatggtgtcatatcctgacgccggggccccagccagcccaacaagcctcttggatctgctgcctctacacctgctccctggagggactatgggccccagggaagggggatatatgttccaccccatcagctgctcaccacctctctgaaggaaaataatgggacatagtggcccatgtgccttgtctataggaatacttcaagctgaaatttcaggaattcctcctgtcccaaagttaattcacaaaagccataaagaccctttatgtcagtgttgcccagctggcaaaatggtagtaggtattccacgaggggtggggaccggggggggggttcctgtggtctagtttggttgaaagggccgttgtccttcttagatcatgacagtgcacagtggcatgtaaaagctctagaaggcctacggcaaatgtttatccctgtttcagaagccattcctaagactatttgacccttttattatggaacactaattttatcgaatactgattttccatgaaaattcatgtaaagcagcttttcccatatcatctctgaaatgtccagcccccagtctcctgaggcaggtcctcagtgggcaggtgaaaggatgccagagggcctctttagccaccagctgctgcccttctatggatgtctcttcccctcccaaatgggagccttccaaactctcatgatgaagtgtaagggtttagcaagatcacagtgaggtgcataggctgggcagtcagctaggctcactcatgaaccaagtggctgtgctcacactccagcctcacgtgtgtctgacttaaattcatccctcatgaaaatgatgcataccatgttcctgtagggccagaactgcccgtgtcaaatgtgcaagtgttgaggatcttacagcttttcaaggcctggggagcttggaggtagtgggggatctgaggaagcaaggatacagggggcttarctgaaatggaagctgctggaaagaggcagtcctggccctcctgccaccatgactgggcacagctagaagcccaggacagaggcaggccgtccctagctcctggcttgtaagcaccttractcagaccttcacctacctagaagacttcccaggcttggtgcacttcatctatgtggaccgcaccactgggcagatggtggcgccttccctcaactgcagtcaaaagacctcgtcggagttgggcaaggggccgctggctgcctttgtcaaaactaaggtaaccatttggacccagggcggggatgggtgggcctcagccaatattgggtagcccttcctggtgtgatccacatgcctggggctagcagagtgcgctgggcagcaggcccaaggaggcagtggccagtgccggcataaataaatgctcgacaagtatttgttgaatgagctagaatggagagaacggcaaggtccatcagttgggcatcagaatttaaaacaaggtgatttctgttaaggaagcattccctggaaattcttttattctccttatttaactgactgtttttcatgacaaagttgtatttttgatagggggaggacccctgccactctccaaaaaaactatacgtgtgtgtgtgtgtgtgtgtgtgtgtgtgtgtgtgtctgtgtgtgtgtgttcttttctttctttgttttggtgggggaggcaagtaaagtgtattctaatgtttaaaacaagatgggaagatgggtggtggaggcatgtgttggaagcccagccccgtctcccaccagttatgtggctttgggcagtacttagcccaagggtcagtttcctcatctgtagaaggaaataatagtgctatttacatcacagagttatgaagagtacatgagaggatacgtatcaaatatttagcatagcacgtagcacaaaatacagatacagttcattcagtacttactggtggcatcatcatcaccatcttcatccttgcccctcattctggagacagttggggttatcttggtacgtttctttctgttggttttctgtgcagtttgttgtagttgagatcactctgtatgtgcaactttgctaccatgttttcatttcacattatatcagatgctttccctcatgccattaactctttatagacatgatttttagcagctccataatagtccatcatgtgaatgtaacataatttattgaaccatttccctgatgtttagacatacagattatttctaggcttttgctgttataaataattctgcagtatacaccttgcatacatctgggtccccatctctgattatgtccccaatatggattcctagaaatggaattattaagtcagatgggaggaatgtttttaagattattgatggatgttgtcaaattactttcctgaaaagtacagtcaatccatggcagatttaatgagtaatcrcacggcgatgcagtttggagcagatcgcctgtccctcccgttaagggtagaggagagggctcctcgagtctcttcccagccctgagaggtggcagagagcccactgtccctgctgccttccctggggcacttcaccggcagcactggtgacagtccctgcgtcaggcaggaggacattcccaggggagctaaggcacgtggtttctcaggccctgtgtttccatctgaccccttggtgaactctgatttggacttcccccctggctcagcacatcctacagggtcactcacctgtgccatcagttcccagcctgaagggcactaggtgagtgggcgaccccaggcagaggaggggattcaggagaccacaccttgttctcctgtgttcattaatgatgtccctggctattctctggcctgaatgatcatttcactaatttattttttttttaatattattattttttgagacagggtctcactttgtcacccaggctagagtgcagcggcacaagcacagctcactgcagcctcgacctcctgggctcaagcgatcctctcatctcagccccccaaatagctgggactacaggtgtgtgctaccacacccggctaattattttgtatattttgtagagacagggttttgctatgttgcccaggatggtctcgaactcctgagctcaagcaatccacctacctcagcctcccaaagtgctaggattacaggygtaagccaccacactagcccagttcactaatttatggcatatgtgtatagtaaagttacacaaagcttttttacatatattttgcccccacgctaactggagggtagtccatccatccaataatgatttattgttgagcctcctgctctgagccaaggcagtgcccgggtactaggagaggcccctggcactcacggagcttctcggctgtgccctttccttccttcggaggtgagagctgcccaggcagaccaaggctgggagagtggtgatgcttgctgtcttttccccaggtctggtctctgatccagctggcgcgcagatacctgcagaagggctacaccacgctgctgttccrggagggggatttctactgctcctacttcctgtggttcgagaatgacatggtaggtgaggctgagtccctgggccaggacgggccacacacacttcccgctctgtaactcttggattcctttcttctgaattgttgtctgtctgtctcatcttctcttcttgttgctggtaagcccagcaggttgggagccagagttcagaggtcacattttcacatgggcgtttaactgctttgtgatccctctgcccagctgtctggcaaactcttgccattgtccacgtggcatccaggcacacatgtgagcagaaaggcacatgccccactgtgagaaatgcgactcagaccacacactttgtcgctagtgcttccatgtcgccagcgtcacatgccaagtgtggcacatggtcatccctgtggcataggcccctgaactcaagagcataggcccctgcttgaagcagtgagccaggctgcctgaggagacactggtggtgtggctcggggccctggcctccaggccctgcactgcttcttctgggcctcactgttactgcagagtagggtccagtggggggarcttactatcattgtgtctccatccatacaacggggtcagggatccctgccccagccactgcacagggctgtgaggggtgcagtggctgggactcctctcctcctgtctctccctcctctctgtcttttccctttcttcgctttcctcctgtttctcttttatttgcatctcgcttgtcaccataagtggttgttccagctctcaggagtggttgttccagctctcaggagtgttcctcctccctcgcagcccttggtctctgggtccctgcactcctgtgccttcccctgcccccaccctgcactctttgttcactgagggtgacagccatccctttccatagggcagggcggttactggggctctccaccactgttctctcagttaccccctcacagccctgtaaagtggctggggcagggattcctgaccccgttgtacggatggagacacaatgatccggagatcagacgccatggccagggccaccgaggctgtaagtgaggaagccggagcccaagctctgctcccccggsctgcaggctcccagctttcctcygtgccctcagaagtgcccaggacgtgtgtacaacagaagtgctagaaaattcctgtgacctttaccttcacttctagggagggacaggagtctgtgtgcttgggtggccccgtggggtgataaagtgaggcagagctgtgggctggagaggccaggtttgaatgccagccacacagcccagccggtgccgtgggggcagccctgcacactagggagtccactccccctgcagggcaggccacggtgcccaggcaagcatcagctaagtgccatgttcatgcctggcacacacggcacgtccagcagatcttaattcccttccccaccttatcccaccctgggaattcccaattctttcagagcagaggcttgggccttttgtgaatgctctgctcttcaagacctgtatgacagccctgcagggtgccctcctgagcgtgtgtttgtggcctgtacaggtccaggtattgacggtaatgagagctaccctgccggcccttgaagctttgtatactttttctctaatgttcataaggtgactgttgtcattctgacttcaaagatgaaaaaacaaggtccaggcattttcccaagcacccagcgcacatgacagagccaagccaggccgcaagcccggtgcgtctgactcaggcccttgcactacccccacacccactgcctccctgtcctccctcctcaggggtacaaactccagatgatcgaggtgcccgtcctctccgacgactcagtgcctatcggcatgctgggaggagactactacaggtgacgctgcgttgggagccactggggacagatgcccccatttgggtgataagtgctcgcctctgccgggagcagcttctgcttcagcagtgccctacctcagacccagaaatccacgctgggaacaccttcccggctggccctgtgtgcagcgagggaggacgggtgtggagggtacatctgtgttcctaccaccttcctgctggcatggtcttggcagcacggggaacgtctgtgcccggcccagaacatccccactgctacctcgtagccaggatgccactgttaggtcagtgaggaaccggagcggttgtcaaggcccacatgcaggggcctagtgagatgaccgagggcatgggcatttgcttgcgagggcccagagaggcctctggcgctggaggagtgccacagcctcactcctgaatcccatcctccccttcctccccaggaagctcctgcgctactacagcaagaaccgcccaaccgaggctgtcaggtgctackagctgctggccctgcacctgtctgtcatccccactgacctgctggtgcagcaggccggccagctggccyggcgcctctgggaggcctcccgtatccccctgctctaggccaaggtggccgcagtctgcctttgcatcctgtcctccagccacccttgcttgccactgttccccatgacgagagcctcctgtctgcagtggccatcctgaggatagggcagagtgcccagggtggccccagggcttctaaaaccccacctagaccaccctccatgtcaggtactgagcaaggccccagatccttctctctggaggaagagggaagcccaggggtcctgtttgtaaaacaacggtggcaacagctcctcttmcagagctgyctctgcctttatcctgggagatggggaggaagccccatctctgctgttcccygcgtggaggaagcccacccagcaagctctctcctaccccaggtaaaaggtgctcctttgcctgggtttgaattccagcgctgccacttcctctctgcacctcctggcaagtttcttctattccccacrtttaaagcgatggcacctccrtcccagggtggtgtgaggattacccagtgtggtaggtgctcaataaatgttggtcattgttatcactgaagcccaacatgctagtgcttctagacccttctgtcagtgctgataagcccttgctaagtcccagccccttcatgcttggctggcgtctgccctagggctggggttctcaagcccctggccctggcccagagatttggattcccttggcggcygtggagcccagsctttgatgtctttcaaagcttctgtggtgcgccctggattgagaaccaccacccgaggggtacagcccctctcttccaaccgagaagttcctgtcccagaatggacccagggacaagagaccctgagagccctgggactgggagtgtctgctcctctgaggccaggaggccggtgctgggccagagaggacggcgtggcgaaagtcagcgtccactgcagcacaggatcagatggccgtgtgctgtgcrtgcaggagcctcgccttctgtgtcttyagtcttgagccaaaatttgctcaaagactgatctcttccttgcagggaacagctttggggctgggggaactagaacccacatgttggtctaaaccctgagaaggtggcagtgaggaagtatcccctcaggtgactggatctgtgttcctccttaacatcatctgatggaatggcaatgaaaagcrtggattgtggaaaatacagaaaaacataaaggaaaaaactccaatccycygagcccaccactgttcaggacccctgcttttgtcacctactatttccctttagtttttagcagcggctggatgtgatatgtctagtttaaccagtccccttgatctttctatataataaataacacaggagtgaacatcctgaatcagatcttagcagagatgctcacatgcggggtaactgtccatggtgtgtggaggggtcctcggaaccccctcttaggatcatctccacatactctcccagttctgagattcgttaccaatagcaggtttccgtcacactgcgatatcagagcagtgcaggaactctccgctccaaggggttttttcctcctaggggaacactctgctaagtaatgggcagagaacaaaggggctcctaattcaaggcaggcctaagggagggtcagaaagaactttagctggaggtatttacagatgtgacctcraatccttggggattcttggaaaatgggcaaggtgccaaaagaggagaactggccaggccttcaaaactaaaayaccagagaattacagacagcgaacttgcccctaagccctcgttgwgggtktgtgtttgagcatttaggagaggactccagtgctcctcagcgacagacacagcygcctctgcggtgtctgaaggccctggtcgtggtgacgctagatggccgccctgggcgcctcctgtgggcgtagaggcatcaccactctgcactggcagactcagcatggagttggagcagagtctgacacgagcacttgccatcccaggcgtttcagttctgactgagaaggtagatgcacaggggaggagagggccctttyragctccrctctgcctccaccactcattccctaaccccgcagcctcagcgccctcayctgtaaaatggggagttttgcctacagggttcagcacaatgccagcctgacataggaaccccagtggattgtcagttttgccattatcccctgcatcctggaggtgacaccgcctggttaataggcaacactcccracggcccagcacagccccaggrcagcaggaggctggcctgtggccaagaatgcatggtggagggggcctggagggggactgcagctcctcctcttcctgcttcctccctgctccaccccgtgcctagggcagcacaaaagccaatcgctagcaaactcsctgcctagcaaggcccagcctggggcagaaatggctgcaagtggccgaggtctctgcaaggctgtggccgcctctcccttcccggcgtggagacgagataacayggaagccaggggaggtctgaagcctgagtatgatgcggtggtgataggagcaggtaaagtggtaaagcaggccgggccagagctgaggggcgggaagrcagccctgctcagagcttggtggggagggggagggggagccaagccccactgctctctcctctggcataacccagccagaagtttatacsctagcaggggctgcaatggaaagcccttccatctggcaggcaggcacctgggattccggtgctggctctkctgtgtggcctggggcaaatgcttgccttctctgggcttggatcttcccatggagaatgacaggaagactaggtgagctcaggggtttccctatatctcttgcaaagtgacctagtttccaccacattctcagcctatggtttgtaagggttggaaagagccctgggccaacagacaagtgaaatccagcaccccgccccctcagtgccctgagttctggtcaccactaccttaccactgaggccacccctcgtcacaagaaactgcagtcatttcataaaggccagttaggataaaacagaactgagtcccagagttcctactgcgtgtctgcagagggagatggaccccattgccttgcagctctgggacatttggggatctgcagtgatctgccacactttgccaacccctgggctcagagtatcacagtctactgggtgctaggggaagaggcaggcccaggaccaggtggtctttccttagtgccttcctttcacacttgcagagggccccaaatgcatgattgccaactgggtctatacagagataatgacgggaccgaaagcagacggcactcaacatgcagctttgagggcatgccttcattttcatatgtactagagcagttgcgagctggtagatactcaacactcacctctccagggaaaaatgtgtgatgtatgtgtgtgtgtacatgtatatatatgtatatatacacacatatatgtgtatatatatgtatatgtgttacrtacatatatatacacatatacacatgcttattttaartattgaaataaaagatacactgcacacaattttacaaataaagatacaatactctcaatttaaatgcagtctacccgagtgattcttaccaaaggctttctttgatttttgccaaactcagtagccaacctatagttgcaaatgacaaatgagggtagctccaaagagaacggtgctccatattttctstaaagagtaggatgatcgtgaaacaaatgaaacaacaaagatttatgtcccaaccttactcctttattttttaaaatttatttttattttatttatttattcatttattgagatggagtcttgctctgttgcccaggctggagtgcagcggygcaatctcggctcactgcaacctccgcctcctgggttcaagcgattctcttgcctcagcctcccgagtagctgggactacaggcgcccaccaccacgccyggctaatttttgtatttttagtagagacggggtttcaccatgttggcgaggctgatctcaaactcctggccttgtgwtccacctgcctcagcctcccaaagggctgggattacaggtgtgagccactgcgcccggcctccttctttaaatgacaggaatgatgttactcaaataagataatattgttctaatactagaatatttccttcaatttttgtgctatttattcatgctataacagctaacactgttaggtttaatctgcattattagcattttcccatcactttcttaagcctgaccacaaaaaataaattcagcccttctgtgtaatatttgctgatgacagtggtgtaaatactcccaccatagccttttctgttaccaagatgaggttgctcaatgtgatttaggagagatacccagtagcacatcattgtatagtgtgtccaccatgcagatatgtacatagaggccagtgactgccagggcatgggcaacagtcaaatgtagtaaaacaaataggaggtagygtgttttgagtatttattacctttgtttttaatttatttaattgtaagcttatataatttagtttatatcaatggctgtttgacagccggctcacaaactccccgggctggtgggagccatctccagcacctcacttagcctcagagaagccccctgcctccttccgtgctcagccacagctcaccctgctgtctcctaatggggaaggttgactttaggtcaccagctgccttggtgacttgcctacaagtgcgagtgagtctcagtgtgtgagcttttccttgacatgatttctttagttgctaaacataccayaaagcctggtttaaaggcatcttgggcctcagtgaggaacagaacggcatcttctgagacaagggttacctctgagtccctgaaggcacactggcacctggccgccaccttgaagatgaatctcatttagtcatttgactaaatgtgcctgagagtgactgagggggcttgttaaaatggagattcctggccccatacctggtgacgagcattctgagggcgggagrtgtctcccagaggtcagcacatccacccaaccaacactgcctgatgcaggcagctgcagagcccacgcccagagcagctcctcaagggcccaggcrcctgctatggggcccctgaggcaggtctggggattagcagagcccrcagctgaagtcctcttcaagggaacagaggtgtcaccagaagccaaggagggctcagccaggacttgagggtggkcactgggagsgggtcttgtgctttggatccttgaccttactcatttgaggtctgccatgattgaactggacccagttgcctggaagactatgagttttccaagatcgatcatcagcaccaattaaaagacaaatagctcccatttatctcatccttgccacactgcagggtccctggcaccctctgttccccatgtgaagaaactcaaggctcagggcagctgatgactctctgaggtcatgccctggcaaatagcagaggctgggctgagcccaggactgtctgcctttagtttgctgcatgtctttgagagacagattccatctgttcatgagtcccactggcggattgtttaaactttcttatgaacattttcaaaagcccatacaaataaagagtatgtcaaccagcactttttaagatgaactgtaaccaactagcttctcacatgcttctcatatggyaagagttaattttagctcatgaaacttttggttctgtgaaacacctgctgaacagactcctgggaagggggtctgtgggagtcgacatttatacaacctyccaggtgattctgagcttatcagagctggaraggcacttgctacccaggggcttggtgtggaacgtgagatgccaaagccaaattcaggcctctcagctsaaggcaccctgaagcacagctagtcactccagcacatgttgaagctgtgcatgtttacttcatgttgaactgttcatgttttatttttggaacactggggattggcaaaaaaaaaaaaaacccatgtgaataaagccttctagggcaccactgtgccgattgtgaaccacacrtggacaaaacaagccgcgcttgayagcaactacctacatgaccagcactcccctggatgctgatgctgccatgcgagacgggacgttggcgcascagcatgccagccacccattgcttctcctgcttgccaactcaaccgtgctgctccctcagacaccatcacttgcgyctcccaagcaatggaagccctggcgatgctctcatgagcccctcactccagcagagcccctgrccaagccaggggagcaggacttttccagccaaggcaagaaccagggttttctgactccttgaagatctgrtgtttcatggagttgaactagatgctgttccaacatctgagtgcgggaaggggaggggagggtcaccaaggatcttcatggcatggggacgggcagyggggagcacattcctcaaggactstctgtctgcccrcccgctgaccagtgatgttttccttccctgtcccgttttgttgcaggacacaacggactggtggctgtgagtacctccccacttgatcccacttcactggccctgggcgtgtggctctcagcagcctgggaaggagtgtgaagaagcaggtgggataagggccttgagagagaaggaaaaggcagcctagtcgatgctctctgctctcmagtgctgactgggggctgggtcgaatgctcatctgcagccagctgwggacatcacaggctcctttcctccccttcccctaatggggaaaggtggtttccccatggcctgtgagggagtcagggagcttccagaaacaagctgacaaggtgrggaagcatgtaaccaacayagcatgagagcaggtgggaaccaggggattgggcacctggggcggggtgggggcccttgactccagatcataggcagcccttgtgtctagagccctgtgttcccagccaggtccaggccaggtaccaccttggagtacatagctgctatgtggccaaagtgtgccctggagacrttgaggagctcagtctagcagaagggcctgtgccctgtccccaacacaactgacttcaagatcccaaactgagctggatatcccagagctatccttagcttatgcttctgtaacctgagtccagatacctccaggaggccacagaaggcattcaaggccacaaaacaaatgyggaacatcttcttgaagcagcagcagctctagaacatcaatatagggggaaacygtggctgtgctaacggactgatgttaaaccttratactttgcctgatgtctaagttttacttgaacattttacgtgsggcattttgtaactcaatggatcagtaatttaaaacatttattttattttattttattttaattttttttgagrcggagttttgctcttgtcacccaggctggagtgcaatggcatgatctcggctcgctgcaacctctacttcccgggttcaagcaattctcctgcctcaatctcctgagtagctgggattgcaggcagccgccatcatgcctggctaacttttgtattttt

SEQ ID NO: 9915 - DNA, 15531 bp, Homo sapiens
tcgcccaggctggagtacagtggtgccatcttggcccactgcaacctctgcctcccaggttccagtgattcccctgcctcagcctcctaagtagctgggcctacaggtgcatgccaccatgcctggctaatttttctatttttagtagacacgaggtttcaccatgttggccaggctggtttgaactcctgacctcaagggatctgcctgccttagcctcccaaagtgttgggatacaggcatgagccaccatgcctggcctaaagtcctttcaattctaagattttttttttgcccaaggagcttatctgccactattgtttccaacatgtccttggcccacagcttagagagtctggtcttcttaattatcttttcaagtgtttatgacttagttcctcagctagactgtgaaactacttaacaacaaggactgtgtattgaatgtctgtgtcacacagcagtgtaaatgctgggtaaacactcattggttgcctgacatagtaactcatgctttaagccttcccatagaagggtgagagattgggagagtggaagaagaatgatcactggccttagaaagcagaaatctggtcccatttctgcccatcttttctcatttctcatcctgcaggcatctgagtcttagacccacctatcccacttcctcaagaagcccttggtggaactttgcaaatgaccaaagagggagaattataataaggttgttagtttccagagaacattacacctaagcttctccacgcttgtaatggagggatggatggatggatggatggatggatggatgratggatggatgaaagggtggacagaagggtggatggatgggcamatgggtggatggatggttggatggatgatggatggatggaagaatggacagatgggtagatagatggacagatgggtggccgggtggatggwtggatggatggactgagtcaagtaatgtcaattagagacctgagtgttctttcctctgtgctctactcacactatcatatttcctagcagtccatggcacatgatgtctgctcagtctcagggtgaatctgaggtcaatatctttgcagttgggtttccctagatgttctgtcccatcaagctggtaccaactaattaaacccactgaaaagcagagactcccttctcgtctttccaaacagagycacactcacagtgctatcagccccttctcttattctggctgtctggccacagcctggattccggcatcagaatttgttctgtccttgggcttgccagacatactttctcttgtattcaccacctcttcaagcctaggatggagccccacggggcaccaaagatgtctgaccccagcactgtttatctggctgcaaacccactaataacatagtcaacracagtcagtacagagcaggggccccataccttatttctgccaaggctttatggatgactctctcccccttcaacaaatgctcmttaatgttcccaccatcttattattcatgctgtaccaaagacattgtgaaatgcccaggctcttcttccttcatgtcctgcagccaattatagagattggtgcaggcctgacccacctgtaccagacggtataaacacagcgcaatgccctggagaaatcagttggagtctccagggatcagggttccaggaactcaggatctgcaggtcagtgatggacaggcaatattctctctctcttttctttcttttctactctctcctgtcaatatctctggtatgccctctatcccttcactcctcctggcaagctgtctaggtaacaaggtagtcccctcatatgacatgatgggacatcaaaaacatttaggagcacataaagagatttgaggagaaggaataggttaagccaaatcaagatttctgaactacttagaacaactgactttagaaagtaatctcaaaagaaaccatctgggccaatggtattcaaaccgtgtttggtggaagcttaagagattttttgttttcgtttttttttttttgtgctccttggtagctcctcagtgtcttctttgcaggcaagagaaatactagcagggttccaaagtctccattgcttcctgtgtcagcaaagcagctgccctttatcctttttacaatcattagaattctgcataaaattttattgtgaaacttaaaacagttttgaaagataccttactcaatctttccatccaatgttgataagttgaaggcccagggataaaaggtggcaaaataaattggtagcagagctaggtctaggactcagcctttctattcaaagtctgctctgtgtgtttctatgtcctggccacaaggaccagggtagttcaattagggtggttggagagagcttcaagtgagctgtaagccatgcttcatgacttcaagatcttataaacttttataagggaaacaaatatctttatgtacaacaataaataatacagtaaaatttaataggagttcagagtagagttacaatagtaagggaaagattcattaaactctgagtcatggaattataaatagtttggcctagaaagaaccttcataaccacataatctaatcccatgaatgtatagtgctgaaactgagggttggaggttaaaagacataaccctgtatgtctaagctgtaactctacactggtaattaatttgatagaactagatactgaacccatctatactgatactatctccagtgatcttaatatcaaaagatctgaatggatgacaatgagaagggatgacttttgaggcagggagaacaatgggacacctgtgagtacgtccactgagaagataagaaaggaattatgtcgccaggaggtgtggtttagtgtccatggagaagtgagatgctatcacacaagaaaatcagtgccagacggtgacaaaacagtcagtcactgtagattctagagctgggcagggatgtggtgaaaaaatctttagaacgtgggtccacattcctcacataggttggaatgaatgaaaggcagaaaaaccgggaatacaagtacagtagtaatggcaattaaaaacacaaagttatattttaaagaaataacctgtagggacttgataagttagacactgagtcaggagaagtaggagatattgtcaatgagtctcaggttttgaatatcactggtgagaggaatattatgacagtgagagaaatgaaattgggaggaatgtgtgggctgggaggagaagataattaacttaaccttaaatatatttggttggatatcagcaggatgtccaaagtgggctgtcctgtaggctgcaggaggtaaagtgggatgtgcagtctacatttgggagccattagcccaagataatcattgcagctgtagaagtcaatgaattgcagcttaatatgatgtgaaatagaagtgcttaggaccttgttagccttaggggtggccccagaaggaggtgaaatctacaatgggagaaagaggtgtgaagggagtcattcaatgtcaagggttccaaggaggcaatgactaaatatcaaaggaatcaaaagaatctctggatcttgctccacagaagttaatattggtcttggacagaacatcccacatagatactgtgcaggagaatgatgaaggataggacagggtgctgtgcaaaagaacatggggaaagcccaagtttagctgatggcagtgtttgagccaggacaggtgaattgcggaggtctgagagccagatgccatgtccagggagaaatgagaggaagaaaagagggatatagactgaagttcagtgaaaagtcatttgaggaaaatagggaggggaagctttgggggtgaggcatgtggcacactgggaggggcttggcacacagcagaggttcagcaccaagacccaggctctctgatggaccagacgctagcttcctacccttactcacttcatcacaatctatcagaacccaggcggagggagccgaataggggagcctttgggaaagacactgtacattttggctgtgccagaatgggaggtttctagggcccatgggatccagctggactggaccagcattgaatttcttccagctctttgagctgacactgacccagagtgggagtcatcagcttgctatccaccttcacccagggccctccactttgttgccccacctagatctgggcacagctaccacactgcccactgtcctgctgctacaaccaaagaagccccagtggtttggccaaggggagcccatcatcaagtgggcttgcattgaggccatgatgctgttgagttatctgtactgggggattgtctagtcctttaggactcaaagtgctggccaggaggaaccagcagcattgacatcacctggttgcatatttgaaatgtacagtctcaggccccaccccaggcctgaaaaaccagaatctgttattttaacaagaactgcaggtggtttatatatttattaataagtgtgaagaatggaatgaaagtacaccagttcccaagcagcatggctgattgctggaatcactccaagtcctactgaattagaaccttcggcccaggaaatagtaattatacagagtcccccaggtgatgcagatgggcaggcacatttaggagccaatgactttaactgaacacttcatttaaaaaatgttgaaacttacttgatactacaaaggaaattcatgttcattataggaaaatgttgatatgtttaaaaaattactcataaagccataggtaagtggtgcaacaacacgagtaacatttctatgtatgtgtctctatgtgtggatttaaatagaattacagtgtacacttgatttataatctgcatttttcacctaatatattttgaaaatttttatgtcctaaaacaagcttctataatatcatctttaacaaacacatacatccttatttattgaattttgctataatttcttagccaattacctattactgaaaattcagatttttttcaacttcttgctattgtaaaaaattatgcagtgaacatttttgtaagtaaacatttgggcaatccgttatttttcctaagagtaagggaaacacatgcaatcacaaagtatacagaatgctttaagactttcattcacagcaccaacatccctccagaatttgcacttgttagtccctattatccttcactctaagtctcaaagtcataccccaaggcctggggacagaaaatgacttgtccaaagtgacagtgacagacccagtactaaaagccaccttggctacagccctgtttctggaacttgagagctgaggtggttggaagccgtatcctcagcacccacctgttccttctcacctgcctccccagggtccctcagcatctctctattcctccctgagccctattactttcttccacctgccttcttcctttctcttctctcattttctgctttcttatattttttcttctctattcccttcttatttggtgagaatcagatctactcggtaaacctcagccctagtcatacttgcgttactttcctgagctaatttccaactcctgattagctctgggtttatttccatgctaaattctggactggcctttccaatgggtgttcattttagggaagagctctaggacaggataacccatcgggaaggagcagagtcatgtgaggctgtgtggcctggcatttatacagggccactatcttcactgtgccattttccatctggaacagaatgggggagtttggatgggctgttttcggcagtcttggccaagcacttctagtcactaggaatgatgttttccaactctctggggagaccccaccagcctcactgctgctggagaccccttctagttgtgctctcttctttcactctgggctctagttatctaacccttggctagttatgggggcgggggtgtggtgccctgttggccaacagggcagtgggactgggtttgagctgggcttatcctccaactgtgagggaggctacagcacactccaccccactctcagggctgggaattgttgtggctcagctatttgggggaatctgttttccagtttctcagaaccagcgcaagcacacacatcccaggctyacacccctggtggctggacttgctcccggatagcctcagtcagggagaggcagagctgcctggagcctgctgggctggtggaagccttggtgkattctggcaggccaattatagaygaatggcctggggaacccgtgcagcccktggctgagtggttctaagccccagcacrtctgcctctggcttcacccagyctccttttctaactgcccttctctcctccccatcagtgaggaccagacaccactgattgcaggaatgtgttccctccccatggcaagatactacatgtaagttgtcctggcatgtccctgctttccaagccagggggtcagggtgggaagaggaaaggaatgctgagtcagaggatgaggctccttctcaccttagaaattgcaagtgccccataattaagcttcatcatcaccacagtagcaacagctctttcctgaacgtctgcaagatgccagccaatctactgcctcatctctgttccaaaaagtctrtaagtggagtgttattaamcccattttacagatctggaagctgaggctcaaagagggtaaatwacttcccccatgtcacacagctaccaaaaggcagagccaggaatcagacttcatgtcctctrtgctgctccatccgcctctctgaaatgtcagaaagttttgaatctcaatgacagcatcttgatggtggtccctgtggcctttactcccagtgtgggcttctaacamttacttacatttcatctcatttgagatttgcatccttccttatcttttactactttgttgtctgtgattttgtcataagctcctttcaggaaggaggtgaggcataagaaaaatcaaagaggactctgggaygcatttcctctgcycctcccatggaccctgtaatgtccagggctgtgtcctggacaaggtgggtggggagcagtcctggtctcaaggaggtgacagcctggctgggaagcaagacacatacataggaagcacataaatgacaaagcagatgtcagcacttcagggcatctaatctgggttctggtctccaaatagaatgctgctggcatgtgagttgtcacatctgggttgtcaaggtggcaaggggaatgccagwyarcamgcccaggatctttccggaagtttatttttattgtacaagtgaacctgctttaaatatgtacagtcattagctaagggtattatcgttagctgttattgagrtagaaaaatcccctggaggtggtggaatttgtccagaggttctgccctaaaaggttaatgagagctctccagccctgacagcagctgacaggcatctttgaaaccaactaggtgactgagctaataccctgcatgactttgaagcctttaaaatatctgaaaagcaaatcacacttcagtatacactcwatctctgtactaaagagaataaacatttataaacaattagggcaggcccaaaaaatttaagataaggtccactgtatcccaaagtcatctgagcctcactaagaaatttmtcaggaagccaggaacattttctttacccctctgtcrgagggcattggctctccgttctcctctgaaggcctccccaagccatgagaaggcaggaagcacagcctctgaaaagcaagaacacaggagaccttccttgctttaaggctggcctggtctttacctgctcttgggagtgaccattcccctcttaccacctgtgaaggagagaaaatcgcccaaatgctcaaggtggtgattcagagcatggaagtggaagggcttgggggccagtggtgcataaagggaatgggccatcagcactgtcatactgtttcagaattaaatatgcagaccagaaggctctatacacaagagayggccagctgctggtgggagatcctgttgcagacaactgctgtgcaggtgagcttctggggcctccaccccatgctccatctgccataggccctcccttctcttcttccctttcctccccagcagagkgtcagcagctgcccccagtgacagtgagaagggccagagagcagctgtggcmtctcctagygaggggacatgactccygcagaagtcctggctcaccgtccagtctgcatgcagggccaggccaggtgtgcccatgtccagttccttcctgcctgagcctttacctgccaagagcctgcaacatggggttcccttgtcccttgactcttctctctcttccctcctagagaagatctgcayacttcctaacagaggcttggmccgcaccaaggtccccattttcctggggatycagggagggagccgctgcctggcatgtgtggagacagaagaggggccttccctacagctggaggtgagaggcctctccccattctaggggacactgcagacctggcctgacccctgggatgctctggcatctttgtgcctatctgtggattcccagccaggtccacatgtcctacttcctcaggtttccaccatctccctctgcacctagcaccaagacccttgccctctagaatctgcagaaggcagtcccttgggtaaaaaccagccctgtcaggtccttttttggccaagccccagaggcctccagggctaacacctccatcagcactctcattctgcagccatccaccttgcccccacaggatgtgaacattgaggaactgtacaaaggtggtgaagaggccacacgcttcaccttcttccagagcagctcaggctccgccttcaggcttgaggctgctgcctggcctggctggttcctgtgtggcccggcagagccccagcagccagtacagctcaccaaggagagtgagccctcagcccgtaccaagttttactttgaacagagctggtagggagacaggaaactgcgttttagccttgtgcccccaaacyaagctcatcctgctcagggtctatggtaggcagaataatgtcccccraaatatgtccacatcctaatcccaagatctgtgcatatgttaccatacatgtccaaagaggttttgcaaatgtgattatgttaaggatcttgaaatgaggagacaatcctgggttatccttgtgggctcagtttaatcacaagaaggaggcaggaagggagagtcagagagagaatggaagataccatgcttctaattttgaagatggagtgaggggccttgagccaacaaatgcaggtgtttttagaaggtggaaaagccaagggaacggattctcctctagagtctccggaaggaacacagctcttgacacatggatttcagctcagtgacacccatttcagacttctgacctccacaactataaaataataaacttgtgttattgtaaacctctaagtttgtggtaacttgctatagcagccatagaaaactactacagagccttattcgaccctgtgtccagtgtttgatgcaagagacttggtgagttcttagaaggctacctgmagcttctcctccagtccatctgctatggagcytctagaaacaaccaagaagccccaggcagaactcagtgtcctctgcacagggacaaagccctgggctgcttacaacttaaattctagctcaagtcttgtgattttctaccagatacttcacagtgaatccacaattccgtggttgactgttggtacagtccgctatctgccaggtgcttaagtagtagcaagggccagacaatatgtgtgtcctggatgtgttgagtttaaggttacagtggagtctctaagttgaggtgatttgatayagctgggagtacagggctggaattcagctgagagtttgcaattggaattcatactcatcctcagagctcaaacgcttctctgtttcatggaaaatatttgactgggatcaagctagagcagaaagcccatggtatcaggactcagagaaggcacaggctgctggcgctgtccctctgttgtataactactyaacattcacctagcgtgttctgagttccaaccatggggcagcaattttaagaacattctgttgtcatcctcagaatgactcttcaaggcaagcattttcacctccatttgacagatgaggaaactggactaagagaagtgaaataacttgctgaaggtcatatgggctatcagtgttggagctcaagataaaacttggtgcagctgacctcaatgccattttgcaaatttttattccacttaaggagctgaggatagaatggtgaataaaaccaaacttccttgtagctgataattgaaagggagaaacactaaacaagcaaataaacaaacaagaaaacagaaagggcacttttcatgattagaaggtgagggcagcaggtattcaatggaaatattagatgsgggggtcaggggaggtttttttttkttgttgttgttgttgtttttttacttttttgaagaggtaacatctgcactgaggttatggacaggaaggaactgtgactagaaataatcaaggcaaaagagtagcaaatgtgttggccctgagacagaaaggagctggtatgttcaagtaacagtagaaggctggggtgggggctggagcctggagagcaagggaggagtaggcagtgagcaagaccagcagggttgggtcatgtgtggccttgaaggcaaagtacaggcttccaagtattaagtgtgacgggagctacacgataggctctgataatgtttaggttctttctctgagctgcctctccacagcctgtatgtgccccgggaamttgatcacctggctrgcccattataactatgtgtttacatggtgggactcaattttatgtcagcygtggccagaacagctgctggtaaatgcagaagaggctgagtaaatgcaaaatcttaaacaagttaatggataatcacacttgattcctattcctcctcctcctcctccccttcttcttcttcttcttcctcttcttcttcttcctcttcttcctcctctcctcctcytcttcytcctcytcttcttcctcctcctcctccttcttctccttctcctcctcctcctcctyctyctcctcctcctcctcctcctcaggacagggtcttgctctatcacccaggctggagtacagtggtgcaatcatggctcactgcagccttgacctcctggatcaagccattctctgcctcagcctcttgagtagckgggaccacaggcatgcatcaccatgcccagctaggttttttttaattttttgtagagacwggctctcrtcatgttgcccaggctggtcttgaactcctgggctcaggtgatcttcccacctcagccacmcaaagtgttgggattacaggtgtgagctgctacatctggccaatcacttggttcttatgggacattcatcatactgtgtgagaagagctatggtaccaggtagagacaccattgtagcctagaggtggagctggcagggrgrgctgggcagggcttcacagaagaaagagcatataatctgggcctcagagaaaaagcaggtgttttccaggcagagaacgyrgggatgggcatcccaggcagaaaaactgctcaggaaggtgtgatgatggagaagagctcccagcacatctgaggtgagtcatcaatgyggctgggacccagggcttggactgaggagtggctgcaaattcacatgagaagatgggtggctcctgattgctaatgccttgtgaaggagtttttatctgggaggccccaaggaatcatccaggtatttcaggcaggacccagattttaatcctgggcccctcagatcagcactgggccaacacagatgctactgggtcctcagctcttctcagccaycccctccctcmccttctccctccctgacttctgtttagcactgccccggggtcagcttccatgctgtgatttcacagtcagcctgaccccygcttcatcttccctgaccagttcatcaccttcatgcatgtgttgaaagacaaactttggcatattaaaattttaaggagtttatttgagcagagaatgattcatgaatcacaaggtgccaaattgcaagtgattcagggctccacccaggggctaccggaaaaccwtttataagttgttcaggaagcaaaaggaagaaaaaaattcattggttaagtggaaaatccttagttgcaggttagtcggcggttcctgattggctaagcttaagtttcgttttcttagtcaatgaccattcactctgggttgggttttagtttacttaggcaggaacccaacacgctggagtyatctcagcctaataccttcccaattaattattttaacacatggtaactcatttctgctggcccttcccttgtgaactgtgcccatggaccacccaggcaaatgcaggcctcctcctacttactagtggtgctgttccaagttgaatcatgttctctatataactaaaaaaaattttcagcatgtaaaatatgccaattctctaacagtgcacagaagaggaagaggacataaagacttagaagacatgtctctatgactgaaggacacatagtgcagatgggaaaaccagaccttgtgaataaaagctcatatttattgactgcaagacactccaaatagcacttagaatcaaattctgcaggactgtggtagaaatagtgatgggactttctggcactagggtttaaaagtaaggaatggaggcaatttctgacaggtgcagttcagcgatgccaagagtattcttctcccacgccccaaggctcattccttaattccttctcctccctagaaaccacaccaaagtcttcactccaaaacctaaccaggctagagggttattattatgtgaattctagggagaggtacactttakgtcttatccactatttacatctcagaatgaactggtaggtccagagagagagcaaacaggcaattaaacacagtgtggccagctttcggtcaggtagcaccaggagcagggtgggtggggagggtgaatgtgtgtgtctgtatgtgcatgacgtgtccatgtatgtgtatgtgtgtgctgtgtgtgcatacgtgcttacaagagactccagatgtaggcagcagttgattcacagggggcctagtctttgttccaagaagctatggaacaacttcacacaagagggcgatgaacccagggtctcctataacctgtgtttcctaagtcattccaccaggattcagaatctagtcactcttccctttgacccaaattttcatctcgcgatcctaggcccacctctcgcatcacaatagcccctaggaataccggctcaaaacattgtacagaaaactccgcaggacacacaackcatgtcagttctagggaaatctaaactcagatttaaggaggaaacagtaaaagtgaaggaaaatgcagacaactttaatggatactaacttttccttgatataattctctaaaatatacagctacttcataaatgaacttgacagaaacaagtgtaatgaatataaacagtaaagttaacatcttggactgaagcactggcattcggtttacctgaccttatttctggttggattttacatttgcataactaaaagggttcaccagaattctaccaaaacacagtctatccccagagcagattccaatctccgccctcaaaggcacagactccacgctatctagaggcktgatccccctgcccatttctgaggctgggagcctgcagtgtggcctttgggctaaagatggcgacagagatcaaygttggcgctgcctttttggggctaggttctgaatgagctctaacatttaattcttcaaatacttagcagctactgtgtgtcagcccttgtgcctcaaatccccgcctcacttacagtagatgcatccttccacgcaatgcgtgagagtagaactggatcctgtgatgacttcaggaagtccgggtgtccattctgttgggtaacaatttttgttagctcccccttgtcacgagggacacagcccctgctctctaggagtttrgagcttaggagggaaggtagatattagacacatactcatttcracatttttcccacctatgtgaaggagcatcacacgaatgcttgatcccttctccccatgacagagacgttgctgtgaatctgtctcctgtacactcattccctccaattcccttggatgttcttgcccaggctctggtcacagaattgggtgacaaaggatgctgggagccttgagttctagcagaggctcttccatactggaatatttctcacagacattttctgaaggtccatagtcacaggacccatgatacaaaaaatagcactggttatgtaagtttgtctgcataaaggacagcagacgtaggtatcagctagttatgcattttgtagactggttccagtgcacacattccaatgagtgctcataggtttatgtgagaaaatgtgttatttttgataccttcttccacatgcctctccctgttcacaccctctgcttcagacactggtctcctcacrattctccaaagacacactcyaggcacgatgctactccagagctycagcagtagccttgtgttttgaacacttgttccccaattacctgcctggcttgtttcctcagtgaggcctacgctggttacccccgtgaaaactgcaatatgcaccccctcaaatctcagcacccttagattacctatggtactatcacattctaatacactctataatttattttttatttactgtactttttttcctttatcctccactagaatgcaagatccacgggcagaggattttctttttgccttgtttatgtattaccagcatgtacaagcatttatgacgtgtcaagcactcagcaacatttgctgaatgaagaaaagaactcaaataggattcccaaaagggtcctacttagaggtcatgctctgcagagactagcaccagggcccctgtccagatttattaggaaagactgtggcatyagrtgggagtagtgggaagagggtctagtctccagaaggagggctggtgaggggtggacaggatatcagrgttyccagtcaatatctgaatcactttgcatgrtgtctcagttatctattgctgagtaacgaaccaacccacaatgcagtgatttaaaacatcagtgattcattattccttctgattctgtgagttgactaggtrgttcctctgctgatcttgccagggctctgttgcactcagctggaggctcaactcagctggaaagtccaagatagtctctcccatgtctggctgttggtgctggctgttggttgggggccttggctattcatgtgtcctc

SEQ ID NO: 9916 - DNA, 104126 bp, Homo sapiens
  misc_feature (33534)..(33553): n is a, c, g, or t
  misc_feature (86704)..(87340): n is a, c, g, or t
tggggacacaaaagggggtgacccccatccagcatgccactccaacatatcttctcctattgacagatttcaggggattggggaatcttggggaattcttaatagggctcctctcacatcaaagtgaactttattagccaatttctgaatgacacagaggggcctgggatatgaccaggaggggaagtcattactgtattgactttgggccttttccaagcccaacagctgcctctctgaaagaacctgtggaagtcaagggagggctcagaggagagtttcctagggatggtacgttccccagggctgatctcgtctagtctccccacctcatgcctccagtcctgaggtgggtgagaaaggtgagcccaactgcctgctcttcaagtgggctgtcattcctgcagttatcaagtctcagggccaggagggaacatggamctcattgcatccatgctccatgccagggcaagaagcccatgcacagcatgcctgatgaacgggcttgcagcctgagtctgaaaagtgactgggaggtcaatccattgtcggtcaactaagatccctcaacagtcttgcctagattaaactgaaatctacctcccccaaaaatatgaccattggtcctgacttttccctatgaagacacacagatgatgcttgctcctttctccctatagattttggaagcttggtagtcataccccacttaacactccctttggccttctcaattgtgaagtctgaagccgctttccaacctctctctgcagataacttcagctcccactgtactgcaatgaccttattataaacttcccccttcactactccaccccaaaacttccaccttcactactctcttcaccttccctccaggctcagagaaagatgggtcttctcctttccaaggctgaccccttcccaccctcagtgccccccaacccaggacttgctccataaatgacaccctatttcacttcttacacttgcttctccactccctcactgtccactagctcttttccttctgactacaagatgctcagtagcttttgatttccgaygaaaaaggakaaaataagcctcttggtctgtcttgctaaccctctccgagcttctcatccaccttgctcattccgtccgccaccaaacttctcaaaagcagagaggatacctgctgcctctgctttttcaccttccagttgctcctcctcccactttgatctgggttcagcccctgcctagtcaccaacatccctctctcaaaggtcactggtggttttgccactgcttccaaagaccccttctgatccccacctgctttctgcagcatcagacactgttagcaacctcctccacctcctctattaaatcctcttctcacttggcttccatgacaaccctctctcctcactcccctcctccttcactgaccaatcatcatctgtccatcctacccacgttgttgccagattcatctcctgaagcatagctctgacagttcccaataagtgcttctctgttcagaaactttccatggctccccactgcctgcaaaaataaataaataaataatggagttgtaaaatcatgcaactatatgtaattcataatatacaataatctgtcacgttttcaaacctttttaagcagcagaatcttcaaaatccattaagagatatctttctcaaaagcccaattttcaagcacatgaaaacacatgctctttaaatgtggctcctgttgagcccaggaaattctagggtttccaaaacacaactggaaaaccagtgaacaaattaaactcctcagtctgcagatgagaaaactgaggtccagagaggggaagtgattggcagaaagtggcacaggatgtgagttaatcaacacattttcattacaagcctatcaggtaccaggcatgttctaggtgcyagagatatagcagagaacaacagcaacatgatccctgccctggaggagctgacagtctaatggggagtgaatcaggcactataaaccatcacgaaagtggtcccaagtatgcaaartctatagcaggggatgattrgaaatcccagtggctcctccttgaagcctcagagcagggtgagatgaggctgcagaagcaggcatgggccccttaggccttgttgaggacttgacactggtctaagagtctggcaggccaagaaattgttcctgggcattgcaacttgaccatctgcatttgaaaataatccactactaaatgtaatgttgtatcctggattaarttgtggaacaaaaaatagacattagtgggaaaaaacctggggaaatctgaataaattctgtagttcagttaatagtattataytaacactaatttcttagttttgatagatgtaccatggttctataagatgttaacattcagggaagatgaatgaagggcatatgaaaactctgtaccattttcacaactctattgcaaatccaaaattatttcaaaataaagcttgtaaaatatatataaaccattttcaggaaggggaaaactggatgtggagagacagatgacaataataatgatgactaatacttagacagtttttactgtacaccaggcattgttccatgcacttcacatgtttggctcaaggctcatttaatcctcacaacttcaagaggtaggtgctcttatttctccctgttttacagagaaggtacctgagcacagagaagttaagtcacttgcccaaggacacatagctattgggtgtcagagctggagtttaagaattccaatccaggcagattagctctccagagttccatgtgctggactgttacattttactccccatctcagtgcagactggctatactgtcagaaagtattgtaaagaccaggtagaaatcatgagtgcatggactagattaataacaggagaaatggagcaatgtcactagactttatatatatatatataaagaatatatatatataaaggatatatatatatataaaggatatatatatatatctcaggggcatatcargggcatatcaatgtcactagactatatatatatatataaaggatatatatatatatatatatctcaggggcagaatcaacaaaattggaacatggtggttcaggaagaggtaagaagcaagagtgactcctgggctcacagcttaagagcaggaaccaaagcctgctttcctgctgcttgatcctgtgtttcttccctgtcactaaaggaaaccttctggtccttttgccttctgtttgcgcctacctgtccctttctcttatacatctctaaaacgcaaaacaaactggaatgcctactgtcctaacacaggtggcacctctcccacctccacgcacctccatgttcttgtacaagctgttccttccacttaggagtctctctcctgcctcttttggtccaaatctgatctgtccttcagggtctcagttaaatgtcccctcccccagcaaccttccctgcttgtttaaagatgatgagtgaacaaccatactatatcacttacttgcttccatcttctccacccaaccaatccccaggcagccacatcttccctgctggccgcaccctctttggaagctcatttaagatcagaggatcaaagaagcctgacctaaagatggagagagtgcagccgggtacagtggctcatgcctgtaatcccagcactttgggacaccaaggagggcaggtcacctgaggtcaggagttccagaccagcctggccaacatggagaaaccccgtctctactaaaaatacaaaaattagccgggcgtggtggcacacacctgtaattccagctactcrggaggctgagacaggagaaacacttgaacctgggagacagaggttgcagtgagstgagatggcgccactgcactccagcctgggcaacagagcaagactctgtctcaadraaataaaawaaaataaaawaaaataaaataaaatwaaataaaataaaataaaataaaataaagatggagaggatgggagggtaagagcagggaacaagaagacattggtacatctgggattgccccttcaaaccatgccttcagctcctgcartgtgcctggcacagagctaaaggccatcacaatgaattcaattcaaccctggcccttaaagcactcagcagccagatgggagattcccagctgccacaaactaaatctgatagcgtgttccccagtttaaaaccctcctagcagctaccgggcatgattcacgaatctgcagacctctcctttcctcaagtcttaggctcaggctaaaccagtcaaccctttgtgggccccctactcacctgactattgcttaccttcattcctttgctcgtgctgaccctstaccttaaatccagtctcttttatgtctctgccctccagcacttaccttggtctgatagatgactcaccgagaccctgtgttcgcttccctgaagcctttacaccaaccccaccccgggctaaactgggcactttttctgtgacccaccaaacccacacaatcccatattaaatatttgtttaygacatccgtttctatgtctgtcttcccccacccttcaactagattgagttccttcaggacaatgatgatgtctctgtatccccaagccaggcactgtgttttgacacaaagaaagcccaggttacatttgttaaatgtaaaagaccatacagtgagtgggtgagtgttcatgacaatgccagatctgactacttccgcgagaaaccgagacactccagggccggattccagacagtgggaatatggcgctgtctttgccccttctccagtgaggaaccagaatttacgtgttatcagaaacagccacttcccctctgctcctgcccgcctagagggctgggcaaagggtagagggagcagtgtccggccaggktctggggagaattcggctctccttagtgggaaactctgtctgtcttcctcccccagggggaggggatggggataggaggaccagagtaaggggaagagggaaggcccggagggcgcagtcgccttggcagaaatcctaccacacccggatgtagtgggtggtgaacgggatggggcggagagtccctgccctgccagggacactgactggacgatccactttcgcgggaatcccacaaatctctcaaaactaaggtcctggaaactggaggagagctcgttttcaggctatgtttgggcaagggcggggcgcggggtgcttcaatttttggaaaaggaacccccgaagggagcagggattagaaaagaaactctaccagaaacctcagtgggcccgtctcacccactcatgcccaccactgacttctctggcagctccccgtcgccccgcgcaccgctgcctctccgtggaacgtccaagtggtgcagaggagagggatctccggagactgggttctgwtgcgagctatrccacgttccgtcccgggcggaactcttctttgggcctttgtttcctcgtctgtgaaatggggccagggtgggagcagagggcttgcagaagccytgccagctcccacgctgctagccgggattctccatcccgccctctcctccaccgccgcccccggcccggtcctaactccacccccacccgccgcgcctcggcgccgccggccgctaggggtcactgcctgcctttgtcagcggaggaggagggcagcccgcgctccagccggctccccagctggaaggcggccgaggggtagctcccgagcgagggtcctgagccggaccccgcagcccgcgctcgcgatccgcctctgcttcggtcgggaaggcgcgtgcgctcgggctccgaccgggccccggcgggcgcgcatcgaggccaggagggggttaacgctaacccctcccctctggctgacatcacgggcgagcgggtgagaggctggagctcggcgagtgagagaaagagagcgagagcagcgagcgcggctccacattgttgcggatcgccggcacccggcagagcggcggcggctgggacgcgcggcgcctccgacccgttctcctcgcgcccggccgcgcagccagagccacccgggccgccgaccgccgagccccgcgcccgccgcctgggccccgagccttctgcgccgcccgggtgcgtcccgccaccctcggaggacggccggccatggacgcctgcaagttggagccgagcgggagggtgtgagcgggccggggccaggagcccgcgccgcgcaaccgggcagccgggcgcgccgggggtgggtccctctccccagccccgctctgcgtggaagaagagggcggggaccggcgccgggaggagagcggaggaggcgaaggggcatgactcgtgcaacttgcggcgggcatctgccgagcctctgagccggcggcggcccggggcccggactgcggccgcgcggatcccacccagcccaccccgccccggccgacggctgcagctgacctggatccttcgagcgcccgccgaccgccagcgatcttccctcatcttccgggctggtttctgctgcgcgaggagcgctgccctcgccgcccctctcgccggacccccggcccccgatggctcggatggggcttgcgggcgccgctggacgctggtggggactcgctctcggcttgaccgcattcttcctcccaggtaagagcgctcacctctgctgtccccacccccatccaatgcctccccggggctgggagccggatggcgggcacgactggattgtggggagtgaaaggagccagaaaagttgggtcacggcttgggtaaagggggtgggaggtggcacggcggagaaagaggttgagaagccgaaccgcctgccctgcagggaagcagtcagatgcacgtctctatgtagcatgaaagcactttctccgctcagttctttacaaaaaataataatatgtaatagcgttctgtttatttaataaccagctctctgctcgggaagcagtttggaaacactgcgtgttacataaatgcaaaataatcaccgtaatcaccgtcttggggtgggagacaacagccccagggggagggcgtcagtctcggagctgcgggtttggagtatggcgggggggcttcgtctctttsggcggcccctttgccagacggctcaggacgctcgggccccctcccgccccacaccgccccacagcgggcgcggagrgtcggctgctgcggcagaggcggctcctcgctcacctgcggttcctttcctggagggtgaggccggggcagcctcctcccggcctggcgcgggaccgggctccccctcggaactctgctcccagctctgggggctctccctggaggagacaccgcgggcttcctgccatccaagtagctgcatgacccactttcccgagggtgccccgcgtgtccttcctcgaggtgcgggctgccggcagccgaggggttaacctcgcgcccgaccccggggtggccctggtggcccattctgacgggtggggtggggacggaggctgggaccagcccaggcatattgtgctggggaatgaactggaaaatgcgtttaggaggcaaatccgaccgagtcccctcgcctggatttaaccctttgtgtccctggggaagctgccgagctcgccggctgactggacaccaagcgtgggtcaaggggtgtggggagttcctccagctctctgggtagaaaccagagacgacctgcagctctagcaagatgggattttggggaggggggcggatcttgactggagcacgtggtccccgccttggggtggcagaatagggggtcagtgtacagagaccatctcctcgtggggcaggaatattagatcccgagttcctgcaatgtgctttgccgcagaatggccaggcagtttgttatcgagggamcagtctggctgcctagttccsgggctagggtgcactcctggaaggcagaagcctggcctcattcccttctatgcctcttctgctgccagccagctcactacgagggccccgccaatctcactaagtggtggatgtctgggaagcagtttgtgaaagccagtactggggtgcctccacccgtgaagcctggggtgctgccctgctcgatgtggggggtggggaaaatccagggctcacaggtgtcactgcccaccctgcccccagagggtggtcttggtgagagtgagaggtcttctcacactggatggcctgggaagccagccagagatacagaagttcgggctctaggacttgcctggccatggggatttgagcttccaggaacccttcaattacatatgtccacatccggaacccagagaaacgagagcttcccagagctctggttggtccagcacactaggggttaacgtaatcctgggatggacaaagggtggtgggaagggttgggagaaggggaaggaactcaccctattctccttccttttgttattctctttccccagctttgtgattccttcatggttaattccttcattgggggctagaggcctgctgtgctccacccactcaggaagtgggagcagggaggtgaactcacctggctcaaggtggatacaacccctgccaaaaatctacatgaaagggtgggatgcagagaaaggaaccagggttgagagaggtacttaataaatgctcttccattgactgtaattgactgatgggtagcatccatgcaccgaagttcccggaccgcccagctcctctgcccagtggctgggctcctggtgccttctctgcttgcttgctctagggtccacgggtgcagggaggcaggtggatatggttgtgcccagtctgacacttggatggaggctggttggcccagaagttgcaagcccacaccctactttgcatcacctgctggcttcctccccattgcccgctatagcgtctctctagggacttgccagtctgatgctcttttcagggttttcctgggctgtgacagggaacctgggtctgggggtttgaggagaggaagagggaggggcctggagtgtgtgtgattgcccccaacttcaaaacactcccaatctggctattgaartgtaaacacagaagtatgttttcaacaacacagactttactaagcagtgtggtgaagccccaaaggcctctgtttcctgagatgacaatccacagtttcttcctgttaacttagaggagagggtcagtggggcaggtgggttacatcccaaaaagagatagggggagccctaggaggaggcagaggacctgcttgagaagcaggtgtgtcgagctgttgtcccacctacaccacaccctccctaattggcttccccacaccttttgtctggaaagagaacacacaccccaggtgtcatgcacaccctcggaagacctgtcgggtcacagcacacccctctctgcagcctctctctgcagcttgtgcagagcttgctgccatgtggtctttgaaattccaagtgtcggggctattgggttattttccttcctctctctctatttctcacatacagtggtgtccttcagcttgctgggcaaggcattatggcaaaaccaattctgctggcctggggtttgcagcatgtgtaaatgggaatctccttacccatttataaggcagcactgtggagtgccttggaattggattctaggcctccgtagtcaaggctggaggggaagaggasatactgcagagcttgggcccagttgccctggctgagtggcccggaaggcatctcttgaacctgaacttcagagcatatgggacaggtagcccttgttgcctgaggcttgctgaggctaagagtgttattggttcccttctcagccactcacctttgtacaatgaatccaccttggctactgtttgacccccggactctgctgtatgttttcaggatggttgagcyggccagaaccctagtgctgatgactgagcaagtggaccaggcttggggggcagagggtcagttccagttgctgtctatgatactgccattgtttagcagctgactaatgttcattgttcagcacaaacagaaaatacccaagggaggtgtgaatgtatcttcaatttttccgattgtatctcttcctggttaacctggtgaattgaatgcctcctacctcagagagggacagacagagaggtgtcagcatattcacctgttttgctgatttaaaaaaaacaaaaaacaaaaaaactttaaacattagccagtgtgccaggctaaaatggtcatgagccagctgtggaacttaagctgtgacatttctgacagtctgcatagggtctcacctttagtataaagtgtgtgtgtgcacacaggtatacagggctttggtgtttgtgttggtgatctaccattcactgtgtgtgtgtgcatctatggggactaggagtagaaggtgtatgtgcttgtgtctgtgggtcactatgggactagggccataaatatataacatcgaatgtataktcacatrtaactgactgcttagagttttctgactaggacctgtgagtggtccagacttgagaatgcctattttatgtgtcagagtgtcggtgagggtgactttgggagggcacccaggatttgcccttggttagctcttctaggayacactaccgggtcctttggggggtgggaagcctctatgatgcttcctttttctgttctgccctyggctttagactgggcctctgcctgctcgcagggagatgctgaagaccttgaccacaccgggagagatattcctctcttgtcagccttctgttgtctccctggcaggcatagcagcactggaacctggcattacctggggcctggcctgccccacgagttctcatgatccatgaacggctgggaggggcaaagggaggcagtttttcagctcctaatttggcatctttgcttcctacatgggtatttaagaaaaagaatcatggtgtgtgtggggaggggaggtagcatactctgggcaattaaaaagggtgtgagcatgagctttggtcctccatgagggccctgcagagctgtgtgtgcccaggtggacaacatacgtgtgcctggaagcatcctgggttcacgcagcagaaagcaggagcccccttattggaaaaagaagtgggaataagggacaaggagtggggaagagggtggtcctgggagcccagcaccctgtgcccaagcccaactagaaaacgtttccccatgatgcccaccgctgtccacagagaccaggtctgcagagccagcagcagatgtgctggctggggcaggaggtaacttaagatctgagcacrgatcaccttgcagagggaatgccctgagctggagataacaccctttagtccagttaactctttaagctctggattctctcgtgctgttgggggctaggagatggagaaagggaagagatatgagaaaacacatggaacataatatctgtacctcaccccattccacaaggagagatgaactcagtgtaacaggagagacccgagatggacacaaagacagactttctgacagcagattgtagaatcttcagggcaatagattatcccaggtttgccctgggtgggggctggggaggcaataggtatgtattctcaggcgggggcagctagtgggaggtctgcctttcacagcctcccaggagagagcagagcagcagtggtcccaggccctggtggagggagagcagcagacagctcagttcctctccctacaacctgatgatcactccatcttggcagcccagcatmatgagattgcaaattggggcccactggcctgggttggaatcccacctctaccaattactagctgagtgaccttggtcaagtcactttacaggcctcagttttccctttttttttttttttttttttttttgagacagagtctcgctctcccccaggctggagtgcagtggcaagatctcagctcactgcaacctctgcctcctgggttcaagcgattcttctgcctcagcctcccgagtagctgggactacaggcaggtgccaccacacctggctaattttttttgtatttttagtagagacggggtttcaccctgttagccaggatggtctcagtctcctgatctcatgatccgctcacctcagcctcccaaagttttcgtatctttaaaataggtttttgttaatacagatgcccaaagaggtttgtgaagatgagattgagaatgttgtatgaaaagtgcgtagcacattgccaggcatgtgaacacatgcagtgaagtgaacttctatcccctatgccttccctctcaatggtcctggcccctctgagtctgctactcgtgttcccttgagaaagagccactcagctgcctgcgcactgcygacctyacttcccgtgtccccagccaggtgctacttgggaagcgagtccctgcccccactcgggagcctggctgcctgtgggtaatgcacaggttcagctgaggtggttgagggctacctaggcagcaggtgctgggtggcctttgttctgccgcctgtcactgagggctctcccggcacctgcctcgctccctggctgtggcccagctggggcaccattgcccatctggaggctagccgtggccatagagagggcctgggactcagcccctgccttctttcacttccacatttgaggggaagatggaccacagcaccatccctccaggactccactcaccccgtgagatgatatcagccagatgggtagagaatccctgctggggtcacctccttctcactggcagaaagtcccttcagcctcctgttacagactgaatccttttgcaaattgtcataataytgtctgtggcactctatagccacagtttcagctgagcctctcaggagccccatgtgaatggcattagtgttgtattagttccattttagagatgaggagagtaagacctaggtttagtaatttgctgaccgtcttatgctcttgtggccaaattagacactgggtcttctgactgcaaatccagtaaaccagaaggatgaaaagatcgggaatggacagacggaagaggatgaaccaggccagtaggatgttagaaagtgtccatgggacggtcctccactttaccagccaccaccagctcacacgcctcctacagcagggcagagcctggcagctccctggggaagtgagtaataagttgaggatataggttggagggtggcccagccagagctgaccacagagcccaggttggtgtagaatagaggatgcctaacaatggaacgttcctgggggccagggaagcagtgtcctggagcatctgtctctgggtatctgggctgagacatgggcagggcccctgaggtgtgagcayggagccctggggcacaggcaggcacagtgccagggtgtgggcctggcccggagcagagagcaggtgtggactagacagagcagcagacaggcacgggggctggccctctcctggactatcccccacccactctggtcagcacagaccccaatttcattctcagtttatgaggagtctcattaccaaaccacagacaataaaaccctcctggccactctggcctggatctcattagaggacattagttccactggctggtggctccacagggacacagcttcgggagttgggacacagctgcgggcgtggcccaggcagcaaaacaggccagtggccttgggcaccagaatgtcccactgggagtctgagttcaagctatgggcttaaatggagtccctccccacaaagtcctggaattcttgcttcccaaagctggaaatgtgtgtcctgcccacccacttggatgctcagttctgccccctgcctgaagaggaggacacagctccctccagggctgttctggggagccggccttctccgggaggagctgggtggaagctcagcaaatcatcattccatggaggaaggcccttggggacaggggacagaacagcctcccacactcagtacatctggatgtgctctgagatatacgccctagcaccagagatggactctggagtcctcgcaacagccttggcctgaatcttggcctgtctttctgtctgaaaagcaaatgtagggagttggggaccctagagaggaagcatttcccctcacctatagatggagtttcaccgatggctgaaagagccagccactacggagagccagcaggtagccttggcaggggcttcctagtcccacccctccccagctcgcgttccttgtcctcagtcattgtgctggggccttggattccatcttgtggttcttcccaccaaagacaggaggatttctttcttagcagattctggtgcctgctgaccggcagccttctctctgcctgtaccttcccctctgctttgcgtccctcccctgcaagcctgcatacctgctggtcatcagaacgccgccatggcttgaaggaggtgtccatgaaaaacaagacaggagccaaggcaagcgtgtcccttctcgatgcctcaggcttgtgaaggaaaatgagcaccacgcccaaataactggcttttagcacacacaggctcacgcggggtgctcccatggggggccacacgggtcagcccacgctttcgcaggtgcctgccaaatgagtcagtggagatgggagcgccaatctgctggggcagatgtgagtctgccctgctgtggaggaagggggactgaaggattgcgtgggctcgtggagtgcccctgtgagggcctgccagcagctggtctggggtacatgscccgggcaggactggggaggcagctgctgtgactgttctctgtgccccatgcaccttctccctcagtccccgcgtcttgtggacaaatgctgtcaggtgctaggacaagggcagtggaggaggtgcctctggtcctagccagctctgccaccacgtcatgtggrtcccactgcaggggaggatggtggcacatcctcagtctgctgctccagtctgcccacactgctccttgggtgaatccacctaaagcacatctgagggggcacagcaccaccctaactggtcccccactgccctcccccgcacaccatgctttccatgcccagcgctttcctgcctccgtgcctttgcacatgctgttcccccattcccgcttatttcccataaatatgaaatctgaatactgaagtcaagagccacttctattgtgaagctttcatgacccgctccccccgcaagctaaggataacttctctcatctcaaatcccccagcgcctcatccatgccaccccctgccaacaattactctccatcctgctatccagtcacttgggcctgggatttatcttcatcacaagactgagagctccattgctgatgaggcttggtttctccagggcctggcataggggaccagtaggccatgctgggtggatagacagttgcttgtttgaaacattgatgaggataataataacacacttgtatggagaatccctggatgccaggcactgttgtaaacatcttacatgtaatcacttagttaatcttcataacaactcatatggaaggtacttctgttctccccagttttatatatggaaaaatgaggcccagatagagcttaggtaacttgcccagggtcacgcagctagtaagtggcagagccaggattctgattccagaagtcaggccccatgtccgtgtttataccatgtggytgagctgcctctcttcctggcgggtggcagacaggtgatggaggaagaccatttcctaagcctggagtcctcacaagactttgcttccagaatctcttcccacccctgcatagcaccttcttattcacattcctgtcccttcagtggtgcagcgataacctggtgttgtagttgtccatgcctgatgcatttggggagttattagtgctgaatcttcagagagtcttggcgcaggttgaacatccctaatccaaaatccgaagcttttggaggccgacatgacgccacaagtggaaaattccacacttatcctcctgaagggtcgcaatccaaaggcagtcaaaacattatttcatccacagaattattaaagccactgtataaaattaccttcagsctatgtgtataaggtgtatatgaaatagaaatgaaatttcatgtttagacttgggtcccatccccaagataacatttcatgtatacagatattacaaaatctgaacaaatttgaagtctgaaacactttgggtctcaagcattagggataagggatattcaacctgtattactggtatatcctgccacagacactgttgtgtcttgggagtattcatgtggctgtgccagagtggaatgtcttgaagttatcactattgcatctcctgagtctttgggcatcactgataccatttgggccccctcacacacaccatgtctcacggtgagaccagaggcaggtatagtagctcctcggagagaatctgcctggtcccccagcgcgtgttcccaggccagccccagatcctgggtggatccagggctcagcaagctgatcctatgccagagcctgttctaaacttctggaaggtttcaggccctcttgccctcacccagagatcccaaaagatggcaagggagggcccctactagggagtgtggatggggaaaaggatttagggtgttctcctgggccggctgctttgatctcctgggatgaaagggctggtgcttcctctgccccaggcaggatcaggacagcaagctggggagagaggcattgatcctgggtccaggcgtcctcagcttcataggcgagggcagagaactatcccagggaagaagatcacgggggcagaaaaatcaaagcccttccccagggttgtggctgaggactgggagttgacttcagacagtccctgtgcagattgtcctctcgagggtcacccagggtgatgctcctcccagcacaccctgaccctgcaggtcaccatgcaggctcaggcctcacagactctcttgcttaattaggaaggtaattcggctgcaaaacagtcatctgatctgtgtcgacgccaaagcgaaattcctcctagaccctccgctgttctagattatccatgctccgttagcttgaattaccgcgcggcctctgtggcccagacacaagccagagctatgtratcagctcctggggctggatctgccctgcacctaggaagtgcttggaagcaacaggaggaaggagggcataggacctgcctgactcccatccaagccggagcattgcccagccagcacgaagggaccagcattgcccagagcccccctacccccgggcctgcaggtgcctgccgggctcccaagcttagccacttttatgtccctctcctctgccctctgggaccgggcccctttgagggttttgaatcagtggcagaggctttctgcagcaactcctaggcataaattggagcggaggcagggacaggcatctccctgagtgtaaataacactgtaaataacactggagcggagcagccacactgcactggattattttatcgtgattgcccacctcccccaccccctgaactgtcccaatctcattggcctagattgctgcatctctcagaatgatggaggggctgcctctcccttcccgggcagggtggccagccctgccgttgaggcaccctcctacccagcaacttcccagatttattccctgtctttatggtgcctggagagtcatcagtgycctgggccggcagagcactctgatggtctccactggcgtgatggataggcctttgggggaacgtgtgcgacagccccctgctcccggcctgcctctgccctgaccacagcaccgttccccaccctcccaggggtcagatgatgggcctcgtggccagtcctgaaggggcggtgatgatggaagagggagagagcatcagtcctcggcgcccacctctcagtgctgctgcagagtctttctggcctcctccccaagctctgctcacaaacacccttcccaggaaatatccccattaccctctctcatctcccatcactccattactgctagcccctcggcacttgtgtacacagtttgcgctgtaatgataatctgtgctggtttatgtgtttctttacaagtgtttttatgtcctctgtgtgtgtatgaggaaggtttatggtgtgtgtgcgtgtatgaggtcacgtgctgtgtgtgtgtgcgtgcgtgcgtgcgcgcgcrtgtgcacgcgcctgcttctgattagactctgatcgccatcttctcccacacacaggtagggggccctcacccccctcctggggttgggggcacagcctggctactaagggtgggtggagaaggagggggagccaatcaaagatgatgactgtccgggcaaggtctacactgccccccagccgccagttagagaaccggcgaaggtcagtcttagatcattgttttgtctacagggtcacaaacaactagtttgactatttttccccaagaaattgactgaacccagtggttattttggagtcaaatgatctcagtcttttatgacttacctgtgtcagcgggtgtatctgtgtcttctctaaacaagttcccctagctgtacaatgggatgagatgataagaggctggaaggggcgaataacatatgtggtgtgcttagcacaagcaataatttgcttgatccagrgaaagccttcgcaccgctggactgttgtgagctaccactgggagggactcccagtctggagaaggagggtccgttccctggggctggggaagccaggcccaggaaccctcctggctgtgtgtgccccagaacgctgtggggagcccctctgctgggctcctgtgacttctccagggtggtcaatgcaagcagagtatgtcttagtctcaggcccctgggctactggagatccgcccccccaacccagatgatcacctgggcaggtgcctcctgtgctcccttctgaaaggaaagcaagggtttcactcaaggtgcagaattctggctgccccaagcgcccagtgccagtccctgtaggaatcccactgccctggatgtgttgtgggagaggcagacaggttcatcctggcattcactcgacatgtgccaggcacagaggtgggagctgtagacagcaacaaacataatatccagtccagcactgcatggcatccacgctctgacctctgacctcacacacagcaggtgatccctgagggtgtcagctctttcaagcaggaatgctagtcgggttgaggcctgggtggatggtggagagatggagctagggccttgtgggtcaggcctcagtctctttaagccatcctgtttggacgtgaagggacagtgacactagrcaggggcctgcattctccttcattctgcmaagatgtgttaaacacctgagcccactgggcacagyggctcatacctatagtcctagcactttgggaggccgaggcgggtagataacctgaggtcaggagttcgagaccagcctggccaacatggtgaaaccctgtctctactaaaaatacaaaaattagccaggcatggttrtgggcacctgtaatcccagctactcaggaggctgaggcaggagaatcacttgaacccaggaggcggaggttgcactgagccragatcacaccattgcaycccagcctgggcaacaagagtgaaactccatcttaaaaaaaaataaaaataaaaaactaacctgagcccacttgttcctctcccagacccaggtctggaaagagcctcccagctgggcctgcagctgaaggtacctccctgccctgcaggggaaggtggagaggatgtcagagaatcctggagtcttagcattggaagggaaatcaaatgctgtagcaccccattcacttcctaaaacccctaaccacattctggcctgttggtcatcctccagctgcagctgaatccctccactgacagggtactcaccaccctccatggaagccaggacagccctgactgcccccagctcccccttccccctgaagctccctcccattagtgttggaatcgcatggagctcatgtgatcctgcaggcatttacagacagcctcrgcccccgtctcacctctcctgagtctcacacacctcaccatctcaggtgctcccctcagatccccagtaacagctccatatgtgggctgccacgcccagggatgtcagcctaggattcccagccaccacagctgtcccagatctaggaggaggcagtgtgggtgggccctccaagcttccccacctccctctatccctttcccacccccacccccttcccacccctgttttccttaggattaatgataaatttcagtgaaagatccgcttatctccagtaggaattaaggaattaagttggcgatggggagagaggggacagggagagggagcatactgcagagggtcaggatgcagagggaccgtgggcaggacaggacagggcaggggacagcggggatgtggagcattcccctctgcctgcatcagttcaccctgcggtgggctgggctgtgctccccacctgcctgcaccgccatgggggatggatgtggggctgcttggggatgggtgtggtgactcgtggaaggaggtacatcacagggatcctgcaggtggggtgacctggcagcctcccgtgtcacctgttgctgcttcgtgccatggtgcagtggctctgtggcatgtcayggccctgggagggcgagccacagcatgtgtcagggtgaggcaccccgcttttggcattgggatacagaggcacattctgcagttggaagtccaggggccaccaccccacaggtggctcatgagtgccatccaggctctaacacaacccccaggcaggccctggctgcccctcaawaggggcccacccagaggctgccgctcctgcctctttgcttctttggtgggactgactgagttggggttcctgcagcaatggctgaaagaatctcttacccctggagaatctgagcttcgatgtaccctcagagcaactcagaagcctctgtcctgaataccaaggggggggccactcagggtctgcagcatcccttgcccccaaagcccaggagactctgtttagagtttctccccaagtccccaggcttgctgctccttggcacccccctggcatcagacatctcactggcaagcaacgccgggcccaggactgtagccccaaacagtgcctcccctcgccgaactctgaggctaacccaggagagatrggagctgccctccagagggcggggggtgaggaggtgagaagtgaagactgggtgggccagaggacatgactgcccctcaggtcatccaggccaagcttcctgccccaaataagtttcaatcactgcggtcccattctttcctgtcacccccaaggctgrgagtagcggttggtgttcagtagcagccaccagagcacctggagataagaggagataagggcaaggctgggcrgagacagtcacagtctggggtaagggtggggagggggcaggggaaggggggagrcggggcacgttggggagctcaacactctggaagctaggggaggccaggaattggggcctcaagtccaggagtcaaactggttaataattagtgactctggttaataaatcatggatggttttttcttcctaatttcagcttctccttccaccccacaaccctagagatccttctaggctctgcccaggcctcagaaaagaagcccccacacctacccctgccctgggctgtcacctcccaggcaagattcaccctctgtccctccacagccctccataggcctctgccccctcccccagctggtttctggtctccaaagccagtgtggtacttaatctccaagagagattagtgacctgctttcaccaccctcccccacaggctgcttggatgcccctaaatattccctgctggaagggcaggcccccatggccacccagagagcgtctccaggtgccctccttgacrgtgccaccygccccacccattgactcacttggctgcaggtcctttctgctggccagaaggtgtcatggagcacctgtgggtaactgcccaaatgctttaggtgaggtcagtcagcagatgttctttgggcatctactatgtgccaggcactatgtgtcaagaaaaaaaatactttaagcaactggaattgaggttaaaggctgatgcacgtgagcggggacctgaagaccaggagactccaggactggcagtttagggtgaggagaaaaggggatgctgggcatttttcatctctaactccgggatgcttccgttaaaggtcaggctgttttctgggtttctgtcccttttgcaagattgcgccaagggcagagatctgcttttgtaagccttgtggtggctggggaaagggagggaggaagaaaaggggaaaggagttgcctccttcccctttttttttgaagattttgaagtttccctctttttgaagggttgaggcaaaagaatgaggggtccctctcccgtcctaagccttgcacgtgctggggctgagagtacagtagtgatggatgaactggcctcaaaacaggtgaggcccctgtctcccaagtgatctttgcacaaagcccccagagatttacttaggtgattaaactatgcccggggctatggtggagactcgggggcctgaactgggggaggggaggggaggcttctctgggaccgtgaccttgattctgaaacctggaggctgagaaggagtgggctgggacgtgaccaggacagccaagggagacccagccacgagcatgcctggaagaaaaccagcgcctccgcagcctgtggactgggacttgaaaagaacaacccccaaatctgttctctctgatttcagcctgacctgtgcgcagtccaagcycaacttgtccagagccacccttgtcctcttcttcccaagacacagccctccctgagctcttcccatttctgtgatgaaagcccagttctgctgtgcaccggagccctggctccctccttcacccctgcctctgatttgctgtgagttcttatcccatttctgcaggaccyctccccaatcctagcaccaccacacccatccagccattcctgtgcagggtgacaataaaaagtgtcctcagacattgccgaatattccctggaggacaagagcaccccagttgagaaaacactggtctaggccttcactgcaaccagcctctttttccaaaactgcttttccactgactgctctacactcccacaactttacacggacctattttaggttccagtcaaaataaactgctcctggcttctccagtgcactcctcggccttggctcctgatgatggctgagccccaacacacccacctgtgaaatgcgaggctcccagacaccagccccccttccccttctgtgttgtttagtatttactttctctcctcccctcacccmgcacctgagctctttgaaggataggacccagccttaaaatctctgcaggccctagctcagcaccttgcacacagtaggtgtcccataaatgtacagtaaaccgatgggagctggctggcttcacaaccctgataagctgtgaggtttccttctccatgccttttttttttttttgaaacagagtctcactctgttgcccaggctggagtgcggtggcacgatctcagctcactgcaatctctgcctcctgggttcaaatgattctcctgcctcagcctcccaagtagctgggattacaggcacccaccaccacgcctggctaatttttgtatttttaatagagatagggtttcaccatgttagtcaggctggtctcgaactcctgacctcaggtaatccacctgccttggcctcccaaagtgctgggattacaggcatgagccacygtgcccagcctcccgtgcccctttctttctgtttttggttttttttttttttggcaaccctatttaacccccatgccaagaaaggaaaacttctgatgctttccttttacttgacacctcccctcccatctcattttgtttgcagtaaacaaaatcatcttttttccatttgctcaatatttatcagcaccaggaaggtctgcggttatgtgtgtgtgaagttgtgcgtggatgtgtggtttgacaggcgggcgctgtgtgatggcacggttctttgtgtggggtgttagtgtttgagtcagaaattatactctccacaccaggacttgtatggggtcttctctcccatgaactcctctacacttcaaactcctctcacactgggcttatcccataagctctgacctttcagtccaccatrcctttgctgttcctgtctcctctgcctggaggaccctacttcaccagctggcaaactcctactcatccttcaaagcccagtgaaattttacctcctgtgggacacctcttgtttctctaattctcctccccacattcatcatttcttcctgtatcatcatggcactttgtgaacagtcctaccgtagcagtgatcatgtcagtgaatttatcctgtgtccttgatatccttcacatgcatacacacgcatgcagggtgtgtgtgtgtgtgtgtttatagccctactggcaggcacttggtaggttcttaatacttgtttattaaataaatgagaataaattgcttgcttggttttccaaagcattttctttgtacggtgttagaggaatgtgtctgtgcaatgactctgcctgaccttcccgcactgctcccgcgtgttcctgagcatgtcgacctgtgtgcataccgcagcgttcagctgcacatgtgtgcttgggtgcgcgtgtgtgcgtgcatgtggctctgtttcagcgcttctgtaaatggaargctgtggctgcccctccccaagctgacattccctcagcaccacgcccccacctttgaggactgaaggggtgactgggtggtgacttcccccaggcagctttctctacccacctgatgtccccctccaagaacggtgacccagggtttcccgtccatcctgggggctgagctctctgcggsctcgtcacatcacactcccttccctatccatctctgccctgtttaattggaatttggctagtggagaccatctgttctattccggcctgtttccatgacaaccaagtggcttgagactgaggtttgtggtgagagaagtggcctgggggatgctgggaaaaaccagctaggtcctccccytcaaacccgctccgcctcgycctgccctctctccacaaacccggagttaaaataaagctgttccctgcctgagagttggggagtccccgagcatcactctcctctcccagcccccagcccccagccccagtctttcccaggctcctttcaggcttcccacacggggctcccctccctccctgcttccattcaagagcaccttctgcccttacagactagggagctagcccttcccttccccaacccctgaacctccacccctggaagtgagtgcttcctcacagcctggttacagacgctcagggccccacagaaaggactctttagagggtagtctcggcttcctctgcgcccctgcccctgcaggctctcccccggccccaggtagcagagtggcccaggcaagtgcgtggcagacagaggcgccctgggcccggatgtggagctggtgatcccagattctcaggggctgagacaggccctggtacactggggatatgagtgagggggtctcttatttctgaacagacagttctgttttcacggtgttattttctgccctaatttccccatctatggcaaagcctcttcgtgcctgttctattaccaagggacccgcctgtcttcaaaaataggtggtgtggcttgtcaggtgaccgtctgtcgctctggtcccaggcatctcatgcaggatatgtgcgatatgttggctatgtgggcgggcgtggggggtagagtgtctcaggatctctccggtgccccctcccccagcaaaatcagtcctgggcagaatcagtcctgggcagtcctgaggagggaagctgagtcttggacttcagaagaccggtgctcttagcagctgcgctgagccgtgggaccccagggcccccacgcttgggggtgctgcaggcttgcagaggtcttctggtagcctgcttgtctccagcctagccctgccatcatccatccttcttcatgtgcctcttttcttcttttgtctttgttgagatataattcgcaaaccacaaaattcgccctcctgaagtatacgagtcagtggctttagtatattcacaataggccgtcaccactgcctaatccacagcattttcatcacctcggaaagaacctcggtattcattagcwgtcactccccattttccctcccccggcccctgacaaccactcatctactttctgtgtctatggatctgcctatcctggacatttcrtataaatggaatcatacagtatgtggccttttgtgactgacatcttctacttagcattccatgtgcctctttccaaagcacagatgtgaccatgtcaccactttgcttaaaaggcgtcagtggctcccagttgcctacaaggtgaagttcagaccctcatctaatacaaagcccttttacaactggctcctaccttgctttccattcaccctgtattcccctctcctctgccccacatatccagtgctttcgccacatccaagcttttaaagacactctttcctcttttcctcttcccctcctgttcccttccctctctctgtctgtctctgtctctgtctctatctctgtctgtctcaaggactcctgcttatcctgcaggacccagctaaaaaatctcacatcttctgtggcgcctccgtcaccttcagacagaatcactcccccttctgagctcccattgctttgggtttgtatttttcagaaacaaacaaaaactgcgtttatcactcagtcattatttgttttcatgtctggggcccctgctagacagagcttttaaggtaaaagaaaatgtcttagtctttcttattcctccacgctccttcctcttgccactaccactgtcactttcacccaaaaggtgccagcaccatgcttgacacattgtataggtgtagtaatgctttgtgaattaaagcaggggtagaagagtgtygaggtgatggatagcccagccctgatttgatattttgatacctgcctacaatgtataattatcaaatcagggctggaagctcatgtacccccaaaatatgtacaactatgatatatcaattaaaaatccaaaaaaataaaagcaaggggaagaaccagagacagtacattagtctgagagaggcaaccctatagaggaacctggaggaaggagaggattctgcaacttggcatagcagggacaaggtggggtatgactggacctaggaactgcctacatgggcagttggagtggggagacggtggggaggtgttgttyaccctgttcgacagccttgtggagtgtcatggtggtcactagcatgagagatggggtggaaggtttggcagggatgggaggggaatggggaacggccataaaagagaaggtggaggtgacctttagcaagaaaaggggagtggtgggtacagggtagggtgatcccagcagacagaaccgcttgtgcaaaggccccaaggcaagtgagagccagtgcctaaaagacccaggagtggagcccagtgtggggtggggagagaggtcagtggtgaggttgggctggtggagtgagcagcagcctggtcacacagagagctttaggacaaggcgagggtggtggcccttacacctgtgtctgatgaaaacctccctgtccttcaagggtcacttaaggatgaaacggcctttccctgtccacccaagccagcaggggcagtagtgggcctacttcccttgccagatggaagctaccagaaggcaaatgatagattctaacccctctccttcctcacccagctccagggggagggagaattgagggacaggggcagatttgggttccctgccacatactagctttgtgcccttggaygccctacaccaacactctggtcctcagtttcttccgtgaatactgacccactgaggacaaaagtgggataatgatataaacccagagggagttcacgaggattaaataagagtatatacaaatgctccgaaaaggctgttccagcatttattctcctgtgtgctgttaggacaaggtgacaaggaaggaagcagaggcccagggtctccagtttgwaggaatcaccaaggcccctgccctsttttgtgctgttgtctttgatgacatttccaagcgattagaagccctggtgggggcaatatcatgcygtttatttgaaatcgacttgaaagcaatcaatactatattttctagggggaaacacaaatttagcttccacccttactccaagggtgcaatgcgtgcagagagaagatacagtggtgcctggctagaaggtccctccctcttcctaggcaaccagcagttctcagagcaaaggaaaatgggtccttcctggcgctggggggtgagttggggtgggcccaaagctttctccactgggagtcacaggagccactggccctccccactgtgggatccagttcccaaggagggtgccaaacagaccttctgcccctacaaaaacaaacctgtctaattgcctttaatcttgggctgtcggtccgctggtgttggtgctgaatagtaaaaggagatcatatctttccctttgagtgaraagttatttgatctctgtgtgtcagaggaaagcctgtgcccagggaagaggtggggacggaaggggaaggtggaagaagagaggagcgagggcctggctggcggccgaggggaggctgcagctgagggctttatttctcccaataacaatcataaataaaggggaacaagcatctctcttgtcttggctcaaggccattgttttgtgcagggcttcttcttcacccctgccccgcccctccccgcctccctctcaggcccaggatgggaagacagcttgtctgcagggagaaggagtgggctgccagctgtctcacctggaggggtgggagaggagggctccgtagaccttgatgmagcccctgccccgcctctggccttggggctccctccccagctctgcaggggccgccaagatgccccagatgattgcagtcgcctccaccagtctcccggcctgcgctccctcctgttcattctcagcagttgtcartggtcttgttgaaacaaagccgggtcacagatctcatccctctgctcgtggcctccaacagcatggtccagctcaggggagaggcctggcccctgcatcagtctcctccgtctagctacaccggccacagttaccagacgctctcccgccacggggcctttgcacctgctgtctgctgcctctgcctggaatatctcctcccaggtggccacatggttggcttgctcaccttgtttttttctttgctcaaatgtctcctttctcagtgagatcttctctgggcatctttgatctaaaattaattaatcctacacacattttatcttctttcttgtctggttgccattgctagaacataagttccatgaagacagagaatgttttctgctttgtccagtgctgtatgcctgggacctaataggtactgaatgacagcaggaatattttaataaatgaataccctaatggacagctgctgcctcctctgcctgcacaccctgtttctgcatgcaatcacatgaagtctccctgaaattcctgctcatgaaggcctaatctcgagccctgcctggccagcacacactgcatctcccttatggttccaccctggcctgtgatgtgggctggcctcccgtagagccttatcatcctgcagagctttatggcatctacacagttctctcaccttatcttcytagcactctctgaggtcaggactatcaccctggtttacatttaagaaaagaaagttcagaggttaatgactaatttacttgaaaataacaccacatgtaagtggcagggccaggactcaaaccagatcttagctagagctgtccccttgctgcccaaggtcccaggacacctggtcccccctccctggcgtgcgcagtcatggctgagctctcagccctttttctgcatctgctcacctgcccggagagagcctcccggggtggagtggggcattctcacctccaccaaggcctgcttcataccccacggaggagakggagactcattctgagccctgccaacacttagaaaaccaagttacagatggggcggtagaagctgggagcacccagtggacctcttcctaccctcaggcaaggggctgaaatccacagcctctttctgggaagcccttccctccagctctgggctctccatttcaagaaacacgggggtggactgcgtgcagtggctcatacctgtaatcccagcactttgrgaggccgaggcgggtggatcacttgaggtcaggagttctagaccagcctggccaacatgaaccctatttctactaaaaatrtaaaaattagctgggcgtgatggtgggtgcctataatcccagctacttgggaggctgaggcatgagaattgcccgcctgggaggtggaggttgcagtgagccgagattgcaccactgccctccagcctgggcgacagagtgagactccgtctcagatacaaaaaaaaaaggaaacactggggtggtcctggatgtagacccagaaggaggaagcagacagcccctgcccrcaggttcgtgtgcaggaaaatgatggtggggcgtgaggggtgcacccagctgtgtgaccttgggtgagccttttgaggcagcttcttgcccggagaaccgtgttcctgggtaaagctggggagatttgccaggaggaaccattgtcttggagaagaggtggcaaaaaggcacactaacrcgtactccgagtgtgaaaggatgggcatgataaaggccactctctccctgtgagcgccattcctgagcacctgtgtgccagttccragcccggcatcctggatgcagtggaggtgacaggctgaacaggctgagccrcgcatctcattactctagcaataagctaccttgcattttccatgatcaatccttttgggatctcatgaagagtgtgggtggcagaggactttaccaataatccaggttgatggaaattcagggtacgaggcagacaggaggttctttgctaacatgggccaggtgtgctttcatgaaagagcgtcagcctcgttgttgggagtcctgcctcagccacttgtgggtcgggtcacctcaggcattccctggcctcaatttccttatctgtacagcaagtaggttgggcttgttgctcctggggagctcttggagtctcctggcccatcctgggtacacaggggatctgtgtgggaccagctactataatcctaccacttggacaagtccaaggcaaacaccaagaagggtacaagacagygtggtattgtgacttctgagggccagccagcctctgagctctggagatgcctgactgccccttgctgaaagacatttatstgtcccgttggtgccagcatgaaggcccttcctgactacttgggcctccagcacgtgggacacagagtggggccaggcagaagaaactcgtggtcagatcctctgccaggagcatttctcaaacccacgtgggtcccaacccctcccactggagctggggaagctttgaggcaccttggtctcctggtcatgccgtgtgtcagttacctcttaattgttgatcacctcccatgtgcaggccctgggaagtgctgggcatcagctttgagcaaaacaggtgccatgcatgttctcatggagctcacaggctggtgggggccagacactgaatatgctttttaagtgtggcaaaggcctgagcctggtgggaacatagagcaaggggggtttaacccatactgggggacagggctgcctcccagggtaagagatgttactcaaggcacgaagaatgaatgggccatggagaaagaggaaaaaaagaggaagagaccctgggaaggccctgcatctgccaaaggtgtgggggccacagygccaaaagctaccatctactgagccatcatatgccagggtcagctctcagggctttgcttatagagctttatttaatcttccctacagcctttgagggagtgattattctctctccatttttatagacgagaaaraaaagtcacagagcttgcaagtggcagagctgggatttgaacccaggagcctggagtcagaggcttctctgctgtataactgagagaacggggatcttcagcaaatgcccctggtgaggtaggactagargggggcaagtggaagggccaggctaggcccaaccagaagcagaaggaacaatctgcttcttcccagcagcagagttagcctagcagtacacagatggcctcagccacagccctggactcgccttgatggcatctggcggtggctgacccactcccaggctctgtatcaaaaggcttagggaaatggacttgctcttcagcagaagggattgagatgaaaccacaggacgaatttcccagctgtcatgaccatacgctattaaaacaggcagccgagggaggtggaggccctggtgggaaaggttaatgccttggttgctcagagctgctggagaggtgagtggggcagggggargtccaggatgacccctccagtgtctagagatgagatcacrtcacacagatcaaaaacactgtcccacaggaagagggcactgtcagctgtccccaggctggtgccaccctcttcctgggaccctgtctgccccagccctgccatcggacttcattaaattgcattttcccagagcagggcaggccggtgacagaatgagtcaacgtcagcttgctacaactgtcgcccctggagccggcgggcatagagggagataattgggagtggtttgacagcttaatgtctggggctggcttcctggagcagtggagggacagggacggggcgggagccmgtgaggcggaggcaggtggatttgggctgcccctgtcttgagaatgaccaccccccaccacctttcccctccatttccctagcagcagcttgttgggcaggaaaataaagcaccgggaaggaaatgagayctggagaataaattaggctttctttattaatttgtcagaactaattaacatctcccctaggtttgtctcctctccagatgcccnnnnnnnnnnnnnnnnnnnnccctggcctctccccacaataccaaccccagagcagagaaggacagaagaggtgtcactcaaagggggtctgtggtcccgttctagggactgcaagctgagagggcccccayaatgcattttgtccacttgcctagggttctgagccccagacaccccttggcattttacctctctgtgtttgtgtcacttcartgaaacagagtcagtgcccacctcattcagagttggtgggaggatggcctgmgacaagcactgctcagagaaaagtcagctctcattattttgagagacagaacttcagtaaagctctggaaggttcygagttctttcatactcatgaggtcactttggtttgaccctagcaataatcccaagagctataacaagcaataattggtgttcccatttcacagatgacacagctgaggcacagagcagttacatacgttacaaggccacacagcgaatggctggcagtagcaggatcagtgcttagctgagcaagcaccctgctccccagcctcccctcctgagcacacacccgtacccccacatctgccccactgcagagacctgactcacggctgggagtctcacttactaacagatgcctcacttcctgggtgtaagttcaaggtctcagcccaggagccaccccaagccacagaagctccagtgctactgtgggctgctctttgacttgggcaagagcctggatttgtttcgcagagttgatgccttttctcatataccccccatcccagaaaggggcccagccctggtttcagagagtcaccaactytaagaagcacctctcaacaggcgcaagaggcccttgacagagccacgccttgcatacaacaccttgaagggttgcaaaatccattctgtttcatatcccgccatgctgcgatcacatcctagaggtttcatttccgctgagctacaggacsctgggaatgtggaagtgaacactccccacccaccgtcccacccccaggcctgagagcttgttgccttccacaccggcagcctgttggagggtggctgcagagcagagacccccagactggccaagccagatggaacctgaaggaaggatcaaccgagcagccttcctgtgttttaaatgaggaaactgaggcttggaaagagaaagccacacagttcactggctcttggcagcaatggtattagtacctggatctcctgactcccaagccaggcccctttcacgaactaggtgtccgcacttgacaaatgacattgtaactaaatgaatttgtcccattagggactctcagagccaagaacgggcaaccttccaggggaggtggggtgtatgccaatggtgtcagaccaaaggtcagcatccagtgctaggtcacaccacaccccctccctgcctcagtgaccacaagggcagattctcccccaggcctcctggcaaaaccctcaggcgggccctcaccccagcaggagacatagagtcctgtttcagggcctcgaatcatgaacacggttgtcgctacagtgccttttctccagtaacacagttccggctccacagtttgtttcatctgatggtctccccacacctcaggggctggggtggtggtggttcccactttaagagggggaacagagacccagagaggttgtgatttttccacagagctagrcctggaaagcagccccatcttctgaggccttggagagaaagggtgagctggtggggtacacactacacttggagtcaggagacctggctttgaatcctggctctgccactaaccgtgaccttggcaaccccgaatgccacttagtctcgatgtcttcagctgtctcctaacacctgccttggaaggctgaggacttcatgagcactccagggaatgcacctgagcgtctttcaaaaggccctaccccagactcctgccactctcccttgcatgtttgtgtgtgatgagggagcaggcatagatggaacgggccctccagtcatcctgtgactccagccaggcctcgaggcccagccgtgcctgcccgccagaggggccagagtgcaggggtggggcgggccgctgggacaggggcctctgctctccaggactcggggctgggcattgacagagctgggtgtggccggcctggggagaaggacrcagagagagggaggagctgggctagttggcgtctgctggccggggccgtgggaaagagtcccagagttcccttgaggacagtcggaactcttagactccaggaactcagggaggagactgggaaaagtcccctcagctcaggtcaaagctccagcactggtcccttgttttcctgcatccttagggctcatcacatgccacagtataaacacaggcctgtgctggtacctaccagggggccggctggcagagacacatggcacttccccttatcctctgcagagatgatgatcctagctctttgcagagctctcctgggcccctamctgaaaaacataggactccaggaccagggcaggcaccacaggccagagtgaggatgctgattttygaggaaacaattgagctgtctgacacccattgtggagctttgaggctgcccatttttctgcaggctggcacagggcagcttagagaatccacacaaatgggagcagctgtggcctttggggagggcctggagcccactttgggatgctagaaagggtcttgctctgaccctgaggaatggtctcagcttgcagccctgtccatgatcctagggtacccacatatcagtttcgccacctccagagcaattattctgtgtcaggcacttggctaaccatgtacatacgttattttactgaatccttatagccattttgtgataaagtattagaaactggggtttcatgttacagatgaggaaactgaggctcacagggtaaggcaacttgccaatgagtggaagagcccagccccaggtctgtccaccatgcgaactccctctctactctccactgctctctccttatggggaggaactacctgatccccagccctggtacctgatcccacatgcccaagcacaccatgggacagattgtgcttcccttataataagaggaattgagggtagatatcaggaagaacttctccactactcaggggtatagaacactttagcagtttcccagggggaaatggtagaatctcatatgctgaagaccgtgaaagaaggggaagagacaatttaatcacctgggtggggttttgtggagtaaaaccttgccagtgtcgggggtagttatracagcacccttcagctgggaaagtctagaggctcaggcccccaactctggtggggtatgacctctgtctgctgccaccttgccaaaagggtccagcatgggaattgcttttccaagaactttcttgtccaagtccacttgggagcctttgccaactagtgcctggggcagcatgtcaggcagggcagggcctgggcctgggcaggtgtggtccccagctacctgtctgggcactagttggatccacattgagagctctgccatgccaaaaccccrgttyttgctctttcttttccccttccctgtccctggtaaggagctgggagaagactcaggctgggcaggacaccgagggcttcagcctctgcagcccatcctgcctgtcctctggggaaatcactcttcagaatttgttgagaacttataatgtgcacaccagtgattaggcactgcctgcctagaaagctggaatctggtcttaagagagggttccagttgaggagacagaaaaccaaggggcagtgtcagtctgaaagggagcacagtggaccacaaccagaagactcaggttcgggttctggatccaccaccctttagctacacaacttggcaaatttctcaaccactgggcctcagtttctccctctgtaaaatgggactatcagtccttgctccagaagatggaagtgaaaartaggagattctgagtgcctggtagatagaaggtattcagccaatagtggtggaaataaaataacttgctgccagaattctgggaagcaggaagcacagatactgaccaccagtatttatttttagggttgcgggagcctacgaaggagaggggctgagccttataaaaacttgggcacataatctgtctaatcactttgaagatgaaaagttgctgtgaaatgccaaccgwgctgatgggaccagggctggagcagagatgaagagacacagcagggccaattgtgcaaaaataaaatgcatattttttaattgcttgagttcacatctcataaaagaaaaaataataaagcgcaagcccttgcatttccctacccccctctctcggctgtgagtcaagaaccagttcccaccagtctttctggggttcaaagcgtctccccgccctaatcctcacctcgacctcccygccccccacatctattgtgggtgagagggcctttccctgagctgctcgcaggctgcccctcccaggcccggcctctgcccgctgcagcgggcagcacacagagtgggcaggcctcataggaggcggggagggggctggagagacaggatgccctccctcctcccctgccaggtctcctgttgatcttagtgcattgtgcaggtgacatcgcgcggctatctcactattctcaggcctcagcattggttcttccctagacaatgtggcaagatgccttccagcctcgccccatccgcccctatgccgcctgcagtcctgctttccggggcctgcctgagcctgtaacccaggagaggtggaggccttgggccaaagacccactgagccaaccctgtgcaattcccaccctggggaacccaccctttcctggttcctgccagccctggtccctgtgtcctcagaaatgggacagacctcctgcccctttctcttgcccccaacacccagccctgactcacctccctcatttcccactcaagctgtgtctctgggacatgtcaggacagggcacctgattctggtcctacaggctcaggctctgcccgctctcagtgggggtggggcagctggggaggatttgctttgacctgcttcttcagcttccctccctcctccaaccccaccccagggggmmgggcggggttgaactccagaacacctcctgattgcactgacaagaggcccactctgctcttcgatgctgaagtctagctgggggtagggtgctgcccatcctcaccttactctaggcagcctgagtcgctgagcactgtgcgggggacaccaacctgccctccaaaracagacttttacctttgggctgggttcagtggctcacgcctgtaatcctaacactttgggaagctgaggcaggtggtaatcactttaggccaggagttcaagaccaacctaggcaagacccccaactctascaaaaatttaaaaawtaaaatatatgtatagacttacccagacaccttcacccaccaggactgtaaggctgtgccttgttgcctcttcctcacccctttggcaccaagagtgtagaagaagggtcaagagacttggattctttttggcttttcaattagtttattatataacctcatgtaagacacctcacttttctgggtcttaatttcaacatctacaaaataggtagcaccttcctcttgattattccaggatccaggaccctcctggtaaagggggctggaggagcgtgatgggatcagcacttgcaaaccaacctggggagcaaaggggggtgctcccacttcccactggaggcatgaattgaatgcggcccccacatatgcagcccatcagcctttctcttacagagaatctcattttggtaaataagcatggccctcaccagggattctggtccttctttgatcactcagcttcctaagaagtcttgattaaaagatcgcagtgacctgagaagccaccaggcacccccatccctgagttggttctctgggatttgactctggctctcagttcatccagcagacctggatccagggcctactgcrtgccgggtgtcaggctgtgtgctgggacgtcgggggtgagcacrtctgtcttcrtggcacagccaacactgtgtgccagggagagctgtttgagcaaggagccaggtgctgtgggaacctgaggtcagagctgatgccagtgtgggacctgagtgttgaagggtgggtaggagttttccactggcagcggggactggtggggagggtggggacctgggaggggtkggagagggagatgggaatatgggcagggacagattgtgaaggcctgataagtagtttagatttaccccaaggcagtggagagcgaccggggacttgtgtaacaagatctgatttgtatttaaatccacttattagcagtgtggcttggacagatcacttcccgagcctgagcctcagtttctcagcatactggggagacggattacctaacgtaatacccattagacagtgggtgctcagtaaaggtgtgatattttcagtactgtgattccagataagagacagtaggagcctcacctccctgtggagttgcagggagccgagggagctgaatggctgtattctagaccttcagaaggagagtcaaggggctatattgatgcaactgtggttgggccctgggaggggtagggctgaaggagcagctggagagaggagttcagtgcacatggagggcaagatgcctgggggggcagcaggacacctgggttcaggccctcagcacagrggtatcattgagggcctgccctggagtggaccatgggccaaatcagcatccccatccccttctctcccctatttcttcctccagggttcccctccccagagtaatacaaaactggtgtgtcaccatcaagttcaaagagcaaacgtgttgcccacactgccctcttcagcccacatcacttcaggccaaggcaggcggctgtgagccaagcaggaaatagatagaaggtcaggaaccttctgcaatgagaggtagtgagcttccaggggacccaggcctcccaactgcctgcctaccaccaactgctccttctcgccacaactggctgcctcctggcttgagctatttgcttatctggtgacccagaggcagggtctttgtaaccacaagagaaaccaccacagtacatttctatgggctagtgttcagttgatgattcttgcccaggtgctcctgggccatgatcacactgctgagccagccgagccacggagccaagccatccaggctcagatcactccttcccacccctcttctccctgggtccgaccctgccagctcctgcttcccctgattcccactaactgcttggcaatcttggaagagctctccttctctgcccctccatttccccctctgtgaatggggagtcragagcagacagtccctgtctcagagctgctagctgaccaatgctcagcctggtctttcctyctgccccagactggtctcagcctgagttccctgtccctttgacttycctgtttatacacaaaattcacccacaatattttagttttccaatcaaatcattaattaccccagtaattaaatctaattagcagtggtaggggcctttctgagtgaggagtcattagctagggtgaaaatgcacgggggagagagaaaaagaaaacccaccctttcccagcattaaaaatgaaagcaggagtcagcgytgcaacatggagggcccctactaaagctgggcctcactcrttaagctaatttkgtgtgctatcccagtagcctctgctggggaagcccggcttcaccgtccaacattagaggtgtgttggagccccctgcgtgttttggaggctgagctgggcctcccaggaccccagtgccccaactcagggaggggtgtgaggagcctctgctgactcttcatgagcaccygctgccacttcctgggcttcatggtggtcatggcccagagtgggaggggctgagtgaaaaacgaggaaaagaataacagcaccttccactcctgggccttgggaaaggacagagcttggcagtcactctcctytcttggcccgaggctgaggggactccccactcggggtagttgtgaagattaaatgagattttacatgtaaatggatgacatcacaggtgcttgatgcgtgcagctgtcattcaccctttagttttcagaggtgctcagcattcctttttcacttggtcctcaccaccccacagctccaggaggcaaagggtgcaggtgccacctccaggtttcacaggtggaggagctgaggggcagagagagagagacacacaccccgagagtggcagggtttggactggaagtcaagtctctgagctctgggacgaggaggcaagaggaacaggggaagaatgggggcttttcatgtctggagtcttcagtcatatccttgtgctgggctgccggggttgctagcccctgtagtcctgggggaggtggaggtgtcagctcagcctcccgcagaacgaaggaggagtggcaggggtgggrggatggtgcctgccctctctacaaggcrctcccagcagccccatcgtcagcctcaggccagcactgccagcaggcaggggctgctcacccasgtctggttcagagggtgctggccgctcttttccccaggaaggggagagagggaggccgtggagctatgagtgtggtgaagaacgtcacctgtggagacagactgccctgatcagaatcagtcttgcagactgtgtgaccgtgggcaggtgacttgacctccctgagtttcctcatctctaagatggggacaatctcgctcctggagtgttgtaaggattaagtgaattaatgtatgtaaatatccagccccaggcctggcacagatcagcagtgcacatgtgttaactgttcttgccatcctttgggaggggcctggcagggaacctgacccttttgtactttctcccccagggagggaaggaggggagcacttgagccccagcttctgctgctgctaagggcatgggcccaaccttggggtggccgaaaggaggcaggtggcaaacatggggtccacttcccacccccgccacccacacacacacacacacacatcactgccacaagccacttctcggctttcaggggcccctctgcacagagccaagagagcatgggaatggaaggagggaagggaagggaagcaggtggccaccgaggctgagctgcatccgcagctgggcgcgagccccgagcctacgtgctggttcctccgtgaggcagtgtgcggagcaggccctggcacgccaacccctacccagtgactcctgaaaccccgacaagtctgagctggaagcggggctgggcgaggctcctgatagattcgtgttgggcagagggatggtcgggcgggggaagcatgggaaagaccccactctcgaaactctgacaccactggggatgctgggagggagcaggtggggctggggacatgcggccaggctcagggcttctaccttctccctctcaggcccctcaccccacatgcccctgcccggcggggcaggaagaagacaggccgcggcagaggagggatgtgctcccctcagcattttgccaagtgatgatttcagtgctgctgagaaagagggaggaagggaggatgacagccgggagctgggagcagggcaggccaggcaggagggctcccagaaaactcctgggactggggaggtcattttatacaggagctctccctccaaccaaatgaggtggatgtgctccggcccatttacaggtgaaaaggctgggtttcgggaaagttatgagacttgttcataggtcctactgctagttaagtgccaaggctgacattagcacyaggaaaaacaaggaagcctctgccttcccaccgcccctttcagccttctgggcactggggaaagggaaagcccagggacctggatgtgtccacaggccctgctgtagcggggcaagagcaaggcagagagtgggcagcaccgtgccccctgcaggcagaccacccgcagagcagccttcagctcagctggcctctccccaaaaccccatgtcacaaccttttgaagatcccactttccccgcccacctcaggatgggggactctcaggtggaaagaaaactgtgaactgtggctgcctgccctccagggtgaccccaagctggggctgggtttagacctggagctccagaggagctgagttcaggcctgctgctgcactgagggccatgcgtggagtttgcttcgttctgtggttaaaccaggaagaggttaacactagagttggggtcatgacccgggtttgtgttgtggtctaggttggcactgatgttgagacctgggcgggggctactcttggggtttctgtgagtggttggggagaatgcttttggtggttaacrctggggcaagcacattgagttggggtattccagctcaggctggtgtcctgagaaagggtggatgagtttgggaggctcagcactagttgaacaaaaggccattgcttatgtttggaggataactgcccattttcacaggaccattggccaggggagagaatcggggttggggtggtagttgagccggaaggtaggttgaggtggggggcggcgtgaaaagtgagtggcttctgcagtgatggaagggccactcagagtccctgcccctgtccccgagttcccccacctctgtggcatcctgtgatgtgggaccctccccaccccaggccccacccagatgctactcagacataagcctgaacatctgggcacgggctggtctcccctctgtggggtttgggttctctcatcagccaagggaacacagggccgggrttttgcctcttaccccagcagtcctgaggccctgatctgctggtgcctgggggacctgccctcctggcctacctccggcagcgctgctggagaccctttggtgggggctcctgaggccacactagctgaagaagtcaagagaaaactcaactttaagcctttgctagttccgtttcccatccccttttttttctggccccagcccctggtcattgaagcacatcggataaagactgccaccccccagctcggaggtctgtgatccaggagcagagctcatagggtggcaaggaagcaaggaagcctttattttttatttwtttattttttttgttgttgwtggatggagacagccctgagccaggagacatggaaagagaggctggcctgctggggtctcagtccatggttgtgccacctgagacactgcagggtgacgtttcaccaaggaggggctgcgaggaaaggagctccggctgtctcctccagcatcacagctccctttcctggcaccrcctaagtccaggtacagaagaggccctgagcaccttgtgccaaggcctggtgcagttcttgtatcayccatacagggaagggttcagcagaaggcccagccccacctgggaatgttatgtctaacccagacgttacgtgcaatttgaatgcagtatcgctcattgggtccagaccagtgagttctgcccagaaatgaaatagcaggtttggtgcstatgcagataccttcttcttctcaagctgctttggaagcaggtggagggaagagattgctctggggccctggtcactgatccccactcgctgtccaagagttcaaggtcaccactgtgctgtggctacaaagtattatttcaggggtcattgcggtggggattggtgagaccaagaccttctygaggggatggggtcgagagccctccatcccaatgttgctccagtggcccccacctgctgctctggcagtgcgcacggagctcctagccctgctgcctgkttggaatgtgcggggcacattcagaacttctgaacagtcaggttgccttctcctcattgccccttcagcagcagggccccacccacaccctgaagcctgaaccgatagtccctcactttgcagctccctcccacagcagagtgcctctgggcaggcagaattctgactccaaagccttgcctaggagcaggaggtgcctggggcatggatggaagtgctgggagtgccagatgccagccctgggtgggacgggctcaagggctgatgctgtagggtctgaatgccacagggaaggtgcgtgtgcacatgtgtgtgctgctcctgaggctgcgaggctggaaccacctgcaagtctgcaatcaggccctcctatgttcaaagaaaagccaggagaaccaggcccagggtgaggagcgcaaacggcaaaacttaatgactttaatatgaaagaatttgccactaattaagcacaaacactccactaatgcacagaacacatgttgtggatttcacttaagcagaaaccaaatgaggtgaaaatccttccaaaatgatagcagtttaccagccgaaggaagacgctgcctgactttgtttcagctcttagaaacctagcgcagcccctaccttggcagcctccctcccctccctgtctaaaggtgctcacaacaccccaccgcatgtcccctgtgtccctcccctcgctgcccctacccaccctcttgcatcctctgaggacacacatgccactctataacccatattctgacagccagctccccagaggaccctgttctctctacctgtctcccccaaacacaactcactgcccctcctacagagcccagactctccagccctgttcccagccacttctggaccctcygtccctggacaaacaaggacagttccccaccagagtgccccccaactatgtttcccactcctctctgcaccagcttgccacagccagccctgcatgtccctcrtgagctccaccatccctgcctgagctttactcccttcctctaggccagtggtcttacccggggatgattttgcctgccatgggagatgcagcaatgtctgtggttattttgtcatcacaaatggagggggtgcacttgggtagaggccagggatcttgctaaacttctgcaacacacaggacagccccccacaacaggacagtccccccctccaaaatgtcattggtgcrgagttcattcgtgccctgggggagtagcctcatcactgcaggggtctgctcaggatcacagggtgggcttagagccgggatgggaatcagggaaccagagcacrtgatttctaggtaggttctttctcctagcaaataatacaactgcttgtatagcatagctatgggccaagcactacgccaagagcaaaactgaattatttcattggatcctcaaatcagccctaggagatagtactattactggccccattttatacatgaggaaactgaggcatggagagattaatgcacctttctcgaagtcaaccagctaaaaagcagcagacacaaacccaggtctatctgaattcaaagtcagcgctcatagattactttctacccctccccccgctgccatgttcctcttaatctctcatctgtcaggccttctacacaacccctagaactcccaccccatccctattagaatgagtgttccctgcaggtaggcattgtataccttcccccactgccttccactcacccccccggccatccgagcaggcagctgcccatagctggacagggcatcgggagggttgggcgctggggtggccccacaggcccctcctgggatgaggcagatcgagaaccctctgcttccaaacaggtgttgaacatcagcctgaagcctgcggggctgagacaatgcagatgtcaatactgagcttttaaaagattctccggggaagcctggggaattctccctctgctttctcggcagccccccgcctctcccacccccacactagccttccaaagaggctgctgcctacactccccaaaatgtgtcattaaaaatgcacacttgccgagggaaatccaggctgccgtgtctgctacaagacagtgttgtttgctgcagctggggtggagagggttggcatcagcggcagacaatgggacctgcctgaatcttggcctcagagccagggggttccaggttggccagaccatgaaaggctgggacagcagaagccccagcggtggtgggaggggcgatgaaccggggagtgcagacacaaacaaggctaagatctccagagcagggcctcagggatggagtttgcttgggtgagaaaaatgtttgtcaccttatggtctggcgtgaggaaggaagagggcctaggtgctgggaactggggcagaggagagaggaaagcaattgagaaatgtctcggggaagcaagcagaagtcgtggggttggaggtgggcgagggatcgggccaaccttccccctgttgggatgtggcttcctgctttcagtcaaggaaggagaagattcggaccctgacctgcttcccttccatgcaggtgtgaggcctcactttccatttctgccttttggataatatgcagtttccaggaagctgcagtcagacctgagaaatggctaaccctggctcaggcccccagctgctcacagccttttccacctgccacttgggccccctgtgtttcccatgtgccaggcactgggttcattcaagtcctggccttttccaaactccgtatgagaaacgctaggacaggtgtgcgccgagatactgggaccctgggggtgcaggaacacgcaatccatgaaggtgggaagaggagggctccgggaagcctcccccttgaaagtcaactctaaggtgattccgggaagaatgaaaaggacttgcgcaggtaacgggggagtggtgcggttttcgccgaggcagcaacctcaaccgaccggattgttaagtgtggcaaggaagagagagaagagttgggagaggaagtggctggaggttggggatgcccaagatagggtctagagcccggaaaaacttcatcctgagggctgcaggataccatgggagggtctgaagtagtaagtgatttgcatcttacagagatccctctggcagctgagtgaaggagtttcagggtggagctggaggcaggagactgtagacttagcgtgatgcagcagtggactagggaagggatgatgttggcctggacaaggggcaaggcttggggaaatggagggaggcaagagatggcaggtgctaaggttcaaaggaaagagctagtgcaaagtcccagcccgggaatattgagaaaataagaaagggagactgccggaggtgaggtggagggaggtgtgcactagtgagagagggcttaggaagtttgaatcaggaccagcggggctggaaaatcaagaggaattcaaaagctgtttaggagctggcatcagtaagacttggtgattacttgactgtaggagagtccctgtgtgctccagctttgccatgctgtggcctggattttcctggcatcccacttaacctgggaggtcttcctggaagagctgggcagtgtagagagacagagcagccacttggtagataggtccccagaagttgatccaaggcaaaggcacagctgggtcagagtgagctggacaggtcatgtccaaagtgcagtcccccaaggtcatcagagccaatattccccattttacagsaaaggaaaccaccctatccaaggccatacagaaaaacaatgagcaagtagtggggaccagagctcgcctctctcagtgtccaggtgagcagagcaaaggtggcaggtacaggagagtgatccaagaggtgatgtcttgaaggctagaggcaggcagggccaagagagaggctctgtgttcctggggtgccacgatggagtcagaggctggctcaggactggccccatgatgggccatrtggatggggcagccagcatgaaacaggcctgcaggacagaatccaggtgtcctcagccacctggtgggagaaggcaaaactcagctccctgactcatctctgaccccagcctgtcctgctggagggaggtgggacttgccagagcacccccatcactgctgccacgccggggcagcagagcagggccagcctggcctgtctggaaratcctgggctcctgcgctgcctccttctcggggcttttcccaggccgccgtgccccctcctctcccacgcactgtgctcacccgcccaaggcgccgggcgccagctccacagcccatcattaaacagctccatgtggggagttggggggtcatcaggcaagaggaaaacatcagcagtttttgtgaccccaaaggaggggcggaggcactgacttggatggtagcaattagcccctgactgtgggctcatgggatgttatcagcacctcccaccagccaaagtctctgcactgcaggcagcaggggagacagagatgccagactaacagcagtgcaaggccaggccggactcaagtccagactgtgcgcagccccagggaaaggtggctggagcaccaggacaagaactgggtctgctgggtctacttctgcttccttgctgagccctcctccccatcctgagtgtagaggggagtctggaggcaggagggggcagcctgggcacccgtgaatctcctggactaatggggaaatgagacaggacaagctcagtgagagccctgcccctctgggttttgctgacagaatgatcggagtctaggtgacactgattggcaaaacctgtgaaaggaggggaccccagaaaggaagtgggtgtcctgattgcacgctcctccacaccggcctctctcccaggcggagctggccttggcttcagaaggtatggagttggccagccytgggagttgacaatcagggaagcggctgcactgggaggagggggcctataacctttaggtcactgtgctgcctcagcagggtttcagatggaggccctgcccctcccagtgggtgagtcactcccacttaccacttagccggtttctcaccggacatcctgtccccttctgccagttcctggggtgggggtgggagcatccctggaaagccctagaaatgcatcccgaaggatatcgatttcacagaggcccttatggcggagcccagcacccacctcagacacacacgtgcacacagacccactccctctctgcaatgtgccgccactttactccaggccaagttggctgcccctgcccagccacttcaaggcccccaggcagagtctcaggaaaggaggggctggggtgggctggcacagccaggacaaaagaagtggtttatgccaggaagccccaaatccccctcgcctcacctaggtacccactttcacctacccctgagcccagttccagcctgcttggctaggaagaggggtctgggggttaaaagggcaggaagagaaactgctttaagtgggtatgtggggagcgaagtgtgccacaccccgctgcgtgggaacctgtggcactggcttgcggatgagctccatggcaggcagggccttggggagcaggtttgtccgccacaactgaggagtctttgtgttttgttgctgagctcaggcgtttgcaggtctgtgacrtctcagggggccggcctgaggccygtcatgctggctcagcacttctgggaagtgaggcagcctgaactgcccaacctgagatctagtggggaaactgaggcacttgagaacaagccccaggggcatgggtcccagatcctggagctcatagggtggtcagggagaatataggcagtgcttgagttcaggaaaaaaaaaaagactgattcttttgatatctgtgggatgcaagagcccctctgctgagggcacaggttctatggatgcctctgcccttcactccccacctctctagctcttattgctcagcacatagcagcctcctgcaagtgcccacacacacacacacacacacacacacacacccgggatccccaaagcccctgtttctgacctatcacctgacacccagtcaggtgacctgcagatgcaatggccaccccaktattgtagctggtgtttgtgccatttctcacaaggggcaatggaggcactgaggttatattctaggagggacaccacccagaaagaggccccagggagttaggttgagccagagtctgtttttgtggcagggtgggaaagcactgggctgggtgctgctgttctgtgtccctgagcaggtgacctaatccctccagtcattgtaaatgatggattgcatggtccatcaagctccaatatgctaccattttagtggtcccagttcccacatctgggccagcctctgcttctcatgtaagagggaacctgcgggaaaggagacaggatgtgttctgtggaccagccctgactgcttagggaatcagagaaagtcagcagggaactccccaagccctggaccctgccagtggcaggcgtgacatggtcaactcaacccaaggccaggcctgctcctttcatctcctgcaggggcttacaattggttgggagacaggctagacacatatgccaggaagtagaaaataaargggtacaggtcagtgttacatgttattggggtattaatagaactgtcagctgagtaggaagagatgacagtcacaagggcgtcctggaagaggggcgcctagtagcactccctacagtgtccagtatggagtaggtgctcagcaaatatttgttgaatgaagttccagggagggaggcctgttgcttcatagatgaaagatgatggtgatgatgatgatggaagctagcatctaatgarcctttcatttgtcctaagtgctgctttctgagtttcccatggactccctcttttaatccttacgcagttttatagggcaggtattagctattataatccccatcttacagatgtgcaacattggtgcaaactgagctacagagaggtgaagtcatttggccaaggttgcacagctcatcaatggcagaggtggaatgcaaccccctactgcctggctcctaacagccccrccatgctgcctgaaagggtggtgacggaacagcccttcagaaggtgggagacgctagctcagctttcaggttgtcaaggctgcagtgtctggagaagcttggcaaggagaggggctgtgcagtctttaagcccctgtttctgctgcctgtccctggagcaggctgccttttatcaatcctggtcccttctcgtggcccacctgttccaggattcttgcccccatccagctctttctttctttccggtggtgatccctgctcctctgttgactctaacattctaacccgcctgttagagtcacctggactctgctcccgtctgaaaacctcccaatctaaagaatgagggtccttctccccaaccctgagtccttggaccaaggcaggcagcccctaatacgaggcttgggttcccggtccctaagtctggagtggagaagtggagtttttaggcctttccaatcttccagcacctcccaactccagaactctgggatccagtccccaccctcaatgaccctaagccccttgctccaagagctcccttatgctcaccccatgggtcacctcccctggccctgctagcagtcagatgtagcaaagaggcaaataccaaagtgagtctgtacctgctccttaaagatcctccctgccctgccccaccctgcccatcaccagggcaaaaatgtccaggacgaggggcacccacttggtgcccagtaagagagaggctgggaacgtccttcacttccccaccatgtggttgcttctgggagtgccacagtggacagaaaagagcaacctccaccccaacatagacgtgggctgcccctgcctggtgagggattggtagatgtaagggggcctctggggtgcccggccaccttgcagcaccctccccaccccatgcctggccgctatcagccgtctcccctcctggcattgacacagctctgagggtgaggtcaccactgaagactcagacaatgaatgtcagcctgtgccccagggactgtgccctgcctgcctccacaccttcaggggatgagaggagacaggattgcaggggctcagagggccgtgtcccgttgcaggtccaccatgcatggcaccaatccatgcatggcaccaatcccaaaatggctcctggakcccacaccccttccctgcgctctcacctggggcccaagccctcccaactggcttttcctgttcctagctttgtgtggtgcaagttccccaattatgcccacattatctcagccactgggcagcctccagcagcctgggggaggggtggggagcacccaattatcctgctggagagggcctagggcttagctgcttgccaactagcccgtcagcaagagtactgggccgtctggcccactgacctcaccatggaactgtatctggagtggggccacagctgcactgggctgtcatgagacagttaggaccaggaggaccactgggactcgggaggccagtctgctgccttacagaggaggaagctagggctcagaaaggggaggtgactggccacggtcccactgcctgctaaaggcagaggcaggctacagcccagccttcccaactcgtggctggatacttctcccatcgtattcccaacccatggggcctctgcccagggagcatcagctccgaagcaccccacaggctggcagagggaacagctggaggagtgagrgtggggataggcctgatggaccttgagggctgtgtggatgtgaatcagcacagagaagggggaacctcagggaaactttcagaacacggtagggcctggcttggtgaagccaaagatagacttattcagcaagcatttcttgagtagctactttatgctgagcaccagggatactgcagtgacctagagacctggcctgtggcctctcgagcggaagagaggggagcaacttactgcactgaccatgggttttggggccctcagaggagcctgtgttgctacaatatccccgtcacgctgaggaggtgagtgagcataagccccaaattcccactcttggatcccagactcccttggggggtcatttagatcctccccctgccttgggtcagtacaggtcctggtgttattaatgctattgatgacgctcaataaagtgagtgaagtaaggatacaaagacatgaagtatacaaatgacagcaaggacacggcttgtggggagttgcaggactcaggagagagctggagtgtacagcctagtgctgaggacaaccgccccacgttaagggagctgagccaagttcaggggtaaggaagcccaaaaaaaggacattctaaaggggataacacaacccatgtggagactggagggaatttcactccctccttcttgcaaatgtctgctctcttgacttccattgcaatttgtgtagtaacaaatatttactagcatctgctatgtgccagatgctgcactgggcactggggatacagagatggaaaggacagaccctgcccttggaggagttcacagtctggtggagaaatcagatgtgtaaccaccaccttccaaggcaggaaagaaccaaggtagaggtggccaggttagctctggtggggaagatcagggaagctcccaggaggaggtggcctcagggggccatccacaggtggagaaggggaagggccatctaggtggagggagctgcctgggtaagagtctaggagtgttgggtggataggctctgtgctccatggaggccgggactcaattgctccttgatatgacccaaatgctcacactagatcctggaatatgtcactcggcaaatcgtggctgaataaatgggaggaagagggaaggaaaccgggaatgtggcatgttctgaggatgggcccagtctggtatggtgggaaagtgtggctgatggagagatgtggacaagaggcaggtgcaaggaggtcttgccaagagaaggcatttacatttggctgtgaaggccatggggagccagcggaggcctggccttatgcagtgcccacttccctctgcctagctgggtaagaggggcccagctagtgcaccccaggggatggggactcagctgcgagggagaagacagcaggggtggccatgatgacagccaccgtgggccttcaagctcatccagagcctcctgcctctgacgcaccttctcgtccatcacgccatttgtttcccccagtaacctcgtgaggtagagaggactggattctccaccccatataacagaggaggaaaccaaggcccaggaagacaaagcagccagtgcatggctcctaggctggggctctgctcgaaaagcaaccaaaaatgagggtgcagacgtatgtttactaacacagagtgatrtttataatctatccctaagtaaaaaagcagcttatgggataatatgtacagcatgattctgactttttaaaatagatagatggttatgtggatatacacagatataaagtaaaaggagatagatccttcaagattatcctgagcggaaggatcatgggatgttgtcactttcttctcatgatttttcagtgttgcctagagtgtttttataacaagtaattaatatttttacaatcggaataaaaacaataatgactgctataaaagacaaggccagagcacagggaactgtgtgggtggggggaggctgtgcctgacactgaccacttgctgccatcctcctggccaggcgtccactcccaggtggtccaggtgaacgactccatgtatggcttcatcggcacagacgtggttctgcactgcagctttgccaacccgcttcccagcgtgaagatcacccaggtcacatggcagaagtccaccaatggctccaagcagaacgtggccatctacaacccatccatgggcgtgtcygtgctggctccctaccgcgagcgtgtggaattcctgcggccctccttcaccgatggcactatccgcctctcccgcctggagctggaggatgagggtgtctacatctgcgagtttgctaccttccctacgggcaatcgagaaagccagctcaatctcacggtgatgggtaagctgccctgggccccctccctgttcatccagaggcctgtgacctcggggcgtggccatcctcaggatgcctcaatgaccccagacatcccccttgggtgggcatgctgccatcattctaggcatgaggcttccagtcccttctagccaggccaccccacaattcactagggattaggggcaggggcttatctctagacagtggggaacgtgattcttcaggttgaagcccacaaggcactgtgctggcagcagcatcagacaccacggtaaggaaaggagccacctgcgctgcttgccttagacatgctgggactccaggaggcctaagctcgatgacagggatatgactagtagggcagggaggacataacgttagacatgatgaacttcctgcaagaggttctgggacagtctttggtgcmgcacagctgagaggcagggatggccaaggggacctgaagacaaggcctgacggatgccacgcccttttggccggtgcatcttggacaagtcaacagggctagtcccatcactctctctgcttcctcgcagccaaacccaccaattggatagagggtacccaggcwgtgcttcgagccaagaaggggcaggatgacaaggtcctggtggccacctgcacctcagccaatgggaagcctcccagtgtggtatcctrggaaactcggttaaaaggtgaggcagagtaccaggagatccggaaccccaatggcacagtgacggtcatcagccgctaccgcctggtgcccagcagggaagcccaccagcagtccttggcctgcatcgtcaactaccacatggaccgcttcaaggaaagcctcactctcaacgtgcagtgtgagcagggctggctgccaggggcctcctggggtgggcgccactgtccctcctccctcctcctctcctttctcctccctttctctttctgggggtgctttcttctcccctcctgtctcccctatctcctccctttgctcgttttctctcctccttccctgtcgccctcctgtttccactcccgggctctgtgattgccaccctcccacccayacttccctctctcctggctgtttccatgccactgctccttccatcccttcctggctgaagttcccttgttctaagtcccgctctcctgacctcaccctcttcaaacatcccttgccccacagatgagcctgaggtaaccattgaggggtttgatggcaactggtacctgcagcggatggacgtgaagctcacctgcaaagctgatgctaaccccccagccactgagtaccactggaccacgtaagtgctgcagggctgaccagtcaccttggaagacagctgactggaccaygggtgatgaggggcaaccatcctacctccaggagcctttaggcagggaagaaattagggtctgggctcagtaagaagcggggccatgagagaacaacccccacccccaacacacacatatacattacgtccatgtgtgacagtgtcaaggtcaatggaacaagctattctgccagaggggtttcctttgtgatctgcttccctccctcttcctaataaagagttttgtcgttttcctttggtgattcagtctgagtcactcccaccccaaccycccagtatttatttttatcaaggtgtccccagggaagccagtgttctggagcatctcagctctttctttgtccctattccttctctctggcacccccagattcttggggaggaggcagcagccagcctagaatgcctgtgctcatggagcacgtgccctgcggcccaccatccccttcttggcctcacggtcttcgccttgccttgccttcgccttctcccctccagccggctctgacagctggggccaaggctcttcccagagaagagctggatggaacacacagaaagacagggaygtggggaaccaaggagaaggttgatatgggtggccaggagacagctgcccagaaggagtctgccttctttttctggggagcagagggcactggtatgccctacctatgatcctccacttcctggaataaaaagtgcttctgaaggtgtgagtgggcagagcctgctggctggtttcagctctgyggacccaggagctgctaggttcaacagaatagctttgtggcctttgagggtcaggaggaaggaagaagatcctttgtccttggcaaatttgcaagtcacttcccacatgaaaaggtcctgtgacattcccagcaaaaacacaaagtagtggaatggaacatacttcctatctcgttacctgagtggcttgtcaaatacagattcccaggtctttgccccagtggttctgcttcaggagatctggggttagaaccaaggcatctgtattattattttttttttttttctttgagacggattttcactctgtcacccaggctggagtgcaatggcgcaatctyggctcactgcaacctccgcctcccaggttcaagcagttcttctgcctcaccctcccgagtaactgggactacaggcgtgcaccaccacacccagctaatttttgtacttttagtagagatggggtttcaccatattggccaagctggtctcaaactcctgaccatgtgatctgcctgcctcrgcctcccaaagtgctgggattacaggcgtgagccaccacacctggctggcatctgtattattaaccagctgcccaggagaccaaggaccaacaaccatgagacgtgaatggaaagtagaaagagcactttaccaggagtcccgagaattggctggagctcccatgctgctgcctgctagctgtggttccctggccttgaacctcaggtttcatctgttaagkgggaccggcacctacctagcctgcctatattcccatattatgatcaaatatgaaaagctgaataatataaaactaccaagtgaaagagattattattattatttttcttccttcaaagacagactctaccacacaagctcagcaaaaggctagggggcctggagccaagtgggtgacccaggaacagcttcttgaggctggagagtcataaccctacgctgtgtctcccacttcccacaggctaaatggctctctccccaagggtgtggaggcccagaacagaaccctcttcttcaagggacccatcaactacagcctggcagggacctacatctgtgaggccaccaaccccatcggtacacgctcaggccaggtggaggtcaatatcacaggtaggaagctgcatcctccccagcctctccgcacccacgggttccttcgccacctgcatccctcacctttgagcaatgccactgcaggaagattatctccttttcctgcttctctagttctcccttgagctctggccattggttttgctttgcttttctctttctttcattaaagggtgcaaatgagacagtcagggtgacccccaatcagagaggggcaggaggaaggctctgagagggaagaaggaagtgctgtttacagcaatgctgttttgggggccaatagaacctgcccgtagatctgccagcagaacacgctgtgggatgctggcatggtggggataggtttgcaggtggagctcatctcctccaagctctgcacctgtggtcaaggacctcttcatgggccagaaartgaggcttacctcaagcagggagactggagagaaagcgaagatgtagcccaaagccatagtgctttgtgtgccctgcaactgagctttccctgcagctttctgtcaacttatctatccgggcaaagggaggacaagagctaggatgttctgaggagagacttcacctgggacgtgaaaggagcatgggcttgatgtcagacagctgtgaccctggacagggccccccccaccatctgtaaaacggggacagtatgatgtaccttgaagggctgttgtcagaattctacgtgatgtaagtcaagcacctagcacagatcagtctgtcaataaatggccaatgttccgtgattattaccctgacctccatcatcatcattattattaatggaagcatcaaaacaagtccacacaggggtaaactgccatcacaacttcacatggggagcgtcttttacagtggacctgagctatctgcagggtgacagggtgaccgagtgtcttaaaaaaggaagtggtgtcccactgtgactgagatataggaagtaacatgctcagggacacagaagactggtcggcagttgctgggctccggccacaaagccactgcacacctgcaagccacgaggattcatgagctctgagccagtgtctcgggagtgggagacctcatttgtgggtatatttaggacacagctgcagaaagagccacgtgaagttgtccagggtctgcgcctacctgtcctcagagccgttctgtcacgtctctcacccaggggcgggagtgtggagccacctgctgttgtctgcaatccctggccttggccccgagactagtcataggaggaggagcatcagggttggagcctggggaaagctggggggtttccacgggttggcaggtggaaggggccggtgtcacacacttctccccagcggggaaggtccaagtacagctcaaaatgagcctcatggttacccaagctccagctctgagatactgggggagtcaagggggaggtgggaagggcagggcctgtgttccatgtggagtggccatagggaacatgaccacccctcagggaggcactgtcacatgggagacagcacagacctggcctgagtgttcacacactggctcttcctagctgtgtggccttgagcaagtgcttcacctctctgagccttggcttcctaacctctgatatggggatactcacacttgtctcaggcttcttacgatcatgcagtactccctgcgtggtgataccttcccctgatggtgggctatcaacatgtgaggggtgtgggctgggggcaggagggccgggccacctagggtcccagctggaagagggacacaacatggctcttgctggcagccccgttaggcaggagccagggacgcatggcactcactgaatcattgataggcccaggcgctgagcggctggcctctctcggaagggactctcagccccctccagaggactcagggagttggcctgagccttctcagggctgtttgttcttgtgctctcaggcaatttccaagcagcagctgacctcaccaccctccattccacgtcrgcccgtgcctgccacattctctggggagcccaccccrcagggcacagccatgcccttgctctaagccccactggtccagagggaatgcatgagcgagagggataagtggaaatttaatttttcattctgggcattcgttcgggtaataactttrccctgggcacatctggaaagggaaatgaggagtgactggggcagggcagaaggtgggcagcagggggtgtgctggagggacacgcatatgcagaacacgtgtgtgctgggccactgcacacctgcgcagactcgctttggcatggcttcttggggacctgggcccctgaggaaggagcactgagtggttgctgggagatgagtgagtaggcagggctggagggcgggatgcccaggccagggaagcatgggaaggaaaatggctggagcagagtgggcagggaggaaggagcaaggccttctctctgttggccacagggagtctctgaagggctctcagccaggaagcaccgtggcgaggtgtgtgggttagactgagcattcagggggctgtgtggatggcaccggcacacccgttaggagctgccaccatgagtgagtccctagtgggaaacaacaggcccaggctgtggctgtggcgatgggggcaccgaggagatggaccggacagaatctgtgtgtgcttccgtgggcacaggccccagagaacccctttcagaggcccttacacagaggagcagtttcatggggtgggcccagtggtcacaaaatgaagctccctcccttctccctctggggtaatgacaaggtggggagaggcccagggtgcagcctccaccagactgaaaaaaaacagatgaggcagcctctatccctgtgggtgtcgggaggagacaggccaggcctctccagctgggacccagcctctcgccactcccaagagcaggacagggaggctgccagggtgtaggatgtccatcccagggtgcagggcgtctgtcccaactcacatttccagtgaagcccgggctcatcccttgcaggtgagggtcacagtctgcccatcagtcctggagttcttcagacccagaattgcgggccttgaaggccagtgtcctggaagggaggcaggtgtgagcctgcaagtgtgcatgcccagccatggtatggacatgtgtctctgggcatgtaaatgtgaaccagtgtgaacaggctccgtctgcatgctgagtgtgcatgtgggagcccgtggctgtgccgtggcaacgtgccattctctgagccagcgaatggcagtgtgttgggaggtctgagaaggcagctgcatccgtgcctctgggaggattcggttctcccccagcttgccgaggccctgcctgatggtctgacacgaggcacagctgctgcagctgcagatggacagaagggcttcccagaggtggaccccaggcctccccactctccctgtggctggctgcactgcatgctggggggtgtagttcttgcagcttccaggcctaatctgatgccggagcatttcctgcctgaggaagcgccaggcattggtttcggaggcaaacccaaacattctctttgaccccaaacctccagatcctagatccagactgtaagccctaacacttcactccacctcagatctatccaaagcccccagcaccagcccacccacctcagtcagagaaccaggaccccaaaggcatgcagagcccccacttccccactgtcttggccagccagggaccccagaagagaggttacaacccttcaggaatagggacaagctgctccctttgtaagaggatgtgagggaggctggctgggcccctgccagcaaacacaaatgaccctgcrgcctggctcttctctctcctcccagctgcggcccttgcagctctgctcctggcacagagacaggagctactggctgagtgtaacagctggagggatggagggggaggggaggacgctccactccacgccagacagccccttctgcttgcaaatgagttagatccccatgcttctcctttcttctctccctcactcagtatcctcactcgaaagtctttgatrctggaaggtcatcccagccattctgctgctgctacacaggcccagccctaaacaaaataaccggggttctttggtcccaaaagatccccaggaaagagtaaacctccttaagacttaaggaaaaaagttggctaggcgtggtggctcacacctgtaatcccagcactttgggaggccgaggtgggcagaccacttgagatcaggagttcgagaccagcctggccaacgttgtgaaaccccgtctctacaaaatattagccgggtgtggcagtgcgtgcctgtagtcccaactactcaggaggctgaggcacaagaattgcttgagcctgggaggcggaggttgcagtgagccgagatcgtgccactgcactccagcccaggcgatggagcgagactctgtctcaaaaaaaaaaaaaaaaaaaaaggacttaggaaaaagaattaaayagaaggcctggaggagaaaaaaagcctagtgtcatctggtcccaagccaccacaccactcctcctgtcacccactccagagaaacaaggtcccagtgggccccatgcaggtttattcgagtctctccttacaatacttgctctgcctagaacaaggcttatctctaagacataatcttgccattgtagaattcattctgtcgtccaacagatacttcttgaacattgaccacatgacaagcggtctaggtgcttggtataaatccatgagcaaaacagacaaaaagtccctatccttgtggagcttacgttttcgcataggaggaaagacaatagataaaatacatttttaaaaaatatgtaggctgggcgtggtggctcacacctgtaatcccagcactttgggaggctgaggtgggtggatcatctgaggtcaggagtgtgagatcagcctggccaacatggtgaaatccccatctctactgaaattacaaaaattagccgggtgtggtggcacatgcctgtaatcccagctactcaagaggctgaggcaggagaatcgcttgaacccgggaggcggaggttgcatgagccaagattgagccactgcactccagcctgggcgacggagcaagactccgtctcaaaaaaaaaaaaaaagtagtaattttgaaggtgatattgaggaggaaaaaaagagagtaaggggatcccaagtgctagggaccacacaggtggagtgggcttatgagctgcagttttaaatagggtagttggggaaggtcttgatgagaaggggctatttgagctgtgtcccaaagagagtaaaggagtgaacctgggggccctggggaagtggcttycagggggcagggcagcccgtgcagtgtgtgccaggagtggggcaagcctgcaggaaagcgggaacagatgacttcagaggtggggcggggcgtagggcaagcagagcacgttaaggctctagggagagtcattggagggctctgagcagatatgttacacttcaacaggatttgtctggctgctgtgtggaaaacagtccacagagggaaaggatggaatcaggggagcagttaggcagctattgcaatcaataatccagatgaaagatgagagtatcttggatcagggtggtagtgatggagacggtgagaagagatcaggttcaaggtgcattttttttttttttttttgagacggagtcttgcactgttgcccaggctggagtgcaatggcacaaacttggctcactgcaacctccacctcccagctcaagcaattctcctgcctcagcctcccaagtagctgggattacaggcacccatcactacacctggctaatttttgtatttttagtagagacgaggtttcaccatgttggtcaggctggtcttgaactcctgaccttaggtgatccgtccgcctcggcctcccaaagtgctgggattacaggcatgagccactgtgcccagcctgcattttcaattataacttacaaactagttgggacaccagtcattcctgtgaaacagataagaccgtacactctaccatactgcaatgatgtggcttgagaggtccagaaaattcaacctagttgaggaagatgtaggagagctttattttttattgggtctctgctgttgaagaaagcacaaatgtaacaatagtgagcttatagactactgcaacacactgaaatgagtcaatcccaaatgatcatgaggctgccacttcctcaaaccctgtcctcattcctgcagaasagaagaactttagccatttgaaaactggcagaaggaccagagccagccatggtaacttctaatttgcatttatttgcaatttatacaggctttaccatgctatgtcagtatgtgattaatggaatgaccttagcaattgtcacaaccagaatgagaggtgcagaccattagtacataaaaattygaaagagaaaaagatcacggtaaactggagaagagaaggytcctgaagaargggctggagaagtgcaatcggtggggagggaggatgaggaaaggcactcctggcggggcaaactgcatgtgtaaaggcttgcagtaaggaatcaacttggataacaaggacagcaaggaaggtgagttgaccaaacccaagatacggttgcatgatggaagctttgaaggccagactgcacagcccaacaggcagttggggagccattgctggtctttgagaaagcgagtggttgtgtctacagagtgaagattaacctggtgactgcgggtggggtgattcaaggcaggcagaggcaaaaggaaagtgggagatttaggaatcgaccacagcagtaaaacctggcataagttccatggtggtgacagtggcgacaggaagttgtatcgaatggagagggtttagaaggaagatggcaaaccaggttggtacagatgggttttgaagtggtggtgagaattccaaatgagggtgtgctagaggtcagtttttctaatgtgtccacctagatatcagttatgtgagactgtcttggaggcaggaggtatggggttcatgttccagtatgttgggaaacatggcatttgacgtgtccctctagtagttcacagtgtgcacgagaaggtaacaggctctgatgcttttgtctaagccaacatctcgacccccctatttttgctgaccctttgagccaatggtttgagattccatgggccacagtttgggagatgctgtggagatacagtcccagagttgggcgagaactatgtaccctaaataatttggacagccagcaggataagggtgactccagaagttgatactagtctgtcactagkaaagaaagcagagggtcaaggctgagggtcccaggacaaagcgtccagcgagacagctggaacagagaaaaggagcaacacagctggagatagcactcagagaggaaagccgagaaccacggaatcttgtatgggaaggcaagggacatgtttcagaaaaatggcagctccctccatctggatgcttccttatcctcctggcctctccaagtccggcctcctccaagaagccttctctaatgccaagacacaccaccccgttcccctgcaccctgcacttccctgcctgttcccttaacatctgcatgtgctgtctctgagtgtcctttgcttccctggggaggctgtgagtttctcatatcccgtgactagcaggatagatgctcagtatgtttgctgatgggagggatggatgaagagaggaaggcaggtgtagacaggagagatcattcagatctgggtgagaaccgaggaggggggcaggcaggctgagtacagaggaggctaggttcttcccagctgcctctggggaacccctggtggaggctgctcccatctcgtggggagcagttgcggggcccttttgagggcggtaaacagatgggacctggtgagccgggagatgcttgaggttccagggaggctgctgcggagacaggcggtcaggacaaagatcccatggatatgtactgggcagctgctggctgacctgcaccgaggatggtggtggcaggtggggagcggggtcctccatggcagtgctcctctgccagtgcccacgtgtataggarcccctggggggtcctggctcagccgcgtgaccttggatgagtgagtggcctccccttccttgggccctgtgttttcgtcagcccttcccgcccaaattcctggaaggcctttcctctttcctagaatctccaccctgctgcagcctgccgagtgggayagcaccccacacacgccccaggaggagggagtgggctcagggaggagcatgattcccatggagtgagagatactgaatcagagagtgagctggcagcagtatacaggcaaacagtatacgggcaaactggccctttacgtgggcctggagcaaggagggcctgagcggctgaggtcagccttctgggcttgccctagacccgcagcctagtggctctgaccgaggccagctgtggtctctggtgccaccctgtggtggtgccaggaaccatttcccttagcctcaccttagggcctctttggcccgtggcatggccctggtttcagccaccttcccaggccctgtaaggcaagggaaggggcagtgttggccaaagaacagtactgtggcccggccccactggcacagaaagccacccacccagccttctctcctgtcccacctgcttcctttctcttcttttcacctttcctgcctcctcattttggctgtgtccacggrgcatacagatttgcacactcatgttcatcatgtcggcacaggcatgcaggccctcccagcatgtgctctctgggtggcaggcttgctatgayggcaagcgtgtatgcctgtgcatgtgcccacttgtgtgtactcgacattgccacgcacgcacacacgcacatgctttcacccccatttctgccgtccttgccctgtgcttgtgccctgccatgctggtgtcttacacttataacccaggctggcagcactgccaggcccccaccttgccctgcaggcccagaccacagccaagaaccacagccctagtttctggcaccttggcagctgattggcactcacggggcatctcctgagccartgcctgggaacctgttttccctgtgccctgcaggcagacaaaatcaggtgcagaacacctaggtggctcctggttctgggtcttggaagccaagttgatagtgttggggcagagtgactgccaggtgtctggcakaggggtatcagtgacatttgcacacgttctatgtgcaggagaagcaacgatgcatcattgctgggtggcctcaggcaagttctttaacctctgcaagcctcagctcctcagatatccaatgagaatgaatggcatacctcctcagggttgtggctgtgaatggcatggagtgggcagtgtgctgcagctggaactggcacacgtgtctcactgcaccatgaatagggattgagctgggccagcaccacaccaaggacagtggggatggaagaccctggtgctgtgggtactgccctctgcctctcctcttgcctgtctctcactccagctaccaacgctgcggcatgttagggctccaggatgggtggagtgctgcggggcctcgaactggagctgctcaaacctggggtgcagacagcctgtccttcctggcctctcctttccctgcctccctcccaccccctctacaccccaggagcacacgctgatgctgtcccctccatctcttttcctcacccagaattcccctacaccccgtctcctcccgaacatgggcggcgcgccgggccggtgcccacggccatcattgggggcgtggcggggagcatcctgctggtgttgattgtggtcggcgggatcgtggtcgccctgcgtcggcgccggcacaccttcaagggtgactacagcaccaagaagcacgtgtatggcaacggctacagcaaggcaggcatcccccagcaccacccaccaatggcacagaacctgcagtaccccgacgactcagacgacgagaagaaggccggcccactgggtggaagcagctatgaggaggaggaggaggaggaggagggcggtggagggggcgagcgcaaggtgggcggcccccaccccaaatatgacgaggacgccaagcggccctacttcaccgtggatgaggccgaggcccgtcaggacggctacggggaccggactctgggctaccagtacgaccctgagcagctggacttggctgagaacatggtttctcagaacgacgggtctttcatttccaagaaggagtggtacgtgtagccccccttccagagcctctgtctgtgaccgctcctccccagcccctccccgcacgccccctgcccaccccccacctcccactccaggagctgaacagagacttgcccagctgcccaaagccagccccgaactcctggggggccaggggagcccagggcagccacgacttggctttgtgttttatttcctccctctcctccgcccttccccatggtgttgtgttcgactgtggctttagtgttactgtatcttccctttacgggccccacctgcctgccctctgtgtagggagccctgttctcgtcttgtgtacctgggcatccctccagggtttggggagccagcctcccccgcccccctacactggaatttgtttgtgtttcttcactgggggtggagggctcaaggggctctaagagggaaaagctccccacacccccagatgctgctcctcctcccggctagagggaacccaacacccaccagtgaaatctgatgcagctgggagtttggaccttgggtctagacagctggtgcgcccaagaggtagggggaggggtgcggcttctccccagttcccagggagtcttgtttgttaagcggggccttgggcagtgttttcctgctgagggtggttttacattttttttcctcattggcccacagagagtggagttggcctagctctgacgcgtcccctctttatccccaatgtgccccctccatyaggggctccaggtgggctccagcccacacttgctctctgcctctgctgacacgtgcacacacacacacatgcacacactgctcctctctgcctgctttcccctggagtcccatgccctgccccatccagacactgcccaaggcccacccgtctatttccacctcattccccctttaagctgagaatggggtctgcctatagaagcttccagagacagctgagactgggtccccggtgcctccaccctaggatctcaggcctgccccaaactgcttcttacagcgtggaggtttctctgatttctcccttatctagcaacacttggttcttttggctagtcagggctgggatcccagggggatccacctgcaggagtcagaggtaaagaagcatccacacggagggtagtggggaaggaagcccacatggcagaagctctgcaaacacagtccgagggactgaggagtccatacaatgcctcacacacaaaggccattgtcaaagcctcgggcctggcagaaagtgaggggggtggggccgctaggccacctcctgctcagccacccctggtcctcattctgggatgaggggagggcctaggagaagccctccctttcagtgcagattcccttcttgaatgggacattgagttcctatcagccaccccagactgggtcttcccatgtatataatggaggaagacccctcccagccctctcagtcccccagctcaaagtgcctcagttcctccatctgctcccagatcccctggcactctagacaggcatgcccatgggaaggaccctgggatggagaggcaggcttcgcggcccttcatgcctgcccactgggattccagttaactcaccccagggtgtcaggggctctgcaggatggcaagtgttggggaggagggaggcagaccactctgtgccccacgggcactgacccaccctgccataggtttctaaagggaggccaaaaccctcwcccctcccctcccctccctggtgctgctattgaaccccctgccagctccatttctgccctggcaaccctgggcccagcaggtgggtcgtcgttgtctggccctcactgccctggccccagcccaggctgcccagtagccacgtagcagaagtctgaagccatgccagccctggtgcggctctcccctctacacatttggggtactggatagggtgaagttaggggagaaaattgtggagtctttccagccacagggcagagggaggtggaggagctgggctgcttttcccagcagtattagtgtcccccaggacaggggaccttttccacattacatcactgccccatcccaccttacaacactctggcccctctgcttggtccccttttcccccaggcaggaggcaatcccaggggcctgcctgatagaggcatttcctgtccctgtctcctcctgcatctcctttatcctgcactgccaccctctattccccattctgtgttggactttgaagkccccaagcccagccaaagcactgagttcccccttaagacacctccacaccctccccacaagcaaagcacaaattttggggtccatgtagcatgggccacgtaggaggctcctgacttgccaggggcccagcctcagcatacccaccgagcagctgccagcctgggctgagggtgggcatgaggcaggagtcagcacttggacctagggatgtgaggttttctgtgccccaagtttgtgggaaggtgggcactrctgctgggcccacagacacagccagctggcaaaagggaggtctagcccagcagagagatgaggacattttgcttctccttcatgcccacagcatgagctgagcttctgctttgctggaaatgaaataaacttggtatgaattgtgccaaggcctccccagttgtcatcctgcctcttgttgccctccctgtccttgccccccaccccacacccatgcccctgtttccttacagattttgatattgttctaatgtgtaatagaaccagccgagtccccttttatcagaagggtctgaaaagcagcagcacagagtaggtgaacacaggcctgcaagtgcgaccacctcagacccagtacgtgtgcccacagtggacmcactcacacctccaacacacccacgcgcaggcatgtgtacacgcatgtacacacgcatgcatgcacagccagatggccactcagcacagatgtggcagagggaatggtctgatcctgctgaaagccattaaggagaaacgaatttcccagtgcccgggctgcaagagagccttataggggccctgtttcctgggcatgcgcttcctctgccagccaacccccacttgcccaagtcactggtgcaataacttttctgccttcctcagagcagagaaattgggaattgtgttaggtgggtgtgggcagctctgctgagccaagcagacacggatgtcccctcttctgggaggagggtagtgctcccaggcctcaggagtccagacagagacccccaaagcctgactgccaacagaaaccctctcctagtgaggggcaggtgggtgygccccaggtccccacacccacagggaggcttcacacactgcccagtaccggggatgccaggaggcaggcccctctgctgctgccactgctgccaamactgcccagcttgtgaggccaggaggagcccctgtcccactcggtgctgctgctcttctgacccctgctgtgaggaatgggattcttggtcgaaaaaattggttttccttttttgtataaatgaaaagaatccaggagaagctgccaccctcccctcccagcgtgatgcgctaccttgcttcggcgtcttgtcgccctttccgcctttggtccagggacagcccagcagatcctcctggttctgacctggggggtgtttgcatcacccccttttacttgtattaaaaaaaaatgatgggttgaaaatgtactgaggattaaaaatgtacttttttataaataaagtgtttaaaamaaactggtttgcatcccatcactgccctgctccatggcagtgggggcggggaaggcgtggagctggaggggatggcacagagggatagtgaggggaagggaccccccaccccatgtccaggttccagggttccagaggagcaggagccctgagggagactgctcacaggctgccccggaaccatcttccatgcaagtgagaagaccatggactttgacgacagcatcgcagagggaggggtgggcgtccacagacacaggagggaggcctttaagaaagtaaggcctgagagggctgggggtgcacacagcagagagggaaagccctgtgccggctggtgccctcctaggggtacgggtgcctcctgccccagattccagttcccctatcacccactcctgctgtcctgttcctgccacgtcccctcctgtggctgtttggagaagaaaaccagcagtgtcacgcctgccgtgttaggtccctggggacggagaagagctgagagctttatcctttcatcttctatttcgaagctactgccccgccccatcccctgcaagctctccctgygacccacccctcctgtacccccccatttttctccagggggctggttgtttggagagaaggtcttcttgttcctcggttacctccccgctctccccaccagcaccatctgcttcccatctcctgggctggaatgcaggacaaatcgatcctgggggtgggagtggcaggggcttcagagactgccccatcccagccatccctccgtcaccccccgcacccagtarcatctcctttcactgaaatccacaccaacgacccctgggaaagggagggggtaaaatgatagagccaagatggctgcttagcagaaaaccctcctgcccattgtgggcaaggccacatcctccacacccaggattggggctggaygggcagaagtaggcgtgcagaaggagaagccagcagctgttggcagctggctgagcccccgctggaaggccaaacccagcatcctagaaggggctgtgtttagatgttgatattcgaatgagatgcaaattggttgtttaagcggtcacttcctcagttttccaggctgtccgtttaagttaatttttaatttgtgcaggcaataaatgcgtaattacattattaatacattggaagagagcagtggacagaacgtcctaattggcatttaactagagcgttccggcaaattagccaagactttctccagcagcggaaggagggcaagccaattagtctcaggcacaacccctctggacagagctttgggctggagaagccagactcagtcctttccccaggccttggtgccaggatgtccccttacagacatcccggcccaaaggatactgggagtccaagggcatactcttagtcttctagtccagttgggccttggaagaactatctgccaggctgtggctccttctgcccaaaccacaacccttgcctccatccctccagcaccaccctcagcagagcagaggaccaaaggcctggaagcagcacctgtctgagtgtctaagttcccccctgrgatgtgcccaccatatccctatcttggctggtgggcccaggactaagctcctctctggagaccgtggaggcctttctctccgttcccaatcctacccactcctggttgcagatggttaaggagataaacttgatgaattgaggaattcatttattcacttacaacacatttttggccactctggcactgcaatgctgtgacagccacacccagcatcccagctctaaggaattccgaacgctgggtatccccaattccaaaatggccacaggctgtcgcagagctgtgtgtaaagcgctggggtagcacaggacgggagtgggtcattgtgtttgggaggatctgaagcgacatttcacctgggccttgaaggatgtgcaggagttctccagacagagatctgttaagagtatttcgggcagccttgagaatttaccatcttacagtcgttgttctaaaagagatcatcctaccccaacacactcattctgcacatggagaacgaaaatctagagaggaaactatgatttggcccacgaatgcgccaatcacgctcaagagcacagccacatcctgagagcagcaggaggggaggaaccyagggraaggggtggcaccggcctgactcctggggggatgctagatctggtacaaacttctgttcccttacaaagtagcaagaacccccagtgggatataaactgagtttgcaggatccatatttggtgttaagtggagttgtcggagtcagatggggctcatcrgggaagacttcctggaaaaggtgctatctgacrtggtttgaagaatgagaaggacatggattgggtgggaaagttggaggaggaaagccytctgaatgcttgaggggagtgccagctagacctgcttctgaaaccacctctgtaccggtgcccacagctggaggctctgcccccacatcctctagacactatgccgagcagcacgatgcagagcagtccttgggttctacctagttgttggcttcttggaccccagacyctattctctccccgggtttaccggcttgatggcagagccaggccaagtcctgctctatgggggactgcggttccactccccatccccagaactactcccagatgaggcgctgcagtcaatgtcctcaccccagcctcccttctgccaagcatacctcccacagcacacacacagcacatacacactccaggagctggggcytcatctatgctggcccctctggcaactctgcatccaagctcatcttgagctccatggagaaaagcacatggctggccgctcggcttgagaaccagccgcagggcatcatcaacatacatcacaggccccattgagcgcagagaacttaacccaggctacactccagaatcatctggggatttttaaaaatcaggccctgccccacgccaataggttcagagccwctgggattgggattggggcctasacagactttttttttttttttttttttttgagacggggtcttgrtttgtcacccaggctggagtgcagtggcacaatcacagctcactgcagcctcgacctcctgggctcaagcaatcttcttgcctcagcctcccaagtaggctatgggtacctgccaccatgcccagctagtattattattattattattattattattattattattattttatagagacaggggtctccctatgttacccaggctagtctcaaacttctggcctcaagcaatcctcccaaagtgctaggattataggtgtgagccccgtaacaggcttttttttttttttttttaagacaaagtctcactctatcaccaggctagagtgcagtggtgcaatttcggctcactgcaacctctgactctctggttcaagtgattctcctacctcaggctccccaatagctgggactacaggcacgtgccaccacgcccagctaattttttgtatttttagtaaagacagggtttcaccatgttggccaggatgatctcgacctcctgaacttgtgatccacccacctcggccttccaaagtgctgggattataggyrtaagtcaccgcacctggccctaacaggcgtatttttaataagctacccaggagattccaatagacagccagcgtggaggaagaggccgccccaggtgtcagtcatgaggaagaggtrggtcttgagacaggaaaataggactgaaggggtgggaagttgggttattccatgagttaacacacatagggtttgagtgccgaacaatgctatttattgttgtcatccatcactttcatattcatcatcatcgtcacctgtgagacttgggatcccggatgacagtgactgcaatggaggtcaccacctgaggcaagtagggggcaggatggagccacacccgtaatcctcgtgaagcaggtttttggggtttagaccacctataggcgcttgttccctgggcacctgtcagaaggggaagagggattatgaaagagcccaggctggaggtcccatagccctctctgagtggagctcctggctccatgttgctgtcaacctaggagaagtgaatgtgcttcatgaaggaaggtggcagttcccctatatccccgttaggcagatgagggaggaccctcggggagaggcggaaggggagggtggcagggcctgtgctctttgagtcctccgctctctgcctgagtacgggcctgaagatccctaacgaaggcctcttccattccacagtgagtaaagacctccttggggatgactgacccagagactagctggccagggtcccccagcctgacctcctgctcacrcccaccatcccctcagtagccagcttcttttcattttgcaacactcctgggaccctcatccctgaaagcccccayggcatccagggcaaaaagggacagcaagtaacagaacggcacaagctgccttccaacctaggctggcagccccttgaggactgggatcttgtctttttcttttttaatgtgatgcttcacaaatttgcatgtcatctttgcacagggccatgctaatcgtctctgtatcgttgcaattttagtacatgtgctgccgaagcaagcactgggatcrtgtgttactcatccccagtacccagcccagagctagcacagagtgggtgctcaacagaggctgaaccaaattgaactgatcaaaatgagagtcaaaagaggccttttagctgggcgtggtggctcctgcctgtaatcccaacactttggggacctgaggtgggaggatcgcttgagaccgggagtttgaaactagcctgagtgacatagcgagacttgcatctctacaaagaatgaaaaaattatccaggtgtggtgaacacctgtggtcccagctacttgggaggctgaggtgggaggatcgcttgagcccaggagttggaggctgcagtgagttctaattgtaccattgcaccccaggataagcgacagagtgagatcttgtgtcttaaaataaataaatcaaaataaaagagacctttcaggtgktgaagcccaaccttccccaagacaggggttttccttcaaatgtgcccagcctctggtgctgggcaattcattacctctcaaagtaagccctgatgccacagggctacccttctatgcggacaaaatttccctcccctacgcttcacccactggtctaggtatttccctgggaagctacacagaataactccatctagccttcttgggatagtccttcaaatattggaagatggctactcctcaccaaaccactttttcagatatttaaacctatgctatcgtcatcaggccacttagcaacacagctgttaggagcctgggcttcagagtcgggcaaacctggtttcaagtcttgactccattgatcagtagctgtgggaaagcattgtcacaatggccagctcagagcaagccctcacaccaacatcaaacaaccccacttacctacrgaccagtcgcagtgtgtcagtgtgtgttcaccaactaccacaaatggacgcctctggtgtagaatgttttttatttttagtacgggatttttaatagtgggagaggccatacctatgtggaggtagggagtctatttcccatagactgtctgtaccttccactcaatctgattgtgagcctaaaattgctcttttaaaaaaaaaaaaagtctgttacccagtcagggtggctcacgcctgtaatcccagcactttgggaggccgaggtgggtggatcacctgaggtcaggagttcaagaccagcctggccaacatggtgaaascccatctccactaaaaatacaaaaaattagccaggcgtggtggtgggtgcctgtaatcccagctactcaggaggctgaggccggagaatcgctagatcccaggaggcagaggttgcagtggaccgaggtcgcaccattgcactccagccttggcaacaagagtaaaacttcatctcaaaaataaaataaaaaataaaaaataaatgtaagtctatttttaaagaaaagtccctgggccgggcacagtggctcacacctgtaatcccagcactttcggaggccaaggtgggcagatcacaaggtcaggagtttgagaccagcctggccaatatgggaaaccccatctctactaaaaatacacaaattagctgggcatggtggtgggcacctgtagtcccagctactcaggaggctgaggcaggagaattgcttgaactggggaggyggaggttgcagcgatctgagattgtgccactgcactccagcatgggcgactgagcgagattccatctcaaaaaaaaaaaaaggtgttcctgaagaaacacacacacacacacacacattgccatctccctcccattctgagggccaggtattaaatactgatccctggaactggtctgaccagcagggaatgggggtggaggggtgaggaattgtctgtgtgtcctccctgaacctggcctaccccctcttacacagtgggcacagccaacccatctgaccttaggaggttggcatgggacacagaggggctcaatcctggtggttaaacttctgagggcaagagggggttggatggttggatggatggatggatggatggatggatggatggatggatggatgaatattcrgatgggcaagtaaacctttgagttgttttcatgtgtgccacctctaagcaggtcttcttcactctgtacttgggctgcctatttactccccaaatgtaattttcatgcatccctgcaatgttttatcttggtgatgagggtcagcatttcagccggtggcattccttttggatgcttattccatcagttcagtccacagcakacatttatagaaaacctggtgaaaggaaagagacagggctttagagtcaaactgaccttgatcaatcccttgttccaccacctatcagctctgcagaccttcagcaaggtgcctgccttccctgaattttatttctcaatctacgtgagtagactgctgggatgaataaagatagttcatatatggagtatttgtaaaacaggtaatagggatacttgccaccgacggctgtaaggattaaaggagaattgactccttgtaaagcactcaacagaacacctagaacagactgagcgctcagctgcgttgaactaggatagtattcttacttattgttattttcaccactgggtatctgccctaagcagggaaacagaactcgtcatggaaacaacatcaagaagtaagacacttgccaagttccaggtaggatcccagctctgtgccttcctggctacgtggtgckcaccactcctttattttctctctgattgacgtcgtctcgcaccacgacccaccagcctgttggaggggcgcgggtctggaggaacggggatgtgtccctcagggcagggctgggttgggatccccgcgccgggccaccctcctgcaggggacactgaggccagctgcaggaatgtgaggccacattcacccyggagcaaaggcttccagtgccttctacagtttaatccacagaaatgccccgggagccacctgacataggaagcgagaggataggtctcaaccgtgatcatttttacttgccgggatcctgtgtaaggttttggtactttgttatttttcattttcaagcttttttattgaggaatacggtaacaactgtgaagtgcgtagatcttagggcttcagttccatttgtacacacccatgtcaccacccccggatcaagactgtgagtcattcatgtgccctcccaggcatgacccccattctggaacttcacagaaatggagtcatacctagtctattctattcatagaatacaatcgagtatactatttttgcagctctttcagtcaacatgatgtctgtgagcctcacccatgaggtctgttgtccattgctgtgtattattatcccaaagtgtgaaaaggccacagtgtgcctctctcttgtaccatcagtggggatgtgagcagtctccaggctgggacaattaaagttgctacaaacattcttgtatgtaactttggggtccatcaccctcatttctgctgggagtggaactagggttagtagatacaatcagtgttccagagtggttgtgccaatgtcgctcccaccaacagcgtatgagagttcccatggctctgcttctcgcccactcttggtgccatccgtccttttatcttttagtctttctggcaagggcatagtggtatgttattatgattcagtttgcatttccccatgactaaggatgttgagcactttttcatatgactatcagagatgtaggattttgaaagtttccaaggcttttaaaaaagaatgtttgaaggcctattgtcatacattccctggagctcaagaggaagggttrgtgtgtatctggtctgccaggtgggggccctcctagaagaaatccctgttccggtggcctgggaggcactggagaggctgggacaggatgggtggagtcagaggaggagggggaggagatgtgctctgggggattcccagaagaataggaaggacaagccagccatcaggaaacaggagtcgtggggcacaacagagtgattggcatgaggcctcgaggtgtcatggtgaccacaccgggtggggttcgctggaaaaccttcctctggtccccacaattgacccgaagcaatggaaatttcctggggcgttaatgacaagaaggacaggggacagcaaggcacaccaaatgggattttccctgttgactataatgggttggaagagaagggcaggcagtcagggctggatggcagccggcgggagggaggtaatatgctggcgagaggcctggactaggaggcagggggctgggctctgcaaccagctctgccacttctcaccaggtgaccttgagcaaggccctttgcctctctgattccatgacccctctctgcatgtggaacaaagggcctggcaaatggaagatgggcgcctagtggcctctcccaagttgytcctgaagacaaagcagcagggccaggtagcaggtccgccccagagctcttagacagccctgacagtgatgaatcaccgcaccccactccatctccatgatctactgcaattgatcctgagcccaggtgcctggggtgatagtggccaagggcagcttccagagaagcgtggtgtgtggcagctgcagtgggagtggggggattggggtgggcatggtctcatccctcactgtgagagtgacccactctgccctccctgcagagaagcgaaggagctcccctgctaatgaaataaacaatccaagcccccacgagaggggagcagagaaggggctccagggaaaaccacggtaggagcaggctccccatgtctcctccgacagcccacttaaggagtatggggtggcgaggacagaccccccccaagaaagactggggctgtccgtctccaggatttcctccacagaagtatctgttcaccctaggaagatctgggggcttgatcaatgaaaaccataggtctctcacatgatactctttctgaagacacacccaagccccaatgggaattggagcccccagctggctggtgttggccttcctgcaggctctgggataaggacagtacccaaagttccctgactgggaaggctctccctctgaaacactctgcctcctcttgttttctgctgttacctcccagaggtcaaattctcccttccaaagcctgggctcatgggtgtcctattccacgccctattcttttgtccctgtagttcaactcatgcaaaccccaagcaagaggtctaactacctatccaagaattacagacctttggaacctgatggaacctcaaagatcattctccccaactctcaaatggggaaattgagtcccaggagcctaacaacagtaagaattctttacatttatatgatgtttggaaattacaaagtgactcaggagattttaaaaacagctaagactaacaatatcactccctaagtgccaggcagtgttcaacatactttataacattgaatcctcacctccagccctggaggtaggtattattactcttactatcattcccaacacagggacatgaagacatgaagagagtttcccaaagtcccgcagttagccactgaggagctgggctttaaacctaggcagtctggccccagaatccgtgtctctaaccactctgcaaccctaccctctgcctgctgccgtagaaactgtgaagggcagagccatatatgccctggcatcagggaaggaggaaggagactgcaccagcctaactccacaggggatcccaggccccatacaagtttttgtacacccatgtatcagcaaatgccccaggtagggtgaaacctgagctcgtgggaacggtgtttggtatcaaatggcgtcatcagaggcaggccgggctcatgaggaaagacttcctggaaaagatgctatggaagatgattttgtagaacagaagtgatctggagaagttgtagaatacacagcactgggaaggagcacagacctctgtcaagcctctgagccsargctaagccatcatatcccctgtgacctgcacgtacacatccagatggccggttcctgccttaactgatgacattccaccacaaaagaagtgaaaatggcccgttcctgccttaactgatgacattgtcttgtgaaattccttctcctggctcatcctggctcaaaagctcccccactgagtaccttgtgacccccactcttgcccgccagakaacaacccccctttgactgtaattttcctttatctacccaaatcttataaaayggccccacccctatctcccttcgctgactctctttttggactcagccctcctgcacccaggtgaaataaamagccttgttgctcacacaaagcctgtttggtggtctcttcacacggacacacatgaaaccctcagtggccagaacttcatttcctcctgagtagcccaactctgctggtggggctgaccttgacagatttctagtgagtctgcagctggatgatcaattatatcaggagaagaaataggtgctccagaaactctgccattcccgtgtttttatatttcctgtttttcttattttcctggtaacattcctcttttttttggagacggagtctcaccctgtcacccaggctggagtgcggtggtgcgatcttggctcactgcaacctccgcctccagggttcaagcaattctcctgtctcggcctcccaagtagctgggactacaggcccacactgccatgcctggmtaatttttttgtatttttagtagagacggggtttcaccatgttgcccaggcttgttttgaactcctgagctcatgcaatccacccgccttgacctcccaaagtgctaggattacaggcgtgagccactgcacccagcctttttttctttttcttttttttttttgagatggagtctcactctgttgtcaggctggagtgcagtggcacaatcttggctcactgcaacctctgcctcctgggttcaagtgattttcccgcctcagcatcccaagtagctgggacgacaggcgcacgccaccatgcccagctaatttttttgtgtgtttagttgagacgsggtttcaccatgttggccaggatagtctcgatctcttgacctcgtgatctgtccgcctctgcctcccaaagtgttgggattacaggcatgagccaccgtgcccggcctggagcctgcttttgaatccagcactgtggcccagctcccagatgcccagggattgtctccattggccttgaactcacatctttctgactctgcacacagtgccagtgaggcaggagtcccactcgtctactctagtgctgttgccacccatgccctcctgccccagcctcagacccaagccccaggaagggaggccaggagtgtcggagccctgccagcctagatgagaggaggctccctcagggccacctagacccactggaattcccaccctcagggaaaatggaagcctcctgggtgtggggagtccctgtgcagtggccagcaactgagggagggaagggggctggagagacctgacaaagaccccagacactcccacagccctccctaaacaggcagcttcctgggctctgccccaggggtttcattggctgggaccctggaacatagctgtttttagagctcttcagggcacaataaccccaaaccagtgatgtttcgtttctacagaaacagtctcaggcccgttgctctgcccagctgtcctgctgggtgctggacagtggctccaggaggtctcagccatggtgggtgatgaagtatcctgctggtgctggaagagtctggtgctcatcttcatgcagctggcccagcaccannnnnnnnnnnnnnnnnnnnnnnnnnnnnnnnnnnnnnnnnnnnnnnnnnnnnnnnnnnnnnnnnnnnnnnnnnnnnnnnnnnnnnnnnnnnnnnnnnnnnnnnnnnnnnnnnnnnnnnnnnnnnnnnnnnnnnnnnnnnnnnnnnnnnnnnnnnnnnnnnnnnnnnnnnnnnnnnnnnnnnnnnnnnnnnnnnnnnnnnnnnnnnnnnnnnnnnnnnnnnnnnnnnnnnnnnnnnnnnnnnnnnnnnnnnnnnnnnnnnnnnnnnnnnnnnnnnnnnnnnnnnnnnnnnnnnnnnnnnnnnnnnnnnnnnnnnnnnnnnnnnnnnnnnnnnnnnnnnnnnnnnnnnnnnnnnnnnnnnnnnnnnnnnnnnnnnnnnnnnnnnnnnnnnnnnnnnnnnnnnnnnnnnnnnnnnnnnnnnnnnnnnnnnnnnnnnnnnnnnnnnnnnnnnnnnnnnnnnnnnnnnnnnnnnnnnnnnnnnnnnnnnnnnnnnnnnnnnnnnnnnnnnnnnnnnnnnnnnnnnnnnnnnnnnnnnnnnnnnnnnnnnnnnnnnnnnnnnnnnnnnnnnnnnnnnnnnnnnnnnnnnnnnnnnnnnnnnnnnnnnnnnnnnnnnnnnnnnnnnnnnnnnnnnnnnnnnnntcaccaccatcaccagcatcaccaccaccagcatgaccaccaccaccaccaccaccaccattaccacctctatcaccaccactatcaccaccatcatcactgccaccaccactgcaccagtaccatcacaccaccaccatcaccccaccctgaccctattcctattatttctgggcgccgctcagtgccaggctctcacgtgcttacctcatttatttctacccgtcctccctttttttttttttttttttttttttttgagacggtgtctcactctgtcacccaggctagaaggcagtggcacgatctcagctcactgcagcctccgcctcccgggttcaagtgattctcttgtctcggcctcctgagtagctgggattacaggcacccaccaccatgcctggctaattttttgtatttttagtagagttggggtttctccatgttggccaggctggtctcagactcctgatctcaggtgatccacccacctcggcctctcaaagtgctgggattacaggcgtgagccaccgcgcccagtcccttttctcccttttacagaaaactaaggttcagcacagttaaggtcacactgctagtgaggggagaatccagtcatgactttcccactacactttgtgcttttgcagatttggtgcttccccccgccaccccctccattaaggaagatctttgtgagaagcagatagggaggaaagagttaggagctaggagagggaagagggcacccagaggaggtgggcaggctgggtgtgtgacagatcagccaccccctccaagaggactgggggtcaggtccctgcgcagcagggtccctaacagggagatagtccctctcccctcaggaatgtgcgtgaaatcccagtaactctctccagctgggcctgagcttggagggggttcagagtcggccttgctcaggttccttcttactcctaatgacaactcaaggtgtggagggcagggagtggtggggcaggggtgctggtgacattggagacagcaytccagatagagggaacatcctaggtgaagtgggaagtgacaatcctcaaccctttccaaagggggtcacagtcacacacacacacacacacacacacacacacacacacacacacacatgcgccgcaagctctggcccctcatcttgaggcctgcacaggcctagaccagttgggggtgtgtggcccatggatggtgatggtgaagggactaaggaaagctgagagccagcacgagaaaggccaacaggcaggatgagatcagggatgcgagcctcagctgcttggcaggtctgccacaggagcaggcrtgtccctgccctcaggaaccaaccctcactaggcaccgactgtccacagccactatgctttaacatgcagtattacctcactcatggccgacaacagtcctgctcttatttcatttcacagacgaaaacgttgaggctcaaagggtttgagtgacttgcccaagattagacagctaagaaggtggccagctcaaccttgagctatcttcctctgcagataaactgagagatrgaggcagtggggggcatgaaaatggccccaggcactgcactgagaaccaggttgcctgggttcctccctcacctccctcatcagtgagctgtgtgaccctgagcatttcaccaaccttctctgagctccagttaccatctgtcaacagactcaaaggggtgggggcatcaaataaaataatttaagtaaaagcacatgaaacctataattgatattatgataatgtgaccacgggtttaacttggcccagagagccagcacaggtgaagcagccgagattctacggaggggggatgggccaacatcatccccgttaccgtcagcagcaacttcatccatttctgtttattgaacagctaataacaaaaatagcaaccacgtattacatattgactatgtgccacgcactgtactaagcactttacatcagctccagggagatggactggaagtcgggcaagggaggaaagagggcaggactgcagagctcagggcctccagcctccatccaggaggtctgaagaakgggacttcaagatgacctccacctgagttcagaaccagagcaaattctgtgtggccaaggagaaaaggctttttgcactgaggggcccaccagaacagayacaaggctgaaatgcaasccagtccaggctagaggaagagaccgggagcccaactcaaggaaaaggccaggaggcaggggactcccagcagctccagcgcagagcccaccgaaggccacctcaggctgtagacaagagggttgagcctcctagccctatagcctaagagaaggggaggacagaggcctggctgagtctgagccaaggaaagaactctgtgacttcttcggttttgagtctctaggtgggttccctcaccaccctggctcagaggaaagcagttgaaagagttccctcctgtatgagctaaactgaggaggagaggggtatgtcccctcctgagcaagggraggggagagtcccacaacccccacgtgtgacggtgcggcagccagcccagcttgcagttctgggacgatggaatggaaatgagatgttgagacggagacagagaaagctggaaacacccagcaaggcatgtgtgggacaaaacatgggcctgactggaccttgggggacaggctgaggagcttagcctggatgctgacgctacaggagtgcagggatggccactgttggtccctgagcatgaagggtgtgccagaagtcctgccagcctgcaaggtcccctggctccagcctatgaagtcagaagcttcctgtccctgtggatggggtcctgggttctcacagttgggtttcaacgtaacaatgacattcagrtaagacttgggagccctcccagcagtgagaccgctggagtctgccccagaccttccgaacacaggagggttggccaggaagacttgcctccagcccttgcctctctggtcattgggggaaaggtcagtccagcacacgtgggctggagacatggccaggcagactcagccactggatgggccctgggtggtaaartcagcccttcctccagccaatttgacctccaggcaccaagtccaaacacccagcctgctctgagctcctggctccccgcaaacacctgtgtggcctgcatcagaggagacaagcagagggcagaccaacccaggacagcttcaggggcagaagtgccaagtggctgccctggggagctctggaggaggtgactccaggacagcccttatcaatccagctcatgagaaaggtagtgtctgtgtccccagggagaggcggcaggagagagggcattactattacctaatatcacctattagaaatctaaacctctgagcatgctctgccccctcctcccagccccctgattccttgtctktctccctttgcagcccatttcccagccatatccaatacttggaatttccctcrtataccccacatttcacacacgtgccccggtagccctcctcactctgcctacaatgttcttctcgcggtgaactcctactatgctatcaaaaccctgytcagaaggccccctgctctgtgggaagagacctctcttgcagcatgaatcacaaaatagcatacttatttgcatacgtgtatgactcctccaktagccagggggcaagcccctcacaccgggcacaatgcctggcacatagaagtgtgaggcacacgtttgtctaactgaaggaggaacaacaggtagggcaagggagcacgccgtgaagctggatgtctgggctcgcttcccaccctgagggaagcctggggtgcaggaacactgacatctggctgagaggggggtggtcgggagaagcaggtgaagattgctggctacttgggtgtgacccaaagctcctcgggctcccmaaccaygaggcctcagtgaatccagtagagctgttcctggaagagcagagaagccccagtagcacgcggcctgcagcccccagaatgaacccrtctgtgtttaccccctaaccatggatttcactatctcagtctgagggacaggaaaaccagatgcactgtcaccatgtgacaggtgagagaactgaggcccagggagtgtcactggtgtgacccccagaggccatccttgcggygtgagccaggaccgagtgcgggctctcccagggaagccattgagaggagcccaggccctgatgactaacaggacagagacttcagtggtcaactggacccaagtccagctgtggcggccctagctgtgggacctggactgctgacttgactgctctgcccttttgcagtacagcaagaggcacatagccaacctcccaggatcattgcaaggacagggtccagcccggagcctggtgggcaataagtgctccctggaggccccacccccaccccccgacactgattccagctctcccggctcacagccagacccagctgcctgcaggtgactgggcctgccctcaagcctgcggagctgggrgcgggggaaccaatttgtcacggtgtaaccagagagtgtctgggggctcaatgccagggttctggctggggccagcaccaggccccttcctcacagctgtcaaggggaggctcagagacaaagcaaccagggcccccctattcagggagggggtaggcagggctatgtctgataagggatgaaaagggggatggcaggcccatgccaagtgagggatgagaaatactaagaccccacagcctgaggcagggagaacagcacacaggcgcagatcccagtgccctcagccactgactatctggacgatcctgaacgaatkacttaacctctctgagctttatcttgctcatcagggataacattatctcattttgcaggctcaatacgaggatcaaatatgccccaaatcagcaaaggcacctggcacagtgccttgcatgccagagacttgaggccaatttctcctccttggatttcccttttcttgtccccacatctcattttctctccactagtatttcttccaccagggtgcgaccctccaggtgcatcaggcaaggcccatggtgacaatggaagttgcactcagatattgagagggtgggacagggagtgagggcaatttggagggaacaaaatcagagttatccactgtggccctggcacgtgtgaggccttgcccaccacatcccaccctgtttagcctttggttttcctaatgcccacacgagtgcattcacagactcacttcttatacagtcaaccctctgtatccatccatgggttctgcatccgtggagtcaaccaactgcagatcaaaaatactcagaaaaaaagaaaatggagagtagtgtcagcactgaacatgtacacctttttcttgttattcctaaataatgcagtattacaaccatttacacagcatttacattgtaccaggtattatgagtaatctagagctgatttaaagtatatgggaggatgtgtataggttataggcaaatactacaccattttatataagggacttttgagcatgcttggattttgctattcgctaggggtcctggatccaatcccccagagatgccgagggatggctgtgtttttgtttgcactgtaaggatgatgaaagggcccttatagagacagctgccaccctctcttggcaaagtggctgcagagtccatgaggggatgatgggtgaaagcctctgagagaagtttcctggaggcagggagtaagggctgaaatcccagccttttgtcctgaacctgtctcttcctcctgttcggattccatgtggggccaaccgtggtagaagagaaacctgaactctgtgagccggacagggtatgtgttcatttccctactgctccccctcccaccctagccctctggaaatgccagcctgcctcagctgtgctgagaagaaaaggggatataggtttgagttgtgtccagggaaactgaattcgtagcatccagcgtggtggtggctggactcaaggtgagagctccccctagtggaaggtgagattccagaggcccggtggaccctctcccagaactgcccactacacattcaggcaagccttcattcattcaccacacttactgagcacttctgcatgccaggcactgtgcagggctggggagacaagtcagacgtgyaatcacagtctgtagaaaagagactgaaagaagccaggcacggtgactcacgcctgtaatcccagcactttgggaggccaaggcaggcggatcacgaggtcaggagatcgagatcatcctggctaacatggtgaaaccccatctctactaaaaatacaaaaaaaaaaaaattagccgggcctggtggcgggtccctgtagtcccagctactcgggaggctgaggcaggagaatggcatgaacccgggaggcagagcttgcagtgagccgagatcgcgccactgcactccagcctgggcgacagagtgagactccgtctaaaaaaaaaaaagaaaaagaaaagaaaagagactgaaagagagtgcaggggaagtccagaggaggaaccccattccagtggaggaggcagggagggctctctggaggaagcacgtccagcttaaacctgcaggctggattggcctggcaaagaaggggaagaaagagagaccctggcagacagagtggctcctactagctacctgaggatgagaggaagcaggggctccctgtctgggagctgcaagtggtccaggctgggggcggcatggcgtttcctccaggaaccaggtcgtgaaaggcctcagcccttaacgctttgataaaggccacaaacygttggaggaactcttggaggaacttaagtagggaggtggcctgatctgatttgtagtttagaacgatcactctggagctaggcacggtggctcatgcttgtaatcctagcactttgggaagctgaggcgggaggatcacttgagctcaggagtttgagaccagcctggacaacacgggaaactgccttccaaaggcggccacagccaccagctgtggatggatggatgctggggccagagcctttgcagacaggccagagaggggttgcaaatttactgggagcaagataccccctccttccgggcactggaatggagcagagagaaggggagagagacagaaagtgagtgagtgaatgaggagggagtgagtgagtaagtgagtgagtgagtggaagggacttgtcaattccactttaggaaaattggctccatgatgtttactgcaaactgcaatttggcatctctattcaggtgctctccgtgtttaattatatgtaatayggtagtggagaggaaggagtacataagtgtgtgattttctccttagtccctaccccccactccacgctggggtcrtaaaggtcagaggtgagaaatcgagcccagcagaaggaggaactggaagggccagctgtggcttcacagccaagcctggatcgctgagaagcagcatgtgcccctggccacagggtcagtctctgcagcctcctgggcttcagggacagaccagtgtctccagctcagactgtgaaatacctcgacaagcccagcaatcttctgggtccatgaccaggtgggtccagaaggtgggctcagccccctcaccttagaccacagccctctgggcttttcacctatctgtactgaagaggcttggtttcccgggaggcacccccaggtgccccttcttcatcgaccctcccagctcctgcctttccctcctgatcctcaccctctgtcccaagctgggagggtgaagcacccattagttcatttgcttgtttaattgcacagggaggggaaagaagttaaactcctcaacaggaatcttccctgcagggccagaaatggaatgacggggtggggaccccatctcagcacctgctgcctgtccaggagataccctcacccttgttctacctccatgccccagatcccaggatcagagcagggtstggggttacagggtcatagggaactagaggaggagcctccatcccacaccggctgggagcccctcctagaactggagcaccatggggaggggagctgggggtgcaatgtcaaaggcagagtactgcctcagggtctgactctctcacatctctgactctctttgggtcacttgagtttctctctctaatcctcttccctgtcttttgtttccagaaaagccccgcccccagaggggtctgggaagtgcagccaggctcctggcgggcaccgtggccgtgttcctcatcctagktgctgtgctcactgtcttcttcctgtacaaccggcagcagaagagcccaccggagacggatggggccgggtgagccaggcaggactctgcccactaaactcccactggtctgctccccagcaccctgggagccccagacttaaagcacctaaacttgtgaaagctcagggcctttctagggcctccccaccctgggggaccaggaactaaccctttggcaggaagagctgaccctcctgagtggtgattgctacgtgccaggcaccgccccagttcaraagggcttcataaagatgcattttatcctcacagcagctcagaggagcaggtgcatgattacmatccacgatttatagtgaggaaactgaggcacagagaggttaaataatttgcaagagtttacgtgctcccagccgttgacaaggggtgagggcagacctaggaccagagaggagagagaggcacaaagtatatggggggagccaaaaccctcaaccatcaggataaatcatattttaatgtgatattttwaaaaaatcaaaatgaaagcaaaaacccatgatgaacaaaacgtccacattgtaaataaagacaggattagaataactgacttttcctttcgcatcagacacccagcacaccactgtgatggatcctgtctttacttacaatgtggacgttttgttcatcacggatttttacgttgattttcatctttaaaatcttgcatcaygtgttatttcccgtgctggctaaggctgtcggtgccgcataccgtgcacctgaggcctcatgcccgccctgggtgagggcccacagtgctgctgctggttcctccctgtcctttgagctaggaaacctgagactcacatggttcccatcccaagctgggctgggstccggggcagacacacctgggaaaggtggccgggcactctcagcctgtaacccatgaccctgaggagccccagcccaagctctggcctctcaggaggctgcctgggaagcagagctcccrggcctgctcttgtgagtggggctcagggaccggtagctgtctggtggcctgatggggagagcccccatgtgtgctcctgtgctgagcttaccctcattctgtctccaggaccgaccagcccctctcccagaagccggagycttctcccagcaggcaaagctcccttgtgcctgaggatatccaggtgggcctgaggcagcagaggacaaggtccctggactgcggggagggagaaaaatgggagatggccccaaggagagagcccaagctgaagacagagccgccacgccttcatggtccagttcccacaaggccaggtccatgctagagggatccatctgcctcaccctaagagatgacaacctaggactctccctacccagggcccccaggggacctcttcctctacctcacagtcctttcattcatttaaaaaatgcattgagcacctctcaggtgcctggccccaagctgggtccctgctagagccagcaaagctaaaggctyagggtgcacttgtgccctccaagacagtcaccagtgtgggggatgccagaatgggggtgcatgggaactgaggagtcccaatccaactgggagtccatgagggccacctggagcaggggcatggaaaggtctgtgcagcactcaccgccttctcttccaggttgtccacctggacccagggaggcagcagcagcaagaagaggaggacttgcagaagctgtccctgcagcccccctactatgatctgggggtctccccctcctaccacccctyggtaaggacaaccgaacctcgaggagagtgcccctagcccaggaccacccagcctggccatragcccagctgccttagagggaaaccasacagatgaggtggaggaggtgagggcaggggggcacagggaggcccacccaagcactgcaggcaccctgggcaaagggtgactggatgctggacagaccattctggaagactggcatttccaatgagtctggccccccagcttggtgcccacctctccctcccccaagccccacctccagctctgtaccctgcaccttagttcccagtgctgccaacggggctgccagcgggaggtgctgcctcttcctggcctcactcccagccactcagagggccagcatccacttgaatggctgccacctttgcccatatctggctcctttcagcagacttgggggcaaggggtgttacccatacagtgcagcccagagacccaggccagaccgcctggacccaaagataacacacactctcctggcactggcaggagagccaggcctttgtctccgtggtacagccatcctcactcttggcaggaagtaccaacatgaacccatctggaggtgccaaatcctgcccccagggaggtagcattcccttcccagggtactgagcccagagagccagcccagcgtccaccttctgatactacccagggtacaaaggaccaccagctatgtgctattcctcaaccaacctagagacatggaaatgagctagaactcactgtggacacaacatccattcctcaaacagcagctgggtagctcctgtaccactctccttctcatctgaggtgcacccccacatcccagtctgcacagcatgggcctgccggttccaacagaagggatcataatgacagtgtggaacacttgctggctagtcacttttcaaacattgttcttatcacatggattgttcaacaatctatatgataagtccttccgttgccccattttatagataaggaaacggaggctcagtgaacttgaagtgtcttagtctgttttgtgatgctataaaaaaatacctgagactgggcaatatataaagaagagagatttatttcttacagttctgggggctggaaagtccaaggtcgaggggtctgcctctggcaagagccttcttgctgcttcatcccatggtggaaggccggcaggcgagaaagcatgccctgagagtgagagagcaggaaggggccagactcagtttcataacatgcccactgcctccataactaacctgctcccttgatagagacaatgcatccgtgaaggcctaatctatgacctaatcacctctcattaggccccacctcccacacccttacactgaagatagactttccaacacacgaatttggggggacacattcaaaccataacaaaagtcttgcccaagatcacccagagacattggggaaggcttcacaccctgggaccctggctctcaagtccaggccctaagcaggcagcagccagcatgatgagcagatgctgggcagttcacctgaacacagggaagcctgggcagggcttgagagcctcagggtcacctggtaccgctaatgccaaggctgctgcagccccgggattactgtcagcaggagggcccagctctgctgcctggtggcccctcagctccagggacccagacagtgaacacacaggccagagaacttgggttcagagtcctgcgtcgggggccagggcattctaagcaccaagcagggcgagaatctcccacctgcagacaccagctcacgcctgcctcaggagagagagagcacatcatcccaggcccgaaagcaagggaggtaggggagcggggagaccactatttccagaaagagaaagccatgcctcattcggcgttctccaaatgggccttttcccttagcctccagtcaagagtcactaacctcacttgtcagagccatggtgaaagaaggggaggagaaagagggagcgatgggggcctggggctggagggagaaggaagatgatggaagggagcaatttggaaaatcatggaaactccagtgggatcccccatagagcgggcccaggctcggcataaaaatctctgtgacggaatggaacagctgcagctggccctaatccccactgacgcttctcggtcttgctctctgactgctgcccccacgcctggcatgcccagccctccctgggggcacaaggagcagcttcaggacagtgcccactgccttcacccgtccctctgcacactcatcctttcgctcccctcctctctcatccaagcccagaccctagctcatggccctgactcttcctcgtccctcaccgccttccctccccgggctctgcttatgttgggttggtggaatcccctgatgactgtatccattcaagagccacttgggacaaagagcacagtgagcccacctccacccaccagccacgggcaggagcggcaggttgagggggcgaagagagcacctacaccctatgtcctgagcccaggggccgtggttagggcgtctggatggacagaggcttgtgaacggcctgcggggtggtgtgtggaagtcaccagcggaagggaagctctggcgtcctggggaggctctgttgtggttgccaaaaagtgtaattccttttggcttacagagcaattaccgggcgagaaaaggatttatccccagaactcggattcgttggcgatgcagcttgtctacaagtcacatcattgatattatcaattctccttcccaaaaagtcacgagaaggagccaggcagagagcaggcgctgttcaccatggggcttcaagggaggtgggaaggctgcagggagcctgggggccaagctcagcggccccagaccgggtgggccaaggcccctctgtgtgggccaggtccatgatgcacacacacccaagggtgctcactaaggccgtggtactccactcaacacccgccatgatttctggactagggaccgctcaagtggcaggaaccatttagagagctgggaggctctaaactgggtctgaggaaggacttccagaggactcaaagccaatgtctcaacaaggagggaggaggagacatcccctgtcctaaggagaggggcttccatctccccggtgttgtgagcacggacagcccaggctagaagcagaaaactggacccaatgacctttggatggatggagtctgaagttcaggtactccaaggagcagatgccaagctgagattagacatgcaagagtcactgggggacacctgtgaaggacacacgagggagcagcaggtggcagggagagcctcagagcaggatgctgatccacctcccatgaaaggggatggggaaagaaggagggctgaaaagaaagtctcaggatggcagcgcagtgtagccaagcactgtgccatccttgggccatcgctgctattagaggactcctgcgtcccacaggaaagggcctgcgctggattcccagcctgtctagttgttggctgagagcggtctaggggaattgcggtctcagcacaaatgctgggtggatccagcggggtggcagctggggctgcagccagccacgctccgcagctgtccgggtccacactgccacggtctgccgcgtgctgagatctgctcttccatccaggggcagggagcagctcctcttcgattcagtgtgccttccttcctggggatgtggcccctgttgctgcagcagatcttagggccacactggtacccatcctctcctgtccatatcccttctcaattcccctcgctcggctgtctccacagcaggtcctggtgtgaacaaaagttttattcctgaggacgctgaggccttgatgagcacaccttcctcaggccagggttgttggaagtgtccattccttcaaaagagaagaggcccctaagtaggccaagcgtgggttccacacattcctccctagccccattgcacagaagcagcctggcctcctcctgctgatgggtcagttacccctgccaccacccaactccttttcttccctgctggccccaaacacatgcagtccaagggcccaggcagcagtcctagcttatagtctgtgggcccctccctcccgcagagctcagagttgtgggaataaaagcacaaaattcccccattgggtcactgggtgtgatggtaaccgtgagccactcctgctttcttctttgtttttctctttttcattttgttgttggttttgtttttatttttctgtttttgtttttattttgagatggagtctcactctgttgcccaggctggagtgcagtggtgcaatcatggcccaccacagcctctgcctcccaggtccaaatgactctcgtgcctcagcctcctgagtagctggaactataggcacgtgccaccacacctggctaatttttttgtatttttagtagagagggggtttcaccgtgttggccaggctggtctcaaactcctgacctcaagtgacccacccaccttggcctcccaaagtgctgggattacaggcgtgagccaccatgcctggcctatccttttctttttactttttttaaaaatccactcctgctttcatcccttggttcccaggcccatgtactcttcctagtggggacatagcatcctatagaggcctttcggagtattgccgccaaactggcactgcagctgtcatttagaagaccattccagcagctgccatcggggtgaccacttgattgaggctatgctagctgtcttttcccattcaggctgctataaaaacataccatgaaccgggtggcttataaacaatggaaacgtgtttctcacagttctggaggctgggaagtccaaagcatcaagctattcagtgtctagtgagggcaatactttctggttcacagatggtgacttcactttgcgttctcaaacggtggaagaggatagaagccctctgggcctcttttataagggcactaatcccattcacctcccaaaggcctcacttcctaatgtcatcccctcggaggttaggatttcagaatatgaatttgggggaataccaacattaagaccatagcattggccgtaattctccaggatctgtctggtttctgtaggggtcagactgattagttaaatgaagattagagagggccctgcacccttgcatcctttaggtctttagtgatgacaatgatctctgccatcttccccgtcctgagtacaatatcctttttgatttactctcttgggtgatgaggtagtttcagagtttccagttggccttcacccccacagacctcatgtgggtttagtatgtcaatcccaattctgcacttgtgcactgtgcaaacaccatgcctcagcagtaaatttgcccaatcctttggggtccttgaagggtgttgaatcccatgtcctgagaaagtgcgctcccaaatcaatgaattcttgtttattcagtctatattctggctcacttggtcaagaaccctcaaaatccaacccaggggtgctccccagacttctgctggtcaacgctagcttgctgttgctctcctggctctgcaggcctgtcatcttccttcttgatcaggtccagcatggacccagctgggttgtgctgggctttaaccccagcatcagcctacagccaggaacagaggagggggcatccgttgcctcgcaggggaaaggcctccacagcatcttccagcatgcggtgctgttagctctttaactagagaagagtgggccacccactcaaggttctccactcactcatcctcccatcggtttcagagacccaggttttccccagcagggcccttaccaagcacaacaggcctgccttggctgagctgccctggagccctctgattcctactctcacatcctgggtctgttcctcagctgtgtccactcctccacggtaggatatgggtctctttggaagcaaccaaagagggtctccagctctgaggttgagcctctaactgctgatggccctcagtttctccttctccaacatgacttaacaataaccagccagctctgctgcccttgcagccctgttccctgcacatctttcaaatgcgtgaagcactggacctgaaactcccctccaccacgatgttctcccaggtccctgctgatgaaagatttggcaactgggctaccactttgtgccaggaactctccggggcctgccttccactttgggtgaggtcttccttgccagcaggtgctggcccaattctctattttacctttcgccacctgttttcttgggaccctcctggtatcacccagcaggagtcacaggtcattgctttctgtcatctttgagacagattctacgaaggctaaaggcaaagtgcccagtgctccctgggcagccccacatcctggataaggtggtcccaaaccatgtagttgagctcctctccacttacctgggtgagatattcccaaacgacctttggccatcaccctctaaactcccaggcttccctggggctcagagtcaggttgctcctgtccagtggcacacagctagggaaggtctgcat

SEQ ID NO: 9917 - DNA, 12448 bp, Homo sapiens
tctcttttgtcctctccttagtgccctggcttcttcaggctgtcagggaagagcacctgtctgaaagccagttcacagaaggtgtcagccacagcgggtttccctcatcaggggtgagggtgtggtgaaagaataggaagagagggccatgggagattctaaaggggcaccgatggaggctgtcaagcacctgcaccctttccaggccccccctccacccgcataataaggtcctcaccctctgagtgccgacgctgaccctgtccgtaggaagctgaaagcctgaaatcaaagccgtttacccttcccctttccccactgggagctttgtatgggctcagcctctttaggatgactggagccatccaatctcctctccatcttccttctttgaaacctgtttgtggtgaggggctccaggccaaggcaaggttctatccattggtgctcacactttccctttttggtattctagctcctgccagggactgaccctccttcaggtccaggccaaggagccagcatcctttcccagcatgcctcactctctcccagcctggaaaattgaattgctttatcagactcattagagggtgatagggcctccccgctcatgggggaacaagagaagggaaggcaagagcaggctggcagcctcctgtctgcgtctcagctcacttcatcctgcctcccccaaccccaagcagcctgcagagacttgcaggctccaaatcaaatgtgagagccttctttggggggaggggggttggtgggggaggggctctggggagaacctagccctagtaattcaggtcttgtgaagatcagtagaatggctctgcctcaggactgaaagcagggttgggttgctgtggtaatcccagtgaagttgtatctggggctcaaaggtggcctttgaaggcccagctcttaaagagaagagatcagaagctcgggcctgggcagggctcagggcctcatacactatggacctggagtcatagggttggaggggacctgagtgttagctcatggacaccttccccccgcttagggatgtcaggcctaagcagcagcagcgaactctgagagacggagctagggctggtgttgggccaaggacagagaacgatacgggggccaccagctgagtggaccctagaggcctccttgtttaaggctcctgggctgggaactcagcctgcatccagacagcacactcccgccaccgcgcctgccacatgcacgctagcccagggtccggctggcaagacctcttgacacttagcatttctccatctagaaaagtagagattgctcccacctgggctaagttccaggaaaaactggttcattccattagaggagttaattagtcctgatgggcccagtcccctccagcaatatcctggggaaaggggaagcaggtgtctggagagacaggccaaactcaggttcctcttgggtgctcctgaagtccagggattcttccctgcttgggtcagccctgggcagaatggagggacccagaacccaggcagctcagacccagggacagagagcagatccccactgagtctttatgctctgcagccaggactgtgcctggcatggatcaatctttgtaagggtttgtggttgaatgacaggcatagtcttctcccatctcaaggtttcttcccacctaagatgatgtaattaaagaatgcagcagcgtgcctggcaccagtgagtgtgccaggaagggagatgcccaagtcagattgtgactgcctctgcgagccagggactcttgcctggtcctttgtatattcccagtgctcagcacaatcccaggcactcaaaatacctgattcatgcttgcttgatgcatggaattaatgaggcggggggtggcgggggaggagtcctccctgtcagtttcttgctgtgtggcagagagtgcactagattgggagtcaagaaacccaggcattggccccgatcttccccttgcttggttgtgggaagtctggtcttttcctctttgggcctccgtttcccccattgttgtacaaggaggtttgaccagataatcactaaggttcatattctggttactattgttatgaaacaaattacccctagtatgtagtgatataaacccaacagccattttattttgtttattattttatgggtcaggaaataaggaagggctcagttgaacagttcttgcttagggtctcttatgcagctacaatcagatgtcagcgggctgcaaacatctgaagctcagctgggctaaacgttcagtatgctgtgttcatgtggctggcagttgacactggctgttggctggaagctcagctgaagctgtcaacctaagcatctgcaaacatatcgcctccctagcatggcagtctcagggtggttggctgtcttacatggcagctggctgcctctagaatgagtatccctagaacaccaggtggaagtggcacggcctttcctaatctagccttggaagtcacatagcatcacttctactataccctgttggtcacaggaagcatttgctcacccagattcaagaggaggagcatagactccacttttgatgggagaagtattaaaaagaatttggggccaaccaacaacaaagaaaacaaaaacaaaaccccacaatagccttgtggtctgtggaatactttagccttggcccaagtccctatgactggagctgtctggtggtgactgctggggtgaacatgataatgtacaggatcagtgagacccccacactctggtactccctttcctggagagagttccttttctgccttccttccttggcttctctggattttaggctgaaactgtcctttgtgaatagctttaggagatggctcattgcatgggtgatggggcccccagaatgaagtaggccccatggccttgcccaggatcgcaagaaggaaggaaggaaatatttaatgagcacctattgtatccccatatggaaagaagtcgatactgtattccagtagatgttactgatgaagttcatttttccctcataccatctctaaggaagagattttattgtcgtcctccttttacagatcagaaaatggagattccagggttaaagtggcttccccaaggtggtatggttggcgacagacccatgattcaaaccactcatgccacctgccctggggcaaacctgaggcagaagcagtggcctcacctgtcctcctgcatgcccttctcatcctcctctgactgctccctccacccagggcccaaacttaaccactcacctccccaccagaaatgacctgctgtgtgtcccagttctgtgtctctaagctgacatcccctcaggagaaggcttccatgcatgtgcaggtgactgatgacaaagatccctaacactctagaatcagcccattacatgggcagccagactctccccactccccatcaacaaggggggcttctgtgtgccctcccctttatttgggcagatgctgtgacccacagaagatggtagaggtactgtgccattttccagccccaggccttaaaaacctggcagcttccacctcctgtctcttgaaatggtctctctggggaccctaagcccttcagtcagaagtctggccaagtagccatgctggagaggcagttgtaggtgctcactctggccggcaggcccagctgaactcagtcttccagccattctcactggagtgcccggcatttgagtgaatgtgagggcagctgccttggaccctccagactagttcgctgctagttgaatatcactgagtgaccttggttgccaccagaagagttgctcagacgagtcctgcctgaattccttactcagaaaactgcgagatagaatggttgttttaagccgctcagacttggagtaacttggaacacagcaatagataactggaccaacatgtgttatctcattgaatctatttattatgtctgttttacagactaggacatttaagctcagagtgattaaatgactcgctcaaggcctcccaggaagcaggaagctgggtggcatttgaacttgaacttgagaagtatgactctagagctccttggaaccaaagcccttgttatgctgcatcttggtggatctgtgtgcccctcctggcaagagggcttgcatctcaaccaaaaacattaccttcaaccaaaagactgaatacttgacaaggagtgactttcagcaccaggccatttcctggtttgaaagatacatggggagatgtggagttatagggccggtcccctccctctgccaaactcaggacagcaggggctgattttatctttattcatctatagctggcatggagcctgtccagggtgggtacgtaataaatgtttgttcaacaaataaactaacccacaaaggaataaatgacagagaggaaggcaagcagactatgatctggcgagaaaggttttcctgccatctggtggctattcctggaacaacactttctatggcaagagaagaaaatggcaggttccttcagggtccttggctgtgtgcgtctgagtgcaagcagcatcattccagcctggagctgggtggggtgggggtgaggcctcctccaggagccagacttcttgtttctttcaatgtcggtgctcctagagggtgaggcaggaagaagagcttcccagccaccagcacagtccgttcttcacagtgctgagtattcagtgggtgtttaataaatgaatacttggggctggaatgttagaacagaggtgatgtcagatcccctagttcgtctttaccttctactgaagtttgcaagagggatagctatcttgaagagaggggcagaactttagaatatgcctgttccaggggagcccaccccccccccccaacccagcacccaagagagtcctggtccttgctgtcagacctctcaacactggcaccttcccacccctgtccttccctgaggtgggcctccacacaccccacccttgccaggctgacaagtatagcttttcctggtagtcaggtgggacaggagtttcccctacagggtcctgtaagagaccaccaaataccatcctaatttcagatgcagtttcacctggaaaaatgtagccagcaaagggtctcccttaggaaacggttgcaaagatgacaggaaattagacatgtggaatcgctggaccccaatagggccctctacaagtgtgtgcattgttaatacctaggacaattcctaggaaaatacagatatgaacctgtgcacactccccgcgctgctcctcagccagccagcacccacaacccccctcagcagtcctgtccacccatcccagtccaagcttttcaccccaaagcttcccgcaggatccttggccacccttccctctccctcattgcaagagcaggtgagaaaggcaagaagggtttggtaagaacagacactttattgcacactatggtgggggagagaggaagaggggtctagggtgacaatgcctcatcccctcccctgggctgagtggttttgacccagggctctgaccagccatgggacacatggacttgaattgttctgaacttatgccagaacccaaagtgacggcctggtgtgtatgcttgggtctgtataaagcagagctttcaatgagaagaggccctaggccccctcccccagccaaagtcatcgggccccagtgaagcagcagacctcacatctcagggcctatttgaaggatccagggatgctcagggagccaggttcattctaaccagtttagtttccagctcttttcacagtggggagtactctgggggagtggggtggggcgtgggggtgaggaagggcagaaaagcagcccctccgcctggtaatactgcaggcctgtgcagtgcctgggaccgtgtctcctgggccccagcctcatgacccacacaggctgactcggagcgggggttctcctggcactgggaaagcagcaacccctgcacatgtattgctggagggcagaagctgacctcactggcattaactgatgtgccctacctgttcagcccccatctgggcctcrggcttcatgttgcctcagtgaggagggcggaagtctccctgagcaagaagctggtgatggggctggagggcaggcagaggtaggggatcaggggactgttgactctttcaggcacatccctgccctggagttccctctgccttctggtgggcactgtgtggacagcaccaaagccagtgggggtggggaccctgtgaagggacttggggacctggtcctctcctgctacctcctgctcctccaggattctggggctggatcttagctcatcaggtgaccccacctgcctttgactccaaaggcatcaaaagcacagtggggagggggcaggcggcccttttcaaacactgtcaggactgcgtcaacggcaaatgcagcagtgctatgagatccctcttggggtctcgccatcttaagaatcctagtacttttcctctggagaagagctagcgattctactgggaacagcaagaagctgactggtaaataaatttgaggattttttttttcccttaacgccctccttccctgtttctggcaaacccagtggtgtgaaggcaatgagtcaccagcaagaaacacatgcctttccccgtagcagggggctcccgaagcaccctgccggccctgaggctcccaatagagccaagaggaggaggaggaggcagggggagggagcgtggtcttcaggaaggtggtgaacactgggagtcacagatcagcacgctacacacacccacactcacgtatgtgcacaccatacacacagcacgcacacacacaccccgagctctaggccctacgtctaacacacagcgaagacacagcaaaaggctacaacgagcactagcgcgcccacacctagcaagcacacagccccagctcagcccctcccgctggggcctggcccagccacacgctacaaaattaaaaatatatcaaatatacaatgaaaatagatctgtacagcactgaggatgaaaatagtccaccagccacagtataatattgggtttgtcatttaacagcatttacacccacatgtacagagtgaatatacaatagaaacagaatatatagaagagtatatatagtagagtgtctctcctggggctctgcttttcctgttgctaattctgcttgggatttggcaaggggccaggtaggaggtgttgtcgggtgagggggactgcggtgggatgttgtgccccaaaagctcatctctttggggagatgtgggtctctctctcccctcaaacactcaggaaagacaggtagggcagagggggctagaaaggggaagctgtggaagagggatgagtaagggagatggcagggttgggggatagactgctcccaggcttgggggaacagtaaggaactcaggggtaaaggaggggaccctgattctggtctgtccctccaggtcctaagagcaatctgagccacaagagtgacttgcgacccttcgtgagggtgtccgggttgagcactgtggcctgtttctgccctgcccaccagagctctcaaagatggagccagtattccctcctttctccctcctttccttccttcccccaccccatccgtccatccatccatccatctatccatccacccccaccccccaacccatccatccatccatccatccatctatccatccatccacccccactccccaacccatccatccatctatccatccatccatccatctctctgcagacatttactcttgggtcaggttcctccctggctgcactctgagaatgggttctcttccagaggaggccctgaaggtaatggcaggtggggtcgctgttgtcagctgcagccttctgcacaggctggcctccatcctgaagaccagcccttgcctttggcagcctctactgtccacagcactgcctatggcactggccactgtgggccaggaaggcttgggaaaggtttccaaggtgtctgcacatgatgtgcacactgggcggctgtgcttgtgtaataaggagagtgagtggtggctcaaaggggcagtgaaattatctgtctttccccaggagtgaggcttcctggggataagcctgtgaactccagggacccctgttccaggggaaaagctgccactagacagaacattggaccccaggtgaggagggaggggagtgtgcttcaccattgtgctccaaaccatctaatttgtgctaggaaccaacaatttgtgctctggaaacctctccgtgcactgtccttctctctccaggaaagaggcagaggccaccactgtgggctggggaggggtgctggggacagggagatggctaagccctaattgaggtggggaaggttctggtcccggtcactgcactcccagacaagatgcaggagcacacaccacacaccccaggcagggccaaggacatgggaagattccacccagggaccagggcagaggaggttcctcaccttctgctaccaaggctcatgctgaagccaagggcagcacatacctcagaaaacagaacttggggcttctgcctaggccctcccaagtctgagccctgagccctggcacacctgctcccaccctccgccttggagcaggtagcctcttggaccaggagcaaccccgtctgggctgggcaggatggtgtcctgttctcatggcagagtgagccaaagtccactctccttccccagccccaaggcctctcaccaccaccatctgaccccacagccctaagaactgcaggtggcaagttacagggagagagggaggtgagtgactcctgcagtggccacttggaatctcccatggactgggaagcaggccttatgggttgttccaattacatggctacaatttggcggaggctcttggagggctagatgagtggggtcctgaattaggaaacagagctgctcccagcctcctgctcagggctagggagcagagtctactgggactgaagaggggagtgaggcagggcagaccctctcttcttgggcaaagggcctggcctgggcctggtggccacctcaagaaagaggccaggcctggacaagtgggcaggttgagcgtggggggagaggcgggcagggcttgggcagtggtcacagctccgactcaggggtgctggccagcaggtagccgctcccatagcgtccattggggttaccgctggtctccaggggtgatgtgctgccgggccccagataggaacggtgagtgggcatgggggaaggtgcctcactgggcaccttgctgaggatgaagcgggtctcatcgttctcctccaggttggagatgtccttcatcatgcggcccttcttgtaggacacggagagggtgttggagccatcagagagcaggtggaagtgccgcaggacgaacaccacagggatgggcagcgtcgccacgacgatgagggtgatcaggagtgccatggcccagttggggaaatacaggtagcgctcggcagcctgcgggtgggctgccttaagggctgctgccggcactgtgacagccctccccgcccaggccctccaagactgctctcctgccctcacccatggccttccactcctctcccctcccaccatcctggccaggcacagccaaggatgggggtttacctggtcaccttggtgaaagggtctagggtggtttctcctactataaaatggactaattccactccacaggcatggagagagaatatgggttagaaagactggataagtgcattaatctttctgagcctcggtgtccccgtttgtgctacagggatgatgccacctctgtctttggcttgttgtaagattgcggtttaggtgtgaggcacctggcaaggcctggcacatagcagctgccctagaaaggtgtatccctatcagtggttgcattcaaggcctgagaagatgcaaatgtccctggggtttggggccccacccctcacctcctccttgatccaggcgctgtagcccgggggcgtgacccccagctggatgatgctggctgtggtgagcacagccatgcatagtggagacacgaacttccacatgtagaaatagaagcggtaggggcggaagcccagcatctccgtcagctcctgcatgaacctgccaggcatagcagagggtccagcagttggcatccctcagtcacacctccctcttcccccatcaccatctcctccagaaagtcttcgtttcccagtccctccctcctgggctcttctattcttcacattcagtgctcattgtgtgtggtctggctggcctctgggaaggctctactgtcctcctctaacctcttctgattccgtcacatcataccccatccagagatatgatagggcccaccagacacaccctgggcaggtgcacgtctgttttatgtatagacagcttgtgtgttcagggaggggcctagccctttcacactggcctggctgaaggctccccctgctggaaaagcagtagaagtgcacttctctagagtccaaaggtagagagctgccctgactcaggggtttctcaccaaggggtgagcagaattctggaaggcaggcaggcttgtgcttgaatggcatacaaaagaatcatctttacctcaataaccgctaactaaaatcttgcattactttctattatattatgaatgcaagcaaacacagtagtattaacaatacctgtgactgtcaccaatagattacagatattttcatattacatcccagttattgaaaatattgagtcatcgctgattttcatcactacttcaaagttaccactgttattagatctatagctagatcttgtaacaatgcattaaaaataaagtgctcatacattactatatcacaaattttaaatgatattttgctatttttcaatataataagtttcttatataaccctacacattttatcttatgcatttaaagtaacatacagggacatcaccagactgccgaaggagtccaggacacaaaaatcagccagagtcctttgtggcagtgtcttacagccctggcccacagcaggtggaagcagaggagtgtccttccccccactccctgtcccctcctgtgctctcctaggaagcagacggcccctgtgaaagagccccactgccaaaccaggtccaggcatcagggagggtcagaccaagtgggttagtggaggtgggtcttgccaaggacaaggacaatgtggtcatggtcgatgctgagtgagtcagagagacctagttctagaactcctgggaacacgtatttgccctaacatgagggatgaggccaagagtttacagtaagtgtacaactgccctaggcctaggctgtgagacccaatcctttcttagagctgaatcctcttaccctgcacaaccccaaacttggggccaaaatcatacctcatctcatacccctatctaggcccttacaattgtgaaccaggctgctgaagtctacacgttcttggagggcaagggcctcttgtagacccactaagcccttcacaaaaacttaacagagttctgaagagttggtacccaggaaaggtgctgtggtaatttaaggatgatgccaggacctgcacccaggacacccagtcctcagactggctctgtttctccctggacaagtggccttaggcagccatgtccttgcactacacctcagtttccctaaatgatccgtaagggcactttcagctctgccattgtgactctatgatctgcctctccagggagtcatgataggacagacccctcctcccatcccacctttcccccatgttcctcttacttcttggttccataaatccaggccacagcgatgttctcaaggatgacgatgagagtgagtggcagggtggccgagtagtcatcgaacatggtgacaaagtagtttccggagcgctggacgaacaacagccccacgaggaatgcaaagacacagcagcccactacagagagccgggaggccggtttgggggcaaaggtgcagggtgggcagggccctgggggtctcgggggcacccaggcccctcccatcacatccctccccaaagcatgcctgcagccctcctgccagcaggctcagtcctgcacgagggatccagatgctcaggttctgagccccgctctactagtcggggagcacctgaggaaggcgttgtgtctaactttcatcccatgcctctgccccagcacagggcctggcccgtggcaggtgcgctacttaattgctgtatttaacttaaatgattcatctgattgttaccagtctttttctccacctcagtttccccacttgagaacagaaagataccccgc

SEQ ID NO: 9918 - DNA, 19440 bp, Homo sapiens
  misc_feature (3115)..(3257): n is a, c, g, or t
  misc_feature (8574)..(8593): n is a, c, g, or t
  misc_feature (12452)..(12946): n is a, c, g, or t
  misc_feature (16451)..(19440): n is a, c, g, or t
caagtgctcgtgacacataatcattccatccaatgatcgcctttgctttaccactctttccttttatcttattaataaaaatgttggtctccaccactgactacaatgatttccccatggattcattttcagaggagttactaaggcatggtactatattaacctcttgcctccccttcatttattttttcccacttcttgaaaagttccgaagctgaaatgatcaatattcatacccatatgccatttgggagtccttgtgcaaagatgagtatttttttttttattccaagcttctttacctttcctgagatcgatgccaccttgtcagcttctctgcctcccgttccttcttcctgtcccatcagaaaaggcccactctctctctatccaacatctgtgcacaggttgcaccagagcagaatttatcctgatagaatttctctcaccccattgaagttttactcaatgacaacatctaaattgctcaaagcttttaatagcatcagttttagatagagaactaatcaaccctgacatcagtaacacacgctaaatttaaagccatcagctaatgctgcattcattaatcattttagttaaccatcatgtttggcttgattggatttgacggtgtaaacaacaaaaaaagacagtcatttttctacagttgagtgtatataaacaaaatcaatctttatgaatttattatttaaatcacattaatggagaatcatttaggggcttattaaaatttttttctattatgactccaaataaaaacaaagcagagggccaggcgcggtggctcatgcccataatcccagcactttcggaggccgaggtgggcggatcacctgaggtcgggagttcgagatcagcctggctaacatggtgaaaccctgtctctactgaatatacaaaattaactgggcatggtggtgcatgcctgtagtcccagctactcgggaggctgaggcaggagaatcgcttgaacccaggaggcggaagttgcagtgaactgggatcatgccactgcactccagcctgggcgacagagtgagactccgtctccaaaaaaaaaaaaaaaaaaaaaaaagcagaacacatttgcgttcaacttttttccatcactctgttggttcttgagatgtcagtgtcagtttaaaaacgtgctgtaccacctttaaaaggactggagcaggcaggcagtgattcagttcaccttgactctagtcatagaagtggacccaactgagagctcaacctagttgtgggcatttgtgaaggattccagttagtgttttctttggaagcaggaggcttcaagccatcacatctccaattctatagaatatcaagtcatcgttaaagaacagcagcaggtgtttgatattttgtgctattaagtgtagtttgckctcatctaattatgcagrgtttcgtggtgtttctcgattttgttgaacctacctgatgcatttggcactgtagataaggactaacagtaagagagatttagagtcttcatgttagtccattaacataagtttattataaaatacactgtaagcatttctgrctaatgtaccatcagatttaagaagttacccaacaatatgtattcgctgatcttcattcctgctgaatctgagaccagcagtgtctcaattattacgttgctgccaggagagaaggggaggagaatgaatagttatggaagttgtagaatctaggatattccaaccctggattgccagagttcagagtccatgtttttctgtcacccagggtcacgactggtctccccagctcttccctcctgtttttccacccaattctaagccctgtggtgatccagaccctaccctgacgtgggagtcagaaaggagtatcttccaagctccttgtactcaaagggataaaagaaagctactcagttgttattcagatatattaaccagccatatggaggcaaaaaagggagaaatttaaatatttgttttttaacattttaatgatgaaatatatgcacttggacaaaaatgatcacccagtaaagttgggcgtacattgtggcatgcccatcagggggactttgttgtattggaggagggcaatgtatctggctttgttagtagacgtagcgcattaaagcgtaactattgtgataagtttaggggttaggaatatcatttgagtttggtagatgcttttctggaaaacaatgaggctgggaatgtttctggctttatgttgtattcataaaaataaaatgtactggcttggaaacttcggtgattgtgtgccagacagtgcgagagccctggtcagtgacactgttcctttgcacttgctgctgggagaagggagtgagcgagggctcccccgagggcttgctcccggacacttctcactgttcacactcatgctgggaactccgtggcctttgtactcgccagatgcccatgactcccaacccagccccctcttccgagaatcaggcccacccatcttcctgcccatttcacatctgaaactctactcacctagtatgaaaacttccatccattcctcgagmctgttacccctctggtgctccctaccttggtaagtggaccatcggctagttgatagcagagccctgcatcgtcttccacacttccctctctttccaatgcaattcaatatcagggccagtccagcccgtttctcaaaagccaccacttccttctagttccactgtcacctcgcatagctcataagccaacactcttcagttttgctgggttattgcagaggcccctaaccagccactgcttacacgacagcccctctcactgtacatgccatgcggcaactggcttgtccctctcaccctgcttaaagctctcaactggcgacatggtctgaggatgaagtcagacatcccaagaaggtctacaagtcctgctcaacctgctctctgcttactcttctggcttgctctgccctcactagatacaccctgacaaccccatccttcaaatcctcccagtttcacaaacatccaagagcttccctgcctcagagccttctcagagtctctccctcctccagcaacacccttacaacnnnnnnnnnnnnnnnnnnnnnnnnnnnnnnnnnnnnnnnnnnnnnnnnnnnnnnnnnnnnnnnnnnnnnnnnnnnnnnnnnnnnnnnnnnnnnnnnnnnnnnnnnnnnnnnnnnnnnnnnnnnnnnnnnnnnnnnnnnnnnnncccttcctggacttctctcatctttatactctccacttcaccttgttcctagtttgaaaccttcttgggagcagctagtactggggagaagcacagaaaacaagccatgcagaggtgtcaatggctaataactgttcgatgtgttaggcttcccagcagtgcttgtatcttaccaggggccacaccttcattcagaggccacaaactggaagcccgggagccctgcactggctccctcacccccgctgatgtggctttcacggtgtcctaagcacttttgaatgggaagctgacattgcaaaactggaagatttcactttcacacacacacacacgattcctcttgagcaatcagaagacagagtgagatgacactgctctgccattcctgcaggtgatgagaagctaagctgaggagagcacgaagcccagcatctgaccatttagacatgctcamcaaagttcttagaagaagcagagkaaggagaaagctcacaaaagaaaacaaatgctattttatctgacttctcacttctacggatagttgttttcacttaaaaacaaatccccaaactgtttcatgatagggccaagtgacttttaaacacaatctagtttagtagatagtatactatactattttaagggccaggcgtggtggatcctgcctgtaatcctagcacttcgggaggcagaggcaggaggatcccaggagttttgagaccagcctgggcaacatggggagatcctgtctcttaaaaaaaaaaaaagtgtactatactattttaaatgtctacttttaaatgaattcagtgttatctgttatttttaatgttatttttcagatcaagtttgaatattaattgtacatgtaatggctaaaaaattaaatcatgatttgagatcttgattatacaaaacacttgtttctatcttaatgtacgatggttagacctagcataactatgttaacgatctgtaatactactgcctttcataacgaagaaaaacttaaaccaagtcctaacattagcacatattccttctgctcttccactgaccaactatgtaacatctacattctgtattgcagagcacttatcttcctctttaccatgttgagaaagctttcttctttaggaagtaagttcttgtaaggcagaggttgggttggatatgttctatactttgctcagctccccaaagccctaatcaattgataaaatacaaagacaagaatgcaggagattttctgaagcaacaaaatkatgcattctttttaattcctagcatgatgtagaagagaagtgatggcaggtgtaataatttcttttctttttctttctttctttctttttttttttttgagatggaatttcactcttgttgcccaggctggagtgcaatggcgtgatctcggttcacttcagcctccgcctcccaggttcaagcaattctcctggctcagcctcccaagtagctgggattacaggcgcctgccaccacacccagctaatttttttgtatttttagtagagatggggttttaccatgttggccaggctggtttcgaactcctgacctcaagtggaggtcacccatctcagcctcccaaagtgctggaattacaggcttgagctaccatgcctggcaagtataatttcttaacagttatgataagtaaacgctttggagctattttagtttggatagaattgaaaaaaatgtcattatgtggacaaattttatttaaaaacattattctagtgtaattccttakgcagaatgaaaaaagatgtcagataaattatgcctttgactataacagaaaatctgaagctttaaatcatctcacctcccacactgaaattcaccaaaacagcattcgagaagaacttagatttaaaattctagtgtgggtggttaagtgttcatagcatattcttattgccattgtaagtaggcayttgaatggaatgacaaaaaatgttaatttaaaggaaatgaaactttaaatgacacttagtcatcaaaaatgactagtcaccaaaaatgaccaatgcttccttcaaattttaaataattataaccaaataaaggaagccatctayagtttatttaaaatcccactttcaaccccagaaggcagagttcagggatactttagcaggtgaagtaaagtaaggggaggcggctctgaaaaggagagataacagagaaaaagcaacaaattcagcatgtctcctgtaacatttttagcttcagatgggtgagaaatgtagtgaaagggaaacttgaaattagttagcctaaagcagaactcctggaggargaggatcacttgggaatgagagtatataccataagctatcattcactgctcttggccttggaagaaaagattctggtttacattcttggctgaagaggcaacataatatagcacagtggttcccaaactttcctccacattgtaagtacctggggactttaaaaagtactgatgccagggttcctcttcccctgcccgattttctaatttacttgctatggggtatcacctgggaattttttttaagttcctgaggtgattctaatgttcagcaaactcagaaagcactggtgtagaggtgaaagtgtgttgaatggactctggttcaaatttggactccagattttaccagttggataatcttgggcaaaatacgttatttctcagatccttggtttccttagctgtaaagtaggaatgggaacatctttattgcagagtcgttggcagcacaatgacaatatatgcagaacacttagcacagtgcctagcacgcagtagacactcaatacatggtgttacttatttttgttattttaattttctatttttccatttataaatagataaatattccacaaacaatttcttaaagaggaataattagaaatcaacttatgtgtgctgctggggtgtgtataatgcagctacaagttgggatcctctttgttctgaarttgaagtctcttgctagaagtgtccaggtacaggaagacagtagcagtgaggacccaggtcaccacacgttcttggtattattacctctcaaatctcaacagagaatgacagatgtcatattgtccttgcacttttttttacttcattgattgaatgtattaaattagrtmatcamattcataaagatgaaatcaatcatatttgttgagataactaaactattggcttcataccctggatccatttctccttttccttcctaattcttactttattcatgtttccatccctttcccactcagccaagtgccacaggtagagctgacaccttcccaagatccaggtggtctctgaggcctacaggcgattccattcctgtctgcagtgcttagctcagggtacacatgtgagccacttctggccatgggatgtgaaggcatgyttgctgggggcttttgggaaattccktttctcttaagaaaaaaatcataagaaaaggagttctcytttttatctctagatgttatccctggaatcactctagccatcttactacagcctgatgttcaatagggcattgagaattgaagtgcagagtgatgagaaaaatctaggtccttgataccaacattcaactcctgagtcaataaattctgaagcctcctttatgtctggatgacaaatttgtgagctgatacacttttttattgattaaagtagtggaggttcatttctattatctgcagctaaaagcctcctggtataagtgctttgtgttatccttccaattattctacatttcaccatcactttcaaagcagtaatattatacatttctaatttgcawaacttactacagttttcaatttttttaccctagttaacacaaagtccttgaagtgaatatcatctttatcwttattttattttagtaataagaaactggggctcaraaagtttaggtaacacagtaggaaatgatgaaactgaaacaagmaatcatgtctatttgattgcttttttcctgtaaagacagtcattaatgctcttcaccaaatgttttcatttcttcygacacatgccaagatcgcacttccccatccttttgaagttacttgcagccatgataattgccctggcccaatgcaatgtgaacaggtaaaagacatattttacttctgggccaaagcttcaagaaccagtgcatattttgttgtcttctctctctctaatgcagrtaacagaagtcccatragcctgggtcccacaaagagacatggagtgtagcatccagcaatgtcgttataaacttgtagtgggaattaacaatacacatttgttgttataaactaagatttggttataaaccactaagcataacctagccactgctgactgattaattcayaaagtggctatatcactttgtgtttttaagtggcaataatttaactcagttctctattagatacctcaattccaaatatttttttttctgagaaatgyatgtaaattttattcagaaatagtaaagttttaaaartgttatttcgatagtttctgtggaacaggtggtttttggttacatggggaagttcttcagtggtgagttctgagattttggtgcactcatcacccaagcagtgcacactgtacccaatgtgtagtctcatccttcaacccttgagtcctcaaagtccactatatcattcttatgcctttgcatcttcgcagcttagctcccacttacgagtgagaacatacaatatttggttttccattcttgagttacttcacttagaataatggtctccaactccatctaggttgctgcaaatgccattatttcattccttcttatggcttagtattccatagtgcatatatatcacattttctttatccactcgttggctgatgggcagaaataataaattaattagctaaaaatacatttacatagtcatcatcaaaccaggtgtwcatttaggttaataaaactgtagttcctgatagctttctttgagacaaacagacttacatcaatttttctcaacaattgaatcctaggcattctctgtgtatttaaaaatgttgcctcagtatggagaagttgttaggatgaagtgctagtgccttatctgaaaagtatctccctcctcccagcaagccactctgttgggactacatccagcgcaaaggtccagaacagaagcagcatgcaggtgaacgtatgtttagggtattagacagggggagatcgtcaccaggtatccaatatagacagaatcagagaacatgacatcnnnnnnnnnnnnnnnnnnnnacatcacttctttgaacctcatttttctcatctgtaaaatggaaataatgtgtctattcagagtagttataataattatttgaaataatgcatataaggtttgttgcataatgcctggcatttatttaatagttgatatattttaatttcttttatacattctcattttgtcaacttgctattgtaaaagtgtttactattcattatccaatggaaaaatatcacatatacccagaaaaagatgtgaatatattgattgctttcttttctcagacatgataaaagtatacattttgaacttatgaagactgaaaatctttgctctgagtttttcctttgcgactttcttaagactgtaactggtatatttggcaataaaacttctgttatcatttaggttgcttcatgatgcaagtaaaagaaaactggacttaaataagaaaaggatttttttttttttttttggttaacaggtctcaagtgtggctggcttcgagcaagtcttgatcccaggggttcctggtgtcattgtaaccacccaacgggttcatcttgcccgctgcccagacagtggattcaycaagacaaaggaattgcaataaagagtttaattcacacagagctggctaaacaggagaccagagttttattattacttaaagcagtctcctgaaaattcagagactgggatttttaaaggataatttgggggagtaggagaccagggagcggggagaattgatggctctggtgtgacatgaaatcatagggagttgaaactgtcctcttgcactgagtcagttcttgggtgggggctacaggactagatgagccagtttatccatctgagtgatgccagctgatccatgagtgcggggtctgaaaaacatcttaagcaccaatcttgggttttacaatagtgatattatccttaggaacaattggggaggtttagaatcttgtggcctctagctgcattattcctaaactgtaatttctaatcttgtggctaatttgctagccctaaaaaggcagtctggtccccaggccagaaaggggtttgttttcagaatgagctgttatcatctttgtttcaaagttacactataaactaagttccttccagagttagttctgcctatgcccaggaatgaacaaggacagagtttagaagcaagatggaattggttaggtcagatctctttcactgtcataattttctcagttgtaatttttgcaaaggtggtttcatcactaggactctctgtcttcactaaaagtctgtgttgtccatgtcaagcattattcattcaaaaataaagagaggaagaaaaaaaaagacttccctttttccttagaatcagaaaattagtcttgaatgacatctatggactctctcagttggaaatgaggtcaaactgacttccttaaggtcctgtcttagtaactcaaaatactcaaaatagaactgaaacataaacttagattttacttcactgctcaggggaggaacataagtgttaactaaacccccaaggtaagaaaggtagcaagataaatcacccaaagatcacagaatgcccaatccatatacagaattgtgctattgttattgtcaagaaatttatcaccttgtcatacaacaccaacactgttgaaatagctattaaaacactgtaggaagtgctaaattttcacataaattttaaatttcaagtgaactctttgaaggcagaacccagttttatcttttatataacaggcacccaataaatgttggttaatggaatacaaataacatttgcagctggtcacttgtgaggaaattgtttcccacatttttctctagaatttttaattaactattactattaaactgagtctacatgatggaaaagcttgactctggagttttaggttgagttccacttttactagctgtgtgatcttggaacagtttattagtcttctaaattactgttccttactgtggataagagaattcatgtggattacaatcagaattaaaccagataatgtctacaaaaagttttctatgaactatttaaaaaggtaaggaattatcactcgaatgtattctgatttaaactgaattgtgttcgaattrgccttgagtgacgatttggcctagaaagcctatcttcagaacatcacacacacacaaaaatccaattacttacaatgatttttttgagayggaatctcgctctgtcgcccaggctggagtgcagtggcgcaatctcggctcactgcagcctccgccactgggttcaagctattctcccgcctcagcctccaagtagctggaattacagsctcgcaccaccatgcctggctaatttcaaatttttagtagagacgcggtttccccaggctggtctcaaaatcctagcctcaagcaatccaccgactcggcctcccaaagtattgggattacaggcgtaagccaccccgcctggccagtgatcttcctaaacagaaatctgatcacataacttcccattacagagtctaaccctaaccctgtgcctacaacatagtcaaacctctttagcaaggcagatgacctcaagcaggatttcactgcctctttgtcacagcacttaacaagctgtgatgtatttatttttattcgtctacacaggtcttccctactagattctgagtttcagaagaaaggcctctaactcgaggttcatgaatggacctgcacaagggggcggacgggctgaagtcctgccttttttttttttttttccaaaaaacccgtatgctgtgccgttaacgttcataaaaaagtccttgtcgaacgttttaaacagccaaggtgtttcagctttaataaaagctgaaaatttggcaataccaaacaggtcaccaagccacagtccgcttcttggcctcctctktggtatcagmgttcggctrgcggcttcctgtggcctcttaaacaaggacctcattttgggagccattcgagagattttttctcatyatctaaagtagcattctcgccttgcacagctgaaagtcatttctcgaaatcggagcgccagaagcgacaggagccactccaggcccgggggaagcgagcaaaggggcagcgggctgcgtttgccaacgtaggcctctcgggtcccgcgccgttctgggccttctccgtgtttccggcgccgccctcggggtcccttacagagggcgggaggcgggtggagagacggggcaggaagcaggcgggatcggcctgggaagaacccgttctgggaccctctagaaatcccagacagccctcccgggctgacagcgcctgccttggagcccgacgcgctcatcgaatttagattgactccttcggctctccgttttccttctctaagggaagggtgggacttcctattttatctcttagcggcttccggcaagagctgatgtgttaaaaacaagacagcacatgggcctgccggccactcggataaaaaacaaggaactcgacctggattgtactaaaccagttccaagattctgtttttcggctgtggcgtccggcgctgcatccactacggagtcgccttggaagccaccggaagtccttcracggagaaacaggatgtcccgcctcttcctcccaaagggaagacggtgagccggaggagtcagtcagaggggcgagcaggagcgattccgtcgccaaacaggtaagttattctctggccggggcggggggtttggaggcggggaccgtccagcgtcagcgcggggcctgggggcggtggcttgagggctcgaagccgggcggctgggcgcccagagccccgtctgggcccttcgctctttctcnnnnnnnnnnnnnnnnnnnnnnnnnnnnnnnnnnnnnnnnnnnnnnnnnnnnnnnnnnnnnnnnnnnnnnnnnnnnnnnnnnnnnnnnnnnnnnnnnnnnnnnnnnnnnnnnnnnnnnnnnnnnnnnnnnnnnnnnnnnnnnnnnnnnnnnnnnnnnnnnnnnnnnnnnnnnnnnnnnnnnnnnnnnnnnnnnnnnnnnnnnnnnnnnnnnnnnnnnnnnnnnnnnnnnnnnnnnnnnnnnnnnnnnnnnnnnnnnnnnnnnnnnnnnnnnnnnnnnnnnnnnnnnnnnnnnnnnnnnnnnnnnnnnnnnnnnnnnnnnnnnnnnnnnnnnnnnnnnnnnnnnnnnnnnnnnnnnnnnnnnnnnnnnnnnnnnnnnnnnnnnnnnnnnnnnnnnnnnnnnnnnnnnnnnnnnnnnnnnnnnnnnnnnnnnnnnnnnnnnnnnnnnnnnnnnnnnnnnnnnnnnnnnnnnnnnnnnnnnnnnnnnnnnnnnnnnnnccctccctgtcgccttccttcccgacacccgcccagactcacgcccggacacacaccctcgctcgttcgctcacgctgcctcgccgccctcctcccccaggcccccgctgccgccctgccctctcacccgctcgctccgcaggccggtcccgcgggcagcctcgctccgcgcccttgcgcgagcggagctcttgtggacacctcggggctgcggacctagcgtggcctcggtttcccctgccgggtccgcctgtccgcgcagtaacagtcccccgttccttcgggacgcacccctgcaccgaaatcgggctgttctcgcgtgcccgggttgctctcaagtggaaaacagatgctcccctagctgcacagctgcaagctttagcgtctggtttccwgcaggggctccctggaccgcccgcccactctcgtgtcacccccaggtgccctggctgcgccgctgctactcgcgccttcttccgttaagcgacgctggtgtgggcgggcggagggcacacaagtgcggtggccgaaagcaccgcggtggcagcgaagggtcctagccattcccgacttcagctcgctttgcgccactgcggggagacccgcggctgcctgacaccgctgcgggcagcagtgggtttctcagtagatgctcacctctttccagccagctagcacgccctgggtgcttggcctccttctggagtttaagctggtggaggcggggtgcagtggccgctgacctctgtcggttgcgctgggttttgagtagccatttatttcattggggagttttggaataggacatcycacatccgtggacacacatgtagaatacttttataagtaattacagtcttaatagtgatttgagttacagctttgcagtctatgcctggtgacatcctagtcgtagtatgtatctgttttgtggtgaagtgctggtccatttagaacactgtagacaggggccctaacatatactcatcagaaccttattaagaagagcttatatgtcatttggcatactcactgtgcttcatttagtacagcaatcttgtgtagtaggaattattccctttttacaaactgagactcactttgctatatacaaaattactgctactggtamaaggtaaagctttcttcttgcrtgacatgtaaggcaggtgtgataattgctcacaacacagttgctactggtgcatttttttttaaactttatttcggaataaattaagatttacagaaaagttgcaaacaataggacagttccattggtaccttttaagcagagcaaagtggctccacttcaaaaacactggttcttgctttatgccaaacacccttctaggtgytggaaatagtaatatacttccctagaggattttgagatctggttgaatagacacataaataaatatatataatacctttttctgcttactaaaatagagatgtgggagcacagtggaagttacggctgattgatggtggggagtggtgaragcttcttgcaggatatgtgatttgagataggtctcaaggactagtgggtattcacctggttgaagggacattttccccaacattcattccgattaggtttgttttattagagtagaactcgctaatcttaataaaatatactctcctagtttgattcttctctttctcatctcctttaagaaggtggtttgtatcccagatagtgagaagaagcctagtttctaaatctatgaataggcgaataaattaagctgtatgtttctaattgatagttgtgactctttcgactgtagttgagattggttttttaggaatgcactgtrgtcctccactgagcgttttccttgctttccaactctgatgactagtggaattaagtaatgcattcaggaaacatttaccgcatgcttgctttgtgccagccattgcactagagtaaaatgatgaacaagatagtggggaatatagacaagcaaatgcrcattggcagtgcagtctgatggcctgcccacagagtgtcacagtgccattcatgattcttggttgtcaaccatggcaatggacttggctgacttaagcagaaaaggaatttattggaaggctatagatggctttcagaattgatgggaaggctggggaactggattcagaaaataggcagcaaccaaaagaggctggctggctggggccacatccaaggcaatatcacgtaaatagcctgcctagaattttgttgctggtgacattgccactggagaaactgccacctctgttgctggactgttgactctcttctaccactgaaaaatctcttattgctcctgcatctttgtgaccttttttgccaagccactgtagttgtcagggagcagagagatggagagagatggtctttatccctygcaaagacccacacctcaaaggagtcctactaaatagaaggaagcttgggctgtgggtagccctaaaagcaaaaatgtccagcataaccactgaacctggcaagcttaaagaggttagggaggaataccaagagggaatggcgaccagagaatgaacaggaactcactgggcaaagagataaagagcggttagggaatccagtttyggatagaagacttccaagcgtcaaaaggtaatgtggaacatttcaagaattaaaaggtgtttaggatggctggatcacggagtataagaggaggtgtggaaaataaggctggagaggccctcttgaagaaatgtaggcagcatagtgacatgtacacccttttgcttgttttaagcactttgattgcaactacggagaccagttggcatggtgtaaggctaggggacagggatcttttagaggctgttgcatttatagtaggttagacatcacagaagtctgaactaggatagtggcccagaggtaggggaagtgagtggattgtacatgctcagttagtggagtggattcggggatggagtaggtgagatggacaagtcaaggtggacactgatgtgtctgcttcgggtgactgggtggagcctggtgttccctgtgtggtgatggaaggtgagcagttgccccagtaagatacttcagtgtgggctcatttctgtgaacacgttgagtgggcagttgtatggatgagtctgcaatcccagaggaccaccagcatctcactgcagccttggttccttcagttagttgtgtgtgtgtgtgtgtgtatgtctgtgtgtgtgtgtgtgtgtgtgtgtgtgtgtgtgtgtgtgtccttcacaagattatggcaagaccggccttcatgtgtatgcatcccaagtctcttggcatgatgtcttactcatagaagggggtgttaggccattcttgcattgcctaaaatggagagatagccaaggctgggtaatatacaaagaaaagaggtttcactggctcgcggttctgcaggctctacaggaagtgtggcactggcatctgctgggcttctggtgaagcctcaggaagctnnnnnnnnnnnnnnnnnnnnnnnnnnnnnnnnnnnnnnnnnnnnnnnnnnnnnnnnnnnnnnnnnnnnnnnnnnnnnnnnnnnnnnnnnnnnnnnnnnnnnnnnnnnnnnnnnnnnnnnnnnnnnnnnnnnnnnnnnnnnnnnnnnnnnnnnnnnnnnnnnnnnnnnnnnnnnnnnnnnnnnnnnnnnnnnnnnnnnnnnnnnnnnnnnnnnnnnnnnnnnnnnnnnnnnnnnnnnnnnnnnnnnnnnnnnnnnnnnnnnnnnnnnnnnnnnnnnnnnnnnnnnnnnnnnnnnnnnnnnnnnnnnnnnnnnnnnnnnnnnnnnnnnnnnnnnnnnnnnnnnnnnnnnnnnnnnnnnnnnnnnnnnnnnnnnnnnnnnnnnnnnnnnnnnnnnnnnnnnnnnnnnnnnnnnnnnnnnnnnnnnnnnnnnnnnnnnnnnnnnnnnnnnnnnnnnnnnnnnnnnnnnnnnnnnnnnnnnnnnnnnnnnnnnnnnnnnnnnnnnnnnnnnnnnnnnnnnnnnnnnnnnnnnnnnnnnnnnnnnnnnnnnnnnnnnnnnnnnnnnnnnnnnnnnnnnnnnnnnnnnnnnnnnnnnnnnnnnnnnnnnnnnnnnnnnnnnnnnnnnnnnnnnnnnnnnnnnnnnnnnnnnnnnnnnnnnnnnnnnnnnnnnnnnnnnnnnnnnnnnnnnnnnnnnnnnnnnnnnnnnnnnnnnnnnnnnnnnnnnnnnnnnnnnnnnnnnnnnnnnnnnnnnnnnnnnnnnnnnnnnnnnnnnnnnnnnnnnnnnnnnnnnnnnnnnnnnnnnnnnnnnnnnnnnnnnnnnnnnnnnnnnnnnnnnnnnnnnnnnnnnnnnnnnnnnnnnnnnnnnnnnnnnnnnnnnnnnnnnnnnnnnnnnnnnnnnnnnnnnnnnnnnnnnnnnnnnnnnnnnnnnnnnnnnnnnnnnnnnnnnnnnnnnnnnnnnnnnnnnnnnnnnnnnnnnnnnnnnnnnnnnnnnnnnnnnnnnnnnnnnnnnnnnnnnnnnnnnnnnnnnnnnnnnnnnnnnnnnnnnnnnnnnnnnnnnnnnnnnnnnnnnnnnnnnnnnnnnnnnnnnnnnnnnnnnnnnnnnnnnnnnnnnnnnnnnnnnnnnnnnnnnnnnnnnnnnnnnnnnnnnnnnnnnnnnnnnnnnnnnnnnnnnnnnnnnnnnnnnnnnnnnnnnnnnnnnnnnnnnnnnnnnnnnnnnnnnnnnnnnnnnnnnnnnnnnnnnnnnnnnnnnnnnnnnnnnnnnnnnnnnnnnnnnnnnnnnnnnnnnnnnnnnnnnnnnnnnnnnnnnnnnnnnnnnnnnnnnnnnnnnnnnnnnnnnnnnnnnnnnnnnnnnnnnnnnnnnnnnnnnnnnnnnnnnnnnnnnnnnnnnnnnnnnnnnnnnnnnnnnnnnnnnnnnnnnnnnnnnnnnnnnnnnnnnnnnnnnnnnnnnnnnnnnnnnnnnnnnnnnnnnnnnnnnnnnnnnnnnnnnnnnnnnnnnnnnnnnnnnnnnnnnnnnnnnnnnnnnnnnnnnnnnnnnnnnnnnnnnnnnnnnnnnnnnnnnnnnnnnnnnnnnnnnnnnnnnnnnnnnnnnnnnnnnnnnnnnnnnnnnnnnnnnnnnnnnnnnnnnnnnnnnnnnnnnnnnnnnnnnnnnnnnnnnnnnnnnnnnnnnnnnnnnnnnnnnnnnnnnnnnnnnnnnnnnnnnnnnnnnnnnnnnnnnnnnnnnnnnnnnnnnnnnnnnnnnnnnnnnnnnnnnnnnnnnnnnnnnnnnnnnnnnnnnnnnnnnnnnnnnnnnnnnnnnnnnnnnnnnnnnnnnnnnnnnnnnnnnnnnnnnnnnnnnnnnnnnnnnnnnnnnnnnnnnnnnnnnnnnnnnnnnnnnnnnnnnnnnnnnnnnnnnnnnnnnnnnnnnnnnnnnnnnnnnnnnnnnnnnnnnnnnnnnnnnnnnnnnnnnnnnnnnnnnnnnnnnnnnnnnnnnnnnnnnnnnnnnnnnnnnnnnnnnnnnnnnnnnnnnnnnnnnnnnnnnnnnnnnnnnnnnnnnnnnnnnnnnnnnnnnnnnnnnnnnnnnnnnnnnnnnnnnnnnnnnnnnnnnnnnnnnnnnnnnnnnnnnnnnnnnnnnnnnnnnnnnnnnnnnnnnnnnnnnnnnnnnnnnnnnnnnnnnnnnnnnnnnnnnnnnnnnnnnnnnnnnnnnnnnnnnnnnnnnnnnnnnnnnnnnnnnnnnnnnnnnnnnnnnnnnnnnnnnnnnnnnnnnnnnnnnnnnnnnnnnnnnnnnnnnnnnnnnnnnnnnnnnnnnnnnnnnnnnnnnnnnnnnnnnnnnnnnnnnnnnnnnnnnnnnnnnnnnnnnnnnnnnnnnnnnnnnnnnnnnnnnnnnnnnnnnnnnnnnnnnnnnnnnnnnnnnnnnnnnnnnnnnnnnnnnnnnnnnnnnnnnnnnnnnnnnnnnnnnnnnnnnnnnnnnnnnnnnnnnnnnnnnnnnnnnnnnnnnnnnnnnnnnnnnnnnnnnnnnnnnnnnnnnnnnnnnnnnnnnnnnnnnnnnnnnnnnnnnnnnnnnnnnnnnnnnnnnnnnnnnnnnnnnnnnnnnnnnnnnnnnnnnnnnnnnnnnnnnnnnnnnnnnnnnnnnnnnnnnnnnnnnnnnnnnnnnnnnnnnnnnnnnnnnnnnnnnnnnnnnnnnnnnnnnnnnnnnnnnnnnnnnnnnnnnnnnnnnnnnnnnnnnnnnnnnnnnnnnnnnnnnnnnnnnnnnnnnnnnnnnnnnnnnnnnnnnnnnnnnnnnnnnnnnnnnnnnnnnnnnnnnnnnnnnnnnnnnnnnnnnnnnnnnnnnnnnnnnnnnnnnnnnnnnnnnnnnnnnnnnnnnnnnnnnnnnnnnnnnnnnnnnnnnnnnnnnnnnnnnnnnnnnnnnnnnnnnnnnnnnnnnnnnnnnnnnnnnnnnnnnnnnnnnnnnnnnnnnnnnnnnnnnnnnnnnnnnnnnnnnnnnnnnnnnnnnnnnnnnnnnnnnnnnnnnnnnnnnnnn

SEQ ID NO: 9919 - DNA, 160757 bp, Homo sapiens
  misc_feature (142315)..(142315): n is a, c, g, or t
actaagtggatacactctaggatttaggcatgttaactttatttctgttgtgttttgaatcgctccagagttgcatgtagatagcatttatttctgtgcacttaaacctatttagaaaatatctatgaagtaaaaatggagaggaaatagaaatgtattttttcatgaaaattttgatggaaatttcatcaagtttaatgattcaccaatttcttacattaatttgaattaagcatttaattcaaagagaggggagcattcattattgatatatttgggcttttaaaaactccatcctttataaatagtcaaagtttgggccacacaaattatattttcatcatggaaaaatttcaacttctcaagccataatgttgaacagaattggagtattttctttagaatttcttgaacaggcaaatgaaagcttattatagcatgcacgtattttcttttctttttggaacatcaacaccagtatattgttggcagctattgtatcaaaaaaataaagtatactttcactatcataaaggattctttccccccctcatgaaaataaacaacaacttggggtaaaaaaaaaaaagatgatcaatgttgagacaactgtcaagtttctttcatacatgggctgcaagttttcaagactttggtgcagttactaatatgaaatagtctttgagttgataacacttctaactagcttatcctcgatgttctccttctaatgtcagtggtattgattggtgactaagccccatgtaccatgactaagaccaggtagctggtcccctttgagtgggcagatacatggtagttttgctttagattcctttatgtccccagaactcagggatgatccaaggctggggctactcttgctgtccttacatccaagtctttggctgggaataggtcagtttcagagacattcccacagagcaggagggacagactacttctaagcaggttgttaggcactggtgtctaaaatttggtcaaattttagacaccatgagcaatagcacattatcaactgtgatcatttaattatctcttgttctccctagctacattttctgcctgttgtcataaagattaagtgggaccacctacttagatttttagttatcgtatttttatattaaaaatagtaactcattgtggactttgctcattccattcaatcacaaagccttctctagggaacatattatcaaaggtccctcctcttctattttagtttggccattagcccagaaagtatttccacagaactttaaaatttgtacccctgaaaatattaaataacatcaatttatccaggaaaatttgtctatggtttaagataagtgtcctagtaaacaatgagtatacttatcagatatttctggggcagggggagtggggagagagagcaatgagaaatttcatgaggaaatgtaatataataaggttttgccctaataaagcagaaccaggaagttaaaaaaaattacagtttgaaaactaaaggacaggtgttagaaaagagaaacccaaacaaaggaagaagaaagacctggactatatggattttaatttaaggagttgcactgtgataataaacctattcttttaactcaaaactgtttatttcctatcccattaactaagtggaagatctcaaaaggggacagtcctgtaggccaaatctaccctgggagccaaggtgcaccctctgggtagctcgagagagcacaaggcatcagttggtggtgagcttgacttgagagttgagactaaaacagctggtgggagagtaatgtatagcctaaaccatatgaaattgtatgtggctggattttcttttcttcattttttttattgtaaaatacagataacttagaatttaccattttaagagtactattcagtggtattaagtacatttgcaatgttgtgcaaccatcaccactttgcatttccagaacgtttttcatcatctcaaacagaaattctgaacccataaaacaactccctattaccctccccctagcccctggtagcctctattctactttctgtctctatgagtttgactactttaggtacctcatataagtggaaccataccatatgtggcctttgtgtctggcttctttcacttagcataatgttttcaaggttcatccatgttgtagcatgtatcagagtttcattcctttctaaggctgaataatatttcattgtgtgtatacaccaaattttgtttatccattcatttgttgatggacatttgggttgtttccacattttggctattgtgaataatgctgctatgaacggtggtgttcaagtgtctgttacagtccctgttttcccttctttggggtatatacctaggagtggaattgctgggtcatatggtaattttatgctttttgagaaactgccatgttgttttccacagcagctgcaccattttacattcatgccagcaatgtaggagggttccaatttctccacatcctggccggacactgtattattattatttttttggttaatagcctttctaatgggtgtgaagtggtatctcattgtggttttgatttgcatttctctaatgactatgatgttaagtgtcttttcatgtgcttattggatatttacatatattctttgaagaaatggctctgcaagtcctttgcccatttttgacttgggttttttgttttgctgagttgagttgtaggagttttttatatgttctggatattaatgccatatcaaatatattatttgcaaatattttctcccattctgtaggttgccttttcactctgttgatagtgtcttttgatgcacaaaagtttttaattttgttgaactccaatttgtctattttttccacctgtgctattgtcatatccaagaaattattgccaaatccaatgttgtgaaacttccctgtcacgttttcttctaagagttttatagttttacctcttatggttaggtttttgattcattttcagttaatttttgtatgttatgtgaggaaaagatccaactccatttttttgcatatatatatatatatatatccagttttcccagcaccatttattgcaaagactatcctttccctcattgaatggtcatggcaccctcgtggaaaatcagttgatcatatatgttaagggttatttatgagctccttattctatcccattggcatatatacctgtccttacgcagtacagtttcatagtgagttttgaaatcaggaagtaggagccctcccaacattgttctcctttttcaagattgttttggctagtggcgaggtgggggggaaactccttatctgtatgaattttagcatcatcttgtccatttctgcaaaaaaaaaaaaagcctgctgggattttgatagggattgcattgactctgtagatcaatttgaggagtattgctatcttaatacttttatttcagtcttgaatgtttttcaatgatgttctgtagttttcaatgtacaaatcttgcatttcttttgttaaatcgatttttaactttattgattttgatgctattgtaaatggaattttaacttaattttcagattgtttattgctagtgtgtaaaactataactgatgtttaaatattgatcttatatcctgcagttttgctgaacttgcttattggctttattttttttataatggatttcccaagattttctatatataaaatcatgtcatgtgaaagtagcgatagtttaattgttcctttcttatctggatgcctttcatttctttttcaggctagaactgcaagtacaatattgaacagaattggtgagaggggacatccttgttaaaggtgcacttttgatagggttaaaagaccagtgttcaacactttccaatcctgacttcgggcaaatcatttaccctttctgtttccttatctaaaatagaaaataacagcctatagtgtacgcgggtggtcgtgtctgctttttagaagcccatgagctagtggggaagcaaatgattcatggaaataattataaaaacaaggtaacatatgctaagagttattagggctatgaatgatacatcttggataccctattagataatttgtggtgaaaaatttgtaaacaatcttgtgctaaatagagaaatggtttaaaaatttaagataccaataacttgctttcactgtcacctacattagtttggttccatttttaacagtcttttattacaaactgatataatcatagcataactaaattcaaccctcttctctataaaatagatctcggtttgtagggttttactatgattttgcatgccatttgatgtccacaggtattttttaagtcaaaaggaaatctgtaaattaggaactgttaatttcctcttcatttgggcatcctaggtagactgtacagatttgttccaagcaccccattaatttgagattagcctaagtttttcctatgcccgcactttggaatataaacatgtagaaaatagtccatgacacagcggatgggttcataagtttcttccgggtcctaacaccgaattgtgctgatgatctggcaatggaggctaatcttgccacatcaagtacggcctattcgctaagccgtctggggcactttataatttttttctttgctggtctgtttgaagggctcctatggccaaaaaggtggtcagtcccgtcagctaggctgtgaggacgcctaaacgctttgaggacgcctaaacgctttgaggtagtgatgatgcatgatcgtgtgaaagagtttctcagagcacctccctcgcggggtggggaaaaggacctcactccccacgccccctccttccgctgcgggagatagccacaccttccccctatcggcgccaagcaggtggccaggccctcgggacctcgcgcccccgcagccagtggcccggccagctcgtgcgtcacgtgacgcgggtcagctgcaccgccgggacctccaggcaccgcggcggcgaccgcccagcgcgtggtctcgagatctcatctttccgcgcccctccccccacggtcccggaaaagggggaggccggtgacgtcatcatccgggttcttgtcggcggggctacggttcacaatggaacaaaaacaagcggcccgagtcaaactatgagcgacgcggctgcggctcacgcgattaaccctgtcgtggccacacaccccgccagtccctgccgcccagcccctcccgagtggtgtgccagatcttttcgggcctcccttccccaacttcggtcctagagccacctctgccctcgtcccgctcctgagccgaggggcatggaacaggatttctggccgtagcacgaccctgaaggggccagccggaagaaacagtactgcgcgaacaatctttaccgcattgtcttcccctcccccaccctagctctccgggttcccggcggctcgcgccgaagcccggccccctcagcggctcgcgctgctctcccagccttgacggcccggggtggagggagagaagagggggcagctgagcgggagggggctgggcaggagcagggggagggccgaaaggaggggcctgaaaggggcgggccctgacgggggcggagaacttcgggtcttgggcggctctggggctagtgggagtctgcgccgccgccgccgccgccaccgctgctgccgccgtcgccgctaccgccgccgccactggccgagcggtttttttttttttggtttgccggatccgccatattgacgaggacgggcatccgcggctgcggacgctagtctccgccgccgccggagccgcaacctctccgcacccggccccgtcagggcctctgtcgcgcctagcccctccccgccttacacagctcccgggcctcgcgggagcccgccgccgccgcctctctctcacgggaggcggccgccttagcgcccggtgcttgggtcggcgccgggagcgaggagcgagctacttcaaagccaccaggcctggagcggggacagaggcggcgactaggggaaggtgaagccgtcgctgcaggaggaggagcaggaggaggtgacgcaggagaaacgcaccgcccggagcccgtctgagctcagcgagagccccagcctgaggggagaaggggaagagggccgtcgccggccaaggaggaggaggaggcgggcgcggcgaggagcgagttccggcsccggtgtgcagccttttggttgagacgcccgcagccccgagcccggccgccgcagcctttcgatacactttgttgccggtcacccccgggcctgggatgcacccagggtaggtctcgtcccgggaccgagccccaccgtcgcctggtrcctcccgcctccgtgtgccctggttgtgagaagacgtctgtgtcgtgcggtgagtggccagctgcactggggcgacgctctttcccggggccaacagctggatgtgggtgaggggaggagggcgaggggggtgtgcgtgtgtgcgagcctcttccctcggcggctgccggccaggctggggcttccccgttccccctcctccggcccgggctgggcgggcgcgcgggcccgtgttgtgtgtggagccggtgtcccgagagcgtgtctgtgtgttttggactgtaagggaaaatggctgacggctccgtccctccccctcctcccccttcccgtcctgtctggggccgagtaggaggatggagtctccgggcgtggcgggcagcccccccgccgtccgcacccgggggccgggtcggtttgggggctggccgccccccgcccggcggccgctttcctacccggtctggttccacttgacaccaaacgccattactgaggtggagtgatttggagctggggagctaggcctcggctacgcctggctatcaggcctgacgacttgtccgcctccccccaccctcccgcgataacccgcagtttctccccggccctgggctcctggagtgggagctgggttatcggcctcctacacctccttcgccccgctttatttgcagagggccaaagccgtgaaaggggtttttgaatgcagaaatcgcttccaagctagcttggacctattacctttctatttttaactgtttctgcaaatattagcatgtgcgagtttggtagtgatcaggtcttcagattcttgtgacgtgaggcttagggttggataaatggctgatttttcattcattgtgaaataagttaaagagttatacagcaggtgtgtagatggcttcttaaattatttgtgtggatttctgtagcgactagaacttacacgagaatttgcaaaatttctmgtagaacctgcttaaattaagcatgttattttttggaagttccatagttayaacgttaattgaatttacacggtgcagtttacaggtgtatataattgcttcagattgtcttttagtttaaataagcaagttgtaggtatagattaaatattcatgctttatttttcggggagagaagtatgtgtactgttcttttacctggaaacccatgagtccctaaatctacttaacgtttgtatactttcacttttgaggaagaatgatttggggtgcattgattaggaaactttccagcaggtacttaaccctctcggagctgattacccttaggtaaggactccttaaccakgactagcttggctggttagtacacttgaactcaaaaatagagactataaactctcctttagatctcgctcgtcttctaattcgctgggctgccattttggtttcagcaaatrccttcaaattcttgaagaattatgtattaaatataaaaaagtgtcaacattcgttttctcaatttttaaactcatgtgctgtgtcatacatctaactttaaccctttaaactttatcgttccagcttttgggtggagtgaaagcttgaagtatttggaattggtgttccacaggtgaactcaaaatgtctttggtattttactgttttattttctctaatttaaaaataggacgtttggactatatgaattctctctaccccttttcttgtatttttttgcatgaacatgtaacttgtaattctggttatcagcgttctcatgtttcttttgtttgctgaccttggtagtttctgagaatttctggagggagtaatagcaccagcaacagtacatgtgagaatcttaagttacttcaggaaggaacwttgaagggcagattttacctttcaccaggttattggggtctctagtttggtgttccatagtccatagttctcatggttttgtttgtttgtttttttgtctgtcgcccaggctggagtgcagtggcacgatctcggctcactgcaacgtccacctcccgggttcaagggattctcctgcctcagcctccctggtagctgggactacaggcgcgtgccatcacgcccggctaattttttgtatttttagtagagacggggtttcaccgtgttagccaggatggcctcgatctcctgacctcgtgatccgcccgtgtcgacctcccagttctcatgttttatctatggaatgctcaagtaggatttactttagatcttttttcttccagagtcttgtttttaatatcttaaggtatgagatttcttygctatcttctcagagatttttctttgacatggtggtaataatgcagcttatggttttgaaatggatgtttgtcatgaatttgctaatcatccagttcttgattagttggtcacacaacaagtgtctttgagcttatttttatttaataagatcaatttctaacgttttagtttcaaaattttagtattaaaaccaatctttgtttaaaacagatgttaagaattagttatttgaaatatctagcagtgtgtgttaatggattagtgttcttctaagtcttttgggcagtgaaggtgaggggggtcttatcctgagattgagttagttgatttttattctgaaagaacgtattactttttatggtagcctacattatgtttcccctcttgtaggtatgttttctgagtcttgaattgtttttcttttttttttcaaaaagggaaaaaaccggattttagttgtcatttggttcttttaggagctgtgtttttgaaagccatcctgtgtattgctaagttcttgtattattttaacatagagtttaacgttaatatttgggaaagagttagtgcattggacctcaaccctgactggacatgagaatcacttggcggggttaaaaaacaaccacaacaaaaaaactgatccctgggttccacccccagagactgattaattggtctgatagggagcctgggcaaaggtatattttaaaagcattgtggatgattcttacatgcatttggagttgaaaaccactgggctattgtttttatcatgttgttagaactttcaagtggataaataagaaaatggatttttttctcaattgttttcagttattagcatgattatcatttgagcattaattgtctgtcagcactgttaagcattttccatttattgccttacgatgggtctgaggtctgtcaggttcaaccagtggtgcttcgactactgtgctatgttagtgaaatgacactgattgctatttttaaaaaagcatttagagcttttggtttgtttctcgtaccagagtaagttaagatatagtttagtttttaagactatcaagatagtctccaatttgataaatatcttggttgcccaagggagatgttaaaagctatgtggcaaataggtttctccccttccatatatcttccagcgtgctcagggtgatagtttagttggtgcgtttatgacaaaatattacacaacattcctaaaaggtgtagaaactatgcatttgtctcctagtaatttatttaaatgatcccacaaattaccgtttagtgtcacatgaaattytgttatytcagtttgagaatttagagttttatttgtyttagtcaaaatcagtttgattttgattaagcgttttgaattttgtgttgttttgggattgatgtataattgttttatggaacgaatgaaataacaataacagacatttatttggagtttctgtctcttaatccccttggtccattggaccaaattytgcatggtgggggcatggcagcagggaagcctataggagtttaggatytatgagggtttttttttttttttttttttttttttgagacagattctcactctgtcactgaggctggagtggtcacggttcactgcagcctccacctctcctgggctcaggtgatcctctccccttagtctcctgagtagccgggactacaggtgctcccatgcctggctatttgtattttttttctcttttatagagatgggttttgccttgttgcctaagctggtcttgaactgctgggctcaagctgtctgcctacctgggcctcccgaagtgttaggattcccggcatgagcgactgggcccggccctatgagcattcttagtgtgacacaagattccccaaagatctttttgttaaattatagaaaatgagactataaggatcatgaaaaaagttgatgtaataaggaaaaagacttaaaacttctaacacttacctatattgggcattgaatttataatttattgtggattataaagtgatgaccattgtaatatacttttaaagaataacttgtgaaaaagtatattgttaggatgagatcgcttacctaaaatttattcttcaaagatactcatgctaaatcttggtgtcttcaacgtgtgtatacacacatatcttatatttggcagcaaatggattttcaattttattctcaatcactgcctaacaaggattttctaccacctctgtgtatcaatcatctgtggagctttttcaaaatatatatttgctctataggtgagtctgatgtgtaaccagaggtttttttttgcagtcccttttagggaaaggggagaattgagaccctttgcatgtcatgtgttccaccattaggcagcagtactcttgtttgagtttcgttttgttagtcacacagtcaaaaattccagactgaaacacaaacatgtagtgaaaagctcaaacactagaagagacagggattccacactcacatgtattatatacagtatatgtgcacatatatatcaaatttattgtcacttagcaccttctcggtgttacggttccagctctactataaacattaatatctgttaagacatttgtttcctttttaatccgttcaacaaatacttctggggcatctgctgtgtgctaggcactgttctagagattactgttgtctagaagctaacatatgaagtgaggtgggctggactagctgatctctaaagtctttagtgctagttttctggcattcttttatgtacctcgtaggagagattggattaagttgttatttaaaaaaactttgttatggtatatgccaattgaattttttttgtcactaaatagaatttcattctgaactccagttttctccagtgagcccaaatgtcaagtatagtagaaataggttcttttggaattcttggcatactggctttaggaatagctgtacttctgatgctgttaatttttgaccagaaattacatactctggtgtcaccccttactcctgccattcctttgctgtattgatgctctattatctctatacagtgtgtttttctatttaatttactttgtttaggtgttttgattaattttgtcctcacaattctatctttaaggttagtggctttcattctaagtcagtgataatatccttagcacctagaaagtgcctggcatatagacatttagtaactgttggatgaatatagtttatcacattcttgctattttacttattttttgctaaatctttttacttctgggagtcacttttcttactaatctcattacaatgagaaatcctggaagagatctcaattctttctagtcagacccttcatttttcagatgaaaaaaatggctcaaagaggtgaaaggtgaagtaacttgaccaagatagcatgccatagactaccttctttatgaagctatatctatatgtgtcaaatcacattaattattaaattctctgtagtcactcataaaattaacattaaactgtctccctggtaatggataataaggtcagggattctgtcctttacctttgtatattacagagcacctagaataatactgtttataataaccatttgattacctgaatgggaaaatctggggcagtatttaacttgcagtacctccaacctcttgtacagaattgattcatcttcattttatggcaccctacagtttattcttattaatcatgtgagctttgaacaccatgttagtcaaccataatcaaaggaattgttttccttgggatgagtttgagctggtgatcgtgcatattagatcccatcttctacagagcctgtgaattgggtggaaaggaaaaagggagtggcgaagcctcctgttagtatccttgatgtccattttattcctgctgactttggtggctattgagagttataagttgaggctgttggttacatctctcatttctagtcttttctgttaactggttacttagaactcctaagtaaggccgctcattattaacttggaccccagagagcatggaagttaccgtatagtattgaacccatttctgcctaacagtgttttctctctggtcgaggtgtagtgtacaaagttttggttgctctgcttggtaacatctctggagttcagagcacagggatcagtaaactttttctgtaaagggccacatagtaaatactttggactttgtgggctaagaggcaaaattgaggacattgggtaaaatttttattggtgaaataaaaaatataattaaatacagttatgtataacttaggtctaatgagaaaaacaatttggtgtgtgtgtgtggaggggaggtaatacagtattttgctttattgggtaaagttcagtgttccctgtcatcaaattgattgcagacgttctgtgtgaaatccattcttaccttgtgagctgtacaaaaacaggaggctggaattggtctgttaccatagtttgccagcccctagttaagagcagtgatttttttttttaagaggaggggtctcgctgtcactcaggctggattgtggtgacgcaatcatagctcattgtagcctggaattcctgggttcaaggcatcctcgcacctcagcctgccgagtaagtaggaccacaggccgacatcacctcacctggttaatttttgttagagaacaggggtttgactgtgtttcccaggctggtctcaaactcctggcctcaagcaatcctcctgttttggcctcccagtgttgctgggattataggcctgagccactgtgcttgacctcctatttgatacactatatgttaacaactctgaacctcctttccttaagtcaggttcaaacttctgtacattagctgatgaaagggatttctttttattgcaaggtggtattgcctgagaatagtttggtttcagcagctttgctgtatttgtacggcagtatcttgtgtttatgtgcaagttcagatgtattttgcctttttataagaatgagcagaaaacaaaaaagtaaatggcgcgatctcggctcaccacaacctccgcctcctgggttcaagtgattctcctgcctcggcctcctgagtagctgggattacaggcatgcgccaccacacccagctaattttgtatttttaatagagttggggtttctccatgttggtcaggctgtcttgaactcccgacctcaggtgatccgcctgcctcggcttcccaaagtgctgggattacaggcatgagccatcatgcctggcctacctggaggtcttaaatatccttgagacagagggaactggttagggatatgaatcttaaaccttactggattaggttgtgctcattggttaggttagttggctttgtgcaaatagtgaatgcaataattagaatgaaataggaattaagtgaggcaaatgtatgatgaagtttacatttgaaaggtgagggtataattagaaataaaagtttctgtactctgtgagtgggaaaaacccctaaaaaggtgactgtcgtttttgaaatttttgacttctctcacattttcgggaatgtgaaaggaggatactggctatgtacagcatttgtccagacttttgaaaatatagaaaatctcatttactcatttaattagtgtgtatattatctgtttactgtgtcctttgtagatataattaattatccaggattcttaagagttgacttggagcatgctgagctgaggcaagagggattgtggggccagactgagtgttggaggaggaacctactgtagtgactacaggtgtatttcttttttytttttttttttttttgaaatggagtttcactcttgttgcccaggctacagtacaatggcgtgatctcggctcactgcaacctccgcctcctgggttcaagtgattctccagcctcaacctcctgagtagctgggattacaggtgggtgccactatacccggctaattttgtatttttagtagagatggggtttcaccatgttggccaggctggtctcgaactcctgacctcaggtgatccacctgcctcatcctcccagagtgctgggattacaggtgtgagccaccgtgcctggtgtgtttcttgtctgatgtcagtgcatgtcgttatctgagccatatcaatgtcagctgaggattgctttgttatcctcggtgcattatgggaaggagaatcatgtcagtgctaccttactgtgattgaattgaattcattgatttaatatagattcagttagtacgccttatccataatatttgggatcagaagtgtttccgattttgtaattttttccccatattttggaatatttggaatattacttgcgggtgagtgaaaattcaaaatccgaaatttggggccaggcgcggtggctcacccctgtaatcccagcactttgggaggctgaggcgggcagatcacttgaggtcaggagttygagaccagcctggccaacatggtgagacccccgtctctactaaaaatatgaaaattagccaggcatggtggtgtgcacctgtaatcccagctactcaggaggctgaggctggagaatcccttgaacccaggaggtggaggttgcagtgagcccagatcgcggtactgcactscgtctagcctgggtgacagagcgagactccgtctcaaaaaaaaaaaaaaaagttcagattttggagcattttggattccagatttttcagataagggatgctcaacctgtgccattttaggcaccagagggtatataaagatgattctctgctttcaaggctctgaagtatggtgaaccagacagttatacagtgcaattacagctgtattaagtggaggtgtgaaaagtgtagtaggagagatggagaaatcattgtttggcattgggtgaggtcttcaaagatgtcctattttcatggccctattaattagagcagggacttccggtcagagggatcaacttgagatcaggcagggttttttaaccctattgacagtttggggcagataagtctttgttgtgaggtgctgtcctactcagccctggcttctacccacaagatgccagtggtatagcccctaccccactcatatgtcttcagacattgccagttgtgccctgggggcaaaattgagaaccattatttgaaatggagcaatgcaagtgtgaaagtatagtgttttcagagtaagaactagtaggagagtgtgcaaggaacactagagatactgggaggggaggggttatgggagatggaactgaaaggtagtttgagtgaagctaaaatcacaaggggtaaccttgagtgccatgttaggacatttgccttttactgttaaggtaatgagagatgtactttgaagtttaagtgaaaggagacattagatttstgtttgtttttgaaagataattctgatggcattcgtggcagatgtgttggagagttgagtgtcgggggattgagatggtattttaaccgttcttctgaaagataagaaataatgattagggaatggaataaaggaaggagatcaatggggtgctcccatggtatgagggaggtgctgctaatttgagtttggcttttctgccacagaatggagtactgagctaaaaagcaaaacacctctattgtcttcctttcaacttttcctgccacctccaattccctttcctcactgagagctgctgtctgttgaggtctgttgaaaggtcattgagagaagggaatctgggttacagaatgactactctctcaatgtggttccttaaacagtggattatcaaagcacaagtgtcatcttcccccccgctccccgcaaggggttagactggcatccagagagcattaattgtagcctctccttggtttgtgtagatgttattttgccctaaaatactttgatatacaaacataggtgaataatctgatggtttaattgtaattatttcattgcttcctattttggaggttagctttactattttaagtgagaatgtagtcagtggaagggtactggacttggagtcacaagatctgtgttttatttttttattttattgattttttgagacagagtctcgctctgccgcccaggctggagtgtagtggtgtgatctcagctcagtgcaacgtctgcctcctgggtttaagtgattctgctgcctctgcctctcaagtagcttaggattacaggcaccaccacccacggckaatttttgtattttttgtagagatgggattttactatgttggccaggctggtctcaaactcctgacctcagctgatcagcctgccttggtcccccaaagtggtggaattacaggcatgagccaccgcgcctggtcaagagctgtgctttagttccagttacccaactccctgtgttaaatcacttagctaacctcttgggtcttcatgactctgtaaaaccaagatgttgggcaagaggtgagttaaactactacttttttaagttcttaaattttatctttattcctaaagatgtggaaaaatctgtagtcaagagaaattgtcaagtaaaggaaaacagagaaggtaaacactttaatgggtttagaagttggttatattcctccatttacttgtcaatccaacaacttgaatgtctcctctcccttgtttctcctgtgtggtctgaagggctttattttatttagaatcctgtgggttaattgtgcttggcccacagcttgtactgtgaatttagggaccatagactttgtagccaggggtataatttctttgttggcagagcaacttaaagtttggttaagttttcatctgcagtctagtgctttaataacataacttgctaaaaagtgatatagcctgctaggggaaatagtatttagggggaaattattttttccgaattgaagatgaaaatacacagataaatacagtaatagtgatttttatctggcacagatggtttcagagaaaatgttgatacctcatttcttattttactgtaagagaactagcaaaagaagcttattttgtttcttaggtgagtcattctcaaacttggtctcaggatgcttttatactcttaaattattgaggatcccagagagcttttgtttatgtggggttacagccattgatgatttactgtattagaaatgaaaacagacatttaataaagttatgtatgcttttaaaagtaacaaaaccccactgcatgtcaattagatatttttatgaaaaataacttttccagaacaaaaattagaagagaggcattgttttacatgttttacaaatctcctatctggcttaatagaagacaactggattctctgcctccttctgccttcaatctattgcgatataatacgtcatatagcctttggaagaactccatagtacacttgagaaagaatgacagtgaaaatggcaagtaaagtcttaagaaaacaattttgacctctctgacctcttgaaaagatctcagggatctttgagaaccagtgtcttagactgccaagagaagatgtgatgttatcttttgagtggcttatctactgtaaattttattttaactgagatatataacttacagtaaaatgcacaaatatgagattgtatagcttgataaatttttagaaaatatatacatctgtgtagtcattcagatcaagatacagaatatttccagcaccctggaaggktcccttatgcctctacctcctccctgtaaaaccccaaataccctgacctcttttttttttttttttcttgagatggagtctcgctctgttgcccaggctggagtgcagtggtgtgatcttggctcactgcagcctccatctcctgggttcaagcgattstcctgcctcagcctcccgagtagctggaattacaggcacacaccaccacacctggctaattttgtatttttagtagagatggagtttggccatgttggccaggctggtctcgaactgctgacmtcaagtgatctgtccacctcggcctcccaaagtgcagggattacaggcgtgagccaccgtgcccagcctgacctctgtcttttaatgaatgttatgcctatttttgaacttcggataaatggagtaatacactatatactcctgtatctggctgctgttgctcaatacatgatcactaactgtctttttctttattgtttttttgagatggagtcttgctctgttgcccaggctggagtgcagtggcgagcttggctaactgcaacgtccgcctcccaggttcaagtgattctcttgtttcagcctcccgagtagctgggattacaggcgcctgccaccacacccggctaatttttgtgtttttagtagagatggggtttcgccacattggccaggctggtctcgaactgctgactgcctgcctcagcctcccaaagtgctgggattacaggtgtgagccmccgtgcccagccaacttcgtctttttcattactgtatagtattgtattaaatccatgatttatttatccattctgttggattgaggtgggtttttttcatttgtttgttttgaaacagggtcttgctctatcactcaggctggagtgcagtggtgtgatcacagctcagtgcagccttgtccttccaggctctagcgattcctcccacctytgcctcttgagtagctgggaccacgaccacatgccataatgcccagataattgttttttttttttttttttttttttttaaacagagatggagtctcactatgttgctcaggctggtctcgagctcctgggctccagcaatcctcctgcctcagcctcccagagtgctgggattacaggtgtgagccactgtgtctggctgacgtttgagattgttcagtgttttcaccaatataaagaatgttgccatgaacacttttgtatatgtcttttggtggtcttttgctgcatatccaggattggaattgctggtttataggatacatatgtgtttagctttagtyaatactgccaaacagatttcccaagtagttgtaccagtttaaactcctactagcagtaggtcgtgttgctcttccttatcaatacttagtattattatcagtcagtgtttstaattttagccctcttggtggaagtttaggaatatctggtggcttaaatttgtatttgtgtctagtgtttagaatactttcacatgctcaccagtcattttactatttaactcttgcttacctataaaatttgaagcttggctaataacatcttgtgtagttcaaaatcactagttgaatgaattttctgaaatgaggcttttaaaaataaacttaattggctggtcatggtggctcacacctgtaatcccagcactttgggaggccaaggcaggtggatcacgaggtcaggagatcgagaccatcctgaccaacataatgaaaccctgttgctactaaaaatacaaaaattagctaggcttggtggcatatgcttgtaatcccttttctgagaagtctttaatagatactctctaccctcttctaatttactccctttccaagctttttattaaggaaaaatcaaacatacacagatgtagataaacttccatttgcccatcaatcagcttcaactcatggctagtcttttttacctacccccttccattttgatgcaaaacccagacagcatttcatcttacatatttcagtatatcccattctaatttagatgtttttttccttggtgctcatattgtgctgctctattgtaaattataagttcaatttagttcttacatattctctcattctgctttgtaaacttctcacaggtaacaatcactaacacttaacacctgtgtgtgaggatctatgaaattgcttcacctgcataaattctttatattcttacaacagctctaaaaggtagatattactgtctctgttgtatatataaggaaaccaaggcacagaggttgaataacttgtccagcttgtacacctagttaagtggtagaacaggaattcaaactaaggcagtttatcttcagtctttagtgttaactactgcattacataatgtctgagtaaatgagcgctctactgcatataagttccttcaatcgtcctttttaattagcattttttccttgttaattttgcctcctgtcttgcatttccaacggcacacaagtattatttgctctttcataaaatctagctaaaagggcccttagcatgcaactctcttattttttatttatttaaaaaaaattttttttgaaatggagttttgctcttgtcacctgagctggagtgcaatggcgtgatctcagctcactgcaacctctgcctcctgggttcaagcaattctcctacctcagcctcctcagtagctgggattactggtgcccaccaccacgcccagctaatttttgtatttttagtagagatggggtttcaccatgttggccaggcaggtctcgaactcctgacctcaggtgatccacccgcctcagcctcccaaagtgctgggattgcagatgtggccacctctcctgttttaaagatgatcatcccttgcttttagctgttctgcttctaattttatatgtgatattctatcaaaaaattgctgacctctggtctttttgtttaataatagtgtctctataattatggggagaaggtaccacatactgaatttaaatattttcgtcttttatatactatattttaaatttttaatgtttttatttttgctttaacattgtatttgaaaatttcatttgcagtaactcgatacagctttcactttagatttttctgttttgagtattagcccttccggtgttaatttgagtgttcgaatctttaggattaattgtgcaaagatataaagactttagagaagccagccaggcacggtggctcacacctgtaatttcagcactttgggaggcttaggcgggtggatcacgaggtcaggagttcgagagcagcctggccaatatggtgaaacccagtctctaccaaaaatacaaaaaaaaaaaaaattagccgggtgtggtggcacatgcccgtagtcccaggtacttaggaggctgaggtaggagaattgcttggacccgggaggttggctcactgcaacctccacctcctgggttcaaacagtctccctgcttcagcctccctagtagctgggattataggcgcccgccaccacgcctatagcaaagatcgcactactgcactccagcctgggcgactgagcragactccgtctcaaaaaaaataaattaaaaaaaawaaataaataatgactttagaggatacttcttctcagatctttcttagtggaatttgtgtatgtaaaactattacagaaacaacccaaatgtccattgtccatcaagtgatgaatgcataaataaaatatacaatggaatattatctgtcartgaaaagaaatgaagtactgatacatgctacaacttggatgaactttgaaaatgttatgcttaagtgaaataaaccagtcacaaaagacctcatatcacatgatgccatttatatgaaaatagattagcatgggactgaggggaggttggagggaagggagaatgctattaatggtatgaagtttctttttgggggtgatgaaaaartaatctgagatcgattttggtgataattgtgcaactctgaatatactgagaacctttgacttgtacactttaaatggacgatttgtatggtatgtgaattagatctcaagggtgttattttaaaaaacttaaatataatttataatgataatctcattgattaaacataatttgaaattttttggtgtactttttcagattctttacatttatgatttaaccaatctggttttggaagatacaggcagaaagaacacccagtggaggcacataaaaaatgttaytagactgggtgcagtggctcatgcctgtaatcccagcactttgggaggtggaggtgggcggatcacttgaggtcaggagttcaagaccagcctggccaacatagggaaaacctgtctctactaaaaatacaaaaaattaattagctgagtgtggtggcacacacctgtaatcccagcaacttgagagggtgaggcacgagaattgcttgagcccaggaggtggaggttgcagtgagttgagatcacgccgctggactcaagtctgggcgacagaacgagactgtctcaaaaaaaagaaaaagttaattattaatactgccttgtctaaaatgtcataaatgaaatgagatctttcttttcagtgtattgggttagcatttcatgattgggttagtaacttagaaaagttagataattttgtcaaaaattggtaaaaagctgttaacagataactttgagtttatcttttttttttttgagacggagtcttgctctctcacccaggctggagtgcagtggtgcaatcttggctcactgcaacctccacctcctgggttcaaacaatctccctgcttcaacttccctagtagctgggattataggcgcccgccaccacgcccggctaattgttgtattttttagtagagacagggtttcgccatattggccaggctagtcttgaactcctgacctcaggtgatccgcctgccttggcctcccaaagtgctgggattacaggcttgagccaccacgcccggcctaactttgagtttatcttaacctgttgtttcaacagagtagattgatagttaggcatacccgcattctgtaacatttgatgtgacttatgtctaatattaagtcaacattgctcacctattggctgatttagggactgggatttgtcggaacttcacagcctttgtaacgatttaaaaaaggagttaagaaaggtgttttctttttaaaataagtcttttcgttttgatgatatttttcaacattagtacatgcatttttggattatccagatgactgcctcataatcaagaactgttaacatcatttcggtacttatgttagcttaataatgtgttggtgccaagggcaaatgatgtcacaggatactatgtgtatagagtagtgtaatcattcaggtagaagtaggaacatatgatggtggtatagccatgcaaaactcgaacccatgccttagcattcagtaatacactgccatctgtcacgttatattaatagttttatttgtattccatttataaatttattttagttttagttatgagagcagtaagcataaggaatttaatcctaatttcatttctgcatttatttaagcaacattaaaatagaaagtgattaaattagtttttaaaaattctgttatgatagaaccagaatttgcaagcttgagccagcttacttaatattattgctggaaacctagcatttggcattaggtgactggaactgggactgcagttttgtatttactaggttatttctctatttatgaaatgggaaatatatttctaactaaaagggtcgttcatttgttcattctttcactcaacagataattagttgtgtagcaccacataattttatctcattactagtttaattttccctactgtcaaattttcttcagagccagcacaaaatctgataggaatattatgctatgaattgtcttctagaaggtaagataccacccccactcccccttttttgagacaggttctcgctctgtcacccaggctgaagtgcagtggcgtgatcatggctcactatagccttgaactcccaggcttaagccatcctcctgtctcagcactcccagtagttgggactacaggtgcatgctaccacgctgagctaatttttgtattttttgtagagaaggattttgccatattgcccaggctggtgtgctgggcaattcctgggctcaagtgatctgcccacctcggcctcccaaagtgttgggattacaggtgtgagccacttcacacggcctatacctttaacttgaaatttactttttaaaaaataggacaaaataatttwaaaatgtggtaggattctgttgtaatgcaatggaataacagctatatcagtaaaactgttgaggctgttcatttatttaaaaacctaagcaattgtggtgtgtataccaggagcagcaaattctgataatttatagttgggagaataattttcctctgggctggtctagagattatatttatagggaccctctgaagattcaaaaataagaattgtcaagaggggataatcagcatttcaagagaggaataaccagcacttgttaaaacacctgctctttactgggtccctctgtgtgtctggtacttcacatacattctcctattaaagcttttcaacagtctctggaggtattagccatcttgagagagaaaaaaaaaagatacctggagttagaacatcatctgttgtcggcctgtctgctatgttgcagtatatgcattgttgaaaacytcatagtctgcaaaaatcaggtascaaaaactaacaatgtgtatagggaaaaatgggcttaagagtaaactgatcacttcaaagctatgttactttgtaattagagcactaacaaaacaataaaaattccagtaaaatagcacagttttgaagatcctaaatttctgacaaactacaataaatataggacttgaaaaaggtagcttgatggaaggggcaggtataagggggagggttggggtgactgacttagagagacaaagctaagatgcataaatatcaggtggaactgcgtacatacttctgagacagagcatgtggcctgackaagccaagaagaataatgtggggctaggaggtggtggtgatgagcatctggttcagacctataacccccaaccccatgctgcattcagcttctgttacttgtgggtacaaaacatcaatgtgttgggggaaaagtggcaaccactattctactttgtgaatttgacgactccaggtacctcataagtggaatcataaaatatttgtccttttgtgaccgctttatttcagttaacatagtgccctcaaggttcatccatattgtagcatgtcaaaatttccttgctttctaaagctggattattttccattgtttgtatgtatattttattgacacattcatctgtcaaayggatacatatgcttccacattttggctattgtgactaatgccgctatgaacatgggtgtacaagtatttgttcaagtccctttcagttcttttgagtgtatacccagaagtggaattgctgtatgtatcatatgtaaattctgtgtttaactttttgaggaatcaccatatgttttccacagtggctgcaccattttacatttcttccagcaatgcacaggggttccagtttctccccttatccttgctatcacttgtgttttctgcctttttgattatagccatcctagtgatatctcatagtggttttggtttrcatttccctgatggctaataatgttgagtatcttttcatatgcttattgaccatttgtatgtcttacacattcagatcctttgcccatttttcaattgagttgtctttttattattattgagttgtatgaattctttgtatattctagatacaagtcccttactggatacattatttgtaaatgtttttcttgtaatttgtgggctgtgggttgtcttctcactgtttacagtgttcttcggagcacagaaattttaaaattttgataaagtcccatttaactatttcttttgttgctcctgcttttggtattgtatctgttagaatccattgccaaatcctaggtcattaagatttaccctcatgtttcattctaagagttctatagtttttttatcttatatttaggtctttgatgcatttcatgttaattcatgttgttactgggaaacacttctatatgtagtaggctcaacaatgaattatacacatgttgtgttacacaatgcattttaagtcagttaagagaaagaaatatgcagtcatactgttttcttataattgcataattgtatttaccagtgttatttcactgagtttgtgtcttgtcatgctcctccggttgtcatactggaagtatatttctgaattaawttttttttttttttttttttttttttagacagagtcttgctctgtcactcaggctggagtgcaatggcgcgatcttggctcactgcaacctccacctcctgggttcaagcacttctcctgcctcaacctccaagtagctgarattacaggtgcctgccaccacgcccagctacttttttgtatttttagtararatggggttttgccatgttggctaggctggtctcaaattcctgacctcaggtgatccaccagtctcggcctcccaaagtgctgggattacaggcgtgagccactgcacccggccctgaattcatttttgaaataaatttggttgatagttttctttctttcttttcttttctttttttttttttttttgagacagagtcttgttctgttgcccaggctggagtgcagtggtgtgatctcggctcactgcaacctctgccgcctgggttcaagtgattctcctgcctcagcctcccaagcagctgagattacaggcgcccgccaccatgcctggttaagttttgtatttttagtagagatgggtttcacaatgttggccaggctggtcttgaactcctgacctcgtgatccacccgccctggcctcccaaagtgctgggattacagacgtgagccactgcgcctggccaatttttgtatttttagtaaggatgaggtttcaccatgttgaccaggctggtctcgaacttctgacctcaggtgagccacctgccttggcctcccaaagtgctgggattacaggcgtgagccactgcgcttggcacgatagttttatttctttcagtgcttgaagaatgccatcccactgccttctggccttcaagttttctggtgagaaatcagctgttggtcttactgatgatcctttgtatgtggtgatggatgcastttttgctgcattcaagattgtctttgtatttggcttttgacagttgatgatgtttctcagtctggatcttgaatttatcctacttggaatttgtcgaacttcctgcgtgtgtagattaatggttttcattaaatttggaggcagtttttgattctgatttcttcaaatgtcttttctgttcccttttctcccgtttctggggctctcattatgcatatgttggtttgcttattttgtcacacatttctctgaggctctgttcattttttttctctgttattcagattgcttaatctaacagtctgtatctttgctgattctttgttccgacagctcattggctgaatttttcgtttcagttattgtacttttcaacaccagaatttccgtttggttctttttgttgttaaattctgttagtctctgtttgtttagaaattgtcatattttacttctttaagcatggyttcctttagttcattgaacataagcataagagctgtttttgaggtctctgctaagtctggaccttctcaaagtcagtttcttttgcctactttttttctgtatgtggggcacacattcttctgtgcatgtcttaaatttttttgtttaaaactggaccttttatataatatagcaactttggataccctacacctctagcagctttgttgtttgttgcttccttatttatgtagtgactggctgaactattttagtgcctacccctcagcctgtgatgttgctcttcagcgggtgtagccttagtcatgcctgggatgatggtgattttagcaaggctttgtgagtttctgtgatctctctgttaaacctctctctgtgttggtatcacatgcacatattagcctctactaattgcctactgattggtctgttgatttaaatgactccttgggacataaattgccccacagtctgatccagttaaattctcatgctttccaggggtaagtaatctttgaggctgtgtctgaggtttgttctgaccccaggaaggttcttagcttttatttccctggttctatctggtaagctgctagctgagtagtttaacttgttgctgtccaccacaggtcttttgatagctgcttattaccatgatctctcctgttttgtgttgttttccaacacaccctcaggcagcatattaccatattgtttcaaatagttcactttaagacaacttcagaactctgttcttacggcctgcctttccccctgggcaaaatctttacaccactgcttcagaactgggttggactgtggctcacttctcagagtgacacctctgcttcttgagcagggtgattggctttgcctgccatggaatcttgactctgagtgaggtggggtgggggccattaggaccacgcttttcttgacttgctgcacctggggttaagagcgtctgcctcacaagtggggcctagctggaaaaaagagccccagacttcttagccactcttggtgcaatagagcctgtgcaactcaaagttgggggtgttgagaaatgctgcctgcctttacctcctggggagataccatcaactgggagctgggtcgggggaggtgtgttcttggccgttctcacctggagtggagctactgtcctgctgagctggctcaaatgccacagactatccttactgagatatggtagattttcttaaataaattattttttcatttggtatatgcccttaggacaatttccagaggcttttagtgtttttkgttttttaaaaaaataattttcaccagttaacgattgtttcactggggagagcatttacggagcctttgakggcaccattccaaaagttatttttaatgtaaaattactcaaattgcctacagccacttaaaaatttgtgtttgagaatgctttggaaaagatgctgaagtttatatgtatgtaaaagcttcattactctaattgtgtacgtacaacttgacagatgctcgatatggaggaggtttgaataagggtgtttggccaattactgagcatttctaaaagaatacatttctgctgccacaaagaattttgaatgcaggatgcagttctgttgcagtgacttataggaagtagccatggatgtacacagtaatttagtgacaaaaatcaggaatctgtaaggggtgtgtatgtgtgtgtgaatagtgttggaaataaaatacgagcatttagctcaagtaacatatttgaatttaacaaagattaattggacatctttatttgcattaacctgaattattgattggatttaaagctgtctagaagtagcatcacactggggatggggggggcaggaaacctgtgcttaatacagttatcttgactggctttgggtataatttatcataatgtgtgataagaatgataaagtctgtgcaaatgataatggcagtgctggtggaactaggaaaagaaaagcttttacctttgagcaaaggccacattttaaaataacttagggatgtttaggtgtatagctgtgggctcaactattaaaaataacttactgtatttcagactccttaacatgaacctcctcatttaacacactctgtcagagggagagatccccagacttytcagccactcctgcctgtttgagaaggattctcaaacaccccctcccccagagaaggggcctcattttgttgcccaggctggcctcaaactcctgggctcaagtgatcttcctgtctcagcctccggagtagctggggctataggtgtgcaccaccacagccagctaatttttataacatgattttttattccatatatctgaggaatacagctaattgtgtcttagttccttgatatgtactataacagtgacaacgatacttaacatgcagaaattgtgaattaagtgaaaaatccaattttgtaaaacatgtttctgcatcaaaaactaaacagtttgtcttgggagtggggttatggtgagattaatggtagtttccccctcccttttctgacattattgatgtatggtgtgatagttaaaactgtaggacactggcacttgtactgtctgagtttgaatcctggctcctaccactttgacagcctgtagtcctctgtcccagtttttttactcatgaaattgggctgataatagggttgttmtaaggattaacttgcttagaatagtgcctgagacaaatacttaaatgttagctattgtyactattaatgaggaaaatgttatttaaaatttgaggtgtgtcaacctggctgcactagtattgaagttgggaaatgagagacaaagttggaaaaataagttaaaggctgattatgaatgaccttgaatatgtaccagatggagaagagaagccattcaaggttttagagattgaaagtgttgagattaatttagcattaatatactgaacgattggtatggtagtgtggacgctagccaggatgctgttaaaataggagtctaggctagagtggtttgagtgggagtggaaaagataacattggacacatcatgaaagaagaatggaggagatgggaagggagagatttgactttgtttttactgtatttccccacactcccaattttagttttgagcactgctatagactgaacgtttgtctccacccctccacctcgcaaattcatatgttgaaacctaaccctcatgtgatgaggtggggcctttgggaggtgattgggtcacgagagtggaaccttcacaaatgggattagtgcccttgtattaataaaagagactccagggagttccctcactctttctgccttgtgaagatacagtaagaagattgctatctgtaaaccagaacgcaggccttcaccagacgctaaatatgcttggcaccttgatcttagactccccagcctccagaactgttaagtgttacttgagccactcactctgagcttttgttacagaaggggctaagacaaacaaacacctgttgtttgccaatgaatccttgggattcagtgatgagcaaagcttgcatagcttctgcccttaaggagcttttatgttttagtaagaagataaactcacacaggtgctatgagaaaatagggtagctggctcctagagtctaggatgtgagtacttgatgaatcctgagtcaggagagttgggagctgctgaattaatatgggtaaaactaagcagactgctttgttcagaggctctcagaggtggcatgaaggagcactttgtgaaggaacaacaagaaggcaaattgaactggagtttgaacaagctttggctggggttagctgcaagatgaggctggaattgggtgtttgagggccttgtagaccattagataagtattttgatcttcatcctggtctttgaagattttttttttttttttttgagacggagtttcactcttgttgcccaggctggagtgcggtggcacaatcttggctcactgcaacctccacgtcccgggttcaagcagttctcctgcctcagcctccctagtagctgggactacaggcatgcaccaccatgcccggctaattttgtatttttagtagagatggggtttctccacgttggtcaggctggtctcgaactcccgacctcaggtgatctgcctgccttggcctcccaaagtgctgggattacaggcgtcagccactgcgcccagccagtctttgaagatttttaagcagtgctrtgacatattttgcatttcagtaaaactcatagtgatgatttttaataccgaaagaacaaaacaattgtaggaatggatgcaggcctgacagtcactgctttcaaaagaaagctcaatcccttttccctgttgtttccttttctccccrtttgaatttatagagaacaacagattctgtagagaaccttcatggtatagttggaagagccaagggttttagagtcttaacggaaattattgtgatcttgtataagctcagtgtacttaatctcttagcttctatttatgtctgttaaattggactgatggctgtatgagataggtattatgattaaatgagattatacaaataaagcacctactgttgtgcttgatacacaagtaagtacttaaaacttttcaagaataatatacaaactaagaactggaaaggagccacagagaacttttgaatggaatggaaccaacaagtccacaaaagaaaaaaaatctttagcataaatactgagacctgtttcgccttgcccacagggtggttatggaccatagtgtctaaatataattgattgtgaggtgtatgctacaagtaattataagcaattaaataattagttaaaatagtaatgtttgcaaatgagattacctaaaaatattagagtcaagattatccccttaataattattttcactcacatttcatgtgttttcgattgaggcaccaaaagaatccttgaagtccagcatataagctattaatgtttgctgtttttattttgtgctctgctttatacagtttttgttttttggcaatttctctgtgtccatagaagtgtgtcaaacctgtgataaccttattttagtgtcctttctcatgctgtggtagaaaaactgctgtgtaggttactttttcttctagacaacaatgcactaaaattttgtctttaaaaacataattgaatctgtcatagcaacagcatgttcaatttaaaaattcaaaaagatctaaacttggcttaaaaatacgtttttttgttgttgtttttatttgagatggagtctcgctctgtcgcccgggctggagtgtagtggtgcgatcttgctctctgcaagctctgcctcctgggttcacaccattctcctgcctcagcctcccgagtagctgggacttcaggcacctgccaccatgcccgactaattttttgtatttttagtagagacagggtttcaccgtgttagccaggatggtctccaactcccgatttgtgatctgcccgcctcggcctcccaaagtgctggggttacaggcatgagccaccgcgcctggccaaaaataagtatttttgtactctaaaatggtgggcattttgaaagaaagcttagctgaaaagatgctgcttactggattgtaataaacatgaaacaattgatttatacattcacattataattttaaatcagtatatagttgacccttgaacaacatgggttcaaactgtgtggtccactttcactgcagatttttttcaataaatatattggaaaatattttggagatttgtgacaatttgaaaaaaacaggataaactgcatagcttggaaatactgaaaaaattaagaaaggtgtgtcatgaacgcgtaaaatacatgtagataataatctatttactaccataaaatatacataaatctattataaatttaacatttatcaaaacttaatgcacacaaacgtttttatagaccacatgtggtgccacgtgcagttgagagaaatgtgaacaaatgtaaagatggattaagtcataactgcataaaattaactagtacattctctactactgtaatttcatagccatctccttttgctactgcgatgagtttgttgtaagtatccgatgaaaatatgtgacgctgatctctgcatgagcagttcatctctccagtaaatggtctatcatagtaaaaaatgatctctcatgttctcatgtatttttcatcatgtttagtgcaataccataaaccttgaataacattacgggactcatgaagtgycactagtggtgctggcgaacaggctcccaagaagcagagaaaagtcatgacgttataatgttctgcaaagtttcttataagaaaaagttgaattgcttgataggtaccatagattgaggtctgaggtctgcagctgtggttgtccgccatttcagatgattgatcttgtaaacagatgatgtaattttactttattggtaaaaacagtacagtactataaatacattttctgattttcttctttccttttttttcccttttcttttttttttttttgagactatctcactctgtcacccaggctagagtgcagtggtgcgatcttagctcgctgcaacctccacctcccgagttcaagcgattctctgcctcagcctccctagtagctgggattaaaggtgcacaccatcacacctggctaattttttttgcattttttattagagacggggttttaccatgttggccaggccggtctcaaactcctgacttcaagtgatccgcccgcctcagcctcccaaagtgctgggattacaggtgtgtgagtcaccaccccttctgagtttctttttttctctagcttgctttattgtaagaatacagtattataatacatgtaacaaaatatgttagtcgcctctttatgatcagtaaggcttcttgtcatcagtatgctgttagtagttaagtttctgaggaatcaaaagttatttatgggccgggcgcagtggcttatgcctgtaatcccaacactttgagaggccgaggcgggtggatcacgaggtcaggagttttagaccagcctggccaacatagtgaaaacccatctctactaaaaatacaaaaattagcccggcattgtggcacctgcctgtagtcccagctgcttgggaggctaaggcaggagaatcacttgaaaccaggaggcagaggttgcagtgagccgagattgtgccactgcactctagcctgggcaacagagcaagactccgtctccaaaaaaaaaaaaaagaaaaagaaaaaaaaaaaaagtagtgaggtctggcgccctctactggtgaaggctaagtatagcttgtgttgtacagttaggtctcttgtctctagtgagtcaaatattttaatggaaaamcaagggttatagatgtcggttaaacatagaaatttgaaaggaagagaagtaattccctttgattgttggtgyataaaaccggaataggcaaaattcmcaagtcaagattaatttccaagtcaagataatttccatgtttgagcttaaggatgatctatcaaattgttttctaagaaactcatttcactttgatgtccagtaaaggaaataatctggtagggggttggagttgctgttgcttgtttattgtctctatccccagtctgtaatgttccrcaaaagcagagatatttgatgcactgtgtacttccatatattctcctatgattagaacaatatgtgacccattgcagatgctcagtacacaatttttgaatgactaagctttgagtttttatttaaacaccttttttttggatgaaaagaaaaattgagagaagaaaatcttaagtatcctaggatcatatgtagaatcagaggatttcaacgtgctgtataaaaggagagagattctggaacatagggcaaattttagcagagttgggataatgactgggtaagaaaggataattctttgttctaaaagggatttctctggtattaargccctgtgtgaaagctgctggagaaattcagttctgcaaagtttaaagtaaatggtttgctgtttatggagtactagattacttaatgcagtccagcctttatctaggtaaaggtgatgcttttcccattgtggaagatgttaggatgctaagtttgaatatgaaaatgtgttgtgtgttgtagaggcaatcaaatcaccattttggttgtatttcccattgagaaaattaaagatgcttctgtttgtgtaataattttgtttttatgaaataaagcgtaaaacttcatgtggtaaaatttcacactgtgattcattgtatttgagcatgcctatggaaagtgattgttactgtgtcaaatattgaatgatttgaataattactaagttgttcagttgtgtgtaggatactgctgctttgacttggtagagagcttgttctagccctgctaggtatgcctaaatctctgtgacataaaaaacaggctcttttagagttgtgagactgctacttgaaatcaggcaaagctgtgtgattcccagctgtttccaccacttgagtattgaataggatttattaagaaaagtagtggtgttattcttggataacttagttgtatctgtgataagtttttttctcccactcaaacctttccaaattatatctgaaggcaatattttcagattcattcctgaaatatttaggaactctgcacagtacattgtagaaagggaaaagaaaatttacatttttttgagaattactgtgcttgctatttgtgagactccttttattaaagcaattctcatggctttcttttttttgtgtgggtaatagcatctcaattttaaatacctggaaaaagaatgagagaggttgttactttctttttaagataggcagattgtaagtgacagaagttggattttgaatgagttatgtttgaatccagaaattatttttaattgctccatgcctatttcctgctctttatcttgcatcttagtgtgctgagggaaagggatcaaattcttatgtggtagtagagagatgcagcagagtatgctatgctgagacctgacatacctgctcagcaataccggaaatatagaaatgaggacagcttgtcgggtagaagaaacagaaaccaagagctagaaaggcgagactatataagagatagggatagcaagcagcttgaggcttttgctgattgagtgtcctgtcataagcagaagatgatttagttctgtggtcttagagaaaggtgttttgagagaggagtttcacactgccgcttttcccatttatcttagttattttgtttaaagggatagtcccttagttatccacatgatacttttgtctagaataatttataccatgacttttgccagatatttctgatttgtgtatagatggttactgaattcatatagatggaaggatattgtgcataaaaatatgagaatataattttgaggtattttagctcaaatgatctccaaatgctaaaagaactgcaaggtaagggaacagtgagtactctatatatacaattttactgtgggaaaatatacataaaatttaccattctaaccttttttttttcttcttcttttttttttttttttgagacggagttttgctctgttgcccaggctggagtgcagtggtgcgacctcggctcactgcaagctctgcctcctgggttcacgccattctcctgcctcagcctcccgagtagctgggactacaggcgcccgctattgtatgtttattagaggtggggtttcaccgtgttagccaggatggtctcaatctcctgacctcgtgatccgcmcaccttggcctccagaagtgctgagattacaggcatgagccaccacgcccggcccttttttcttcttttttgagacggagtctcactctgtcatccaggctggagttcagtggcaccacctcggctcactgcaacctctgccttccggattcaagcgattctcctgccacagccttccgagtagctgggattacaggtgtgcgccaccacgcccagctaatttttgtatttttagcagagacaagtttcaccatgttggtcaggctggtcttgaactcctgatttcaggtgatccacctgcctcagcctcccaaagtgctgggattacaggcgtgaaacaccgtgctsggctgattttaaccatttttaagtttgcagttcagtggcattaagtacattcacattgtgggatgcttaccatcatccatttccagaacttctcttctttccaaactgaagcgctgtaccccttaagcaataactccccatccccccagcccctggcaaccatcattctactttctgtttctgcaagcgtgactaatctgggtacccgtgtacktggaattatgcagtattgttcttttgtgaatgacttatttcacttagcatgatgtcctcaaggttcacccatatcgtagcacctgtcagaatttcctttctttttaaaaaatactaaataatccactgaacataggtaccacattttgttcgtccttgkattgcttcctggaaagacttttaaaagagacacagtattggcttagtagacaaggtgatctccctggccccctacttgccccacacttgggaatatatagtcgctaacctcatcactctcaggaggagatggtagggagtggaggttgtatttattttcgggaaaaaaaacagactcccaggtggtgctgatgaatccatctcttcctacccttttgtgaatagttgaatctgtgttcaagattcccaagttttgcctgaattctagacgtgtagagccaactctctagtggttttcacctcagtttcaatgttaagaactgtacgaactgccactctacccctttccttggaagagaagtggacgggaaacctggagtccaggattatataagccaaggaagctcagagtttcaagaagggrgaggtggtcagtgtctaatgatgagaagagggcaaacaggatgaatattgagaagcagttatttgatttgtcagtaagtagaacattgatctgtggaccttcttctyatgcgtcccctaatrcacatactcaaaagctttgtatgtaatttttaggggaattaatcttgaagcccatccctacgtctcgattaagaccttctggcttaaagcagttttagttttagtagctttggatggagccaggtgatgagagagaatggacaaagtggaaggtgagatgggcggggcatggtggctcacatctgtaatcctagcactttgggaggccagggaggagaattgcttgagcccaggatctcgtgaccagcctgggtctcaaaacaacaacaacaaaaaacccaaaatttacaacttacctactttgtcttcatcacatttatttaaaaagaaagagaagggggaaatggagacagtcttacgacttgtgggaaaagggaagggcagacactggtgattttcagtagggaagattcaagcacaggctgggaaaagattgattggggatgatgatgattggagcatcatcccttggagagggtatacaatgggatcatgaccccaagctgagggacaagaaaaagaagaaactggagcagatttgaagtagacaagaataaagttgaattggttagctaatattttgagtgccaagaaaataattattcacatattagccaggtgtggcagcacgagcctgtagtcccagctactcgggaggctgaggcaggagaattgcttgaacccgggaggcggaggttgcggtgagccaagattgcgccactgcactccagcctgggtgacagagcgagactccgtctcaaaaaagaaaataatcattcacataatttgtcagcagacccaaagtggctaaggaaaatgatatgcaagtttctcaaggttttgaaaattgtctgcttcacgtaacactctttgtaatttagggtgtataaaatggataacaaaagcgaaagagggactgcttaaatcagactttttcattttttttttccactttatgtatttaaagagcttctatgtctttagactcaccagtacttgatagtatcagtcttaaaactttgttttgcttcgccagtttgatcagtggaacaaattttggttttgtaatttgcattttcgcaattactaatgaggttgagaggcaggctagtgtagcatttaagagctatggactccctgggttggaatcccattttgccacttagtacttactgatacggtaatttacttttgctctctgtgcctccctttccttacctgtaaagagggatgatactagttcctactgtatacatttgtaaggattacggtgctacaaacagtgcctaacatgcgaaaagctctattttaaaattatgtcttatttcatgtatttattagtcacttctatttctttttgagaagtctatcttcatatctgtttttctacttctccctgaagcttctgaattttgcctagaggaggacatatcttttttgtgtgtgtgacagagtctcgctctgttgcccaggctgcagtacagtggtgccatctcggctcactgcaagctctgcctcccaggttcacgccattctcctgcctcagcctctccaggtagctgggactacaggtgcccgccaccacgcccggstaattttttgtatttttagtagagacggggtttcgccatgttagccaggatggtcttgatctcctgacctcatgatccgcccgcctcagcctcccaaagtgctgggattacaagcgtgagctaccgcgcccagccaacatatcttaacaaatcagtttttgtgtgtgctttagtcaagttttttttttttttttgagacagggtctcgctgtgttgcccaggctggagtgcagtggccccatttcatctcactgctacctccgcttcctgggttcaagtgattctcctgactcagcctcctcagtagctgggactacaggggtgagccaccatgcctggctaattttttttttttttgtatttttagtagagatggggtgtcaccacgttggccaggctggttttgaactcctgacctcaagtgattcgcttgcctttggcctcccaaagtgctagaattacaggygtgagccactgcgcctgattttaaacatattcctctagcactttctatagttgtttacattttcctcattaatctgcctgtaatttgtgtgtatgtcaggtggtggcaggggttaaaatgtacgtcaacttttttttgacaatgatagagaacttgaagaggaagaagtcttagagtcagatgtgaattagagtcygctctgcataacttaggcaagcccctgctgtctcttatttttgactctgtaaaatggagataatactcaatttctgtgctgcatagactgggtatgagaatcaagtgagttgtggcagagcacttcgaaacttcctgcagtggcttggtaacctaagtggtgaaaaatacttgggtattaatattacagaagcaagcccccaggtaagttttatataccatggtatacatttggttttgaatgtcttaagccaggtcataattagaaaacttagaaatgaaactttgcaatgcttgtgggaagtctctctcaatctcttgagagccagtgagttagaaccaatcagttaagtttctctatctggtggcaccttagagtcattcactgggggagattttttgcaaagttctgatgcctaggccttactcccagatactgtaatttatttcatctggagaggaacctgggcatcagtgttttaaacaaaatcacttcaggtgattttattgtgtagctgaagagggctactgatctaatgaatatagaattgaggatttggtagcattctcctgtacttgtttgctggtcagtttgtaaagaagagttccctgttcttaaacagttgtggccttgtaaccctgttatggctctaggagtggctggagccaaaaccttgccaaagtagagagctgagatcatctgacaaattcagttgtattggagtattatgtagtttgaaccctcttaaaattttaccagaggtttttggggggttttcagggttttttgtttgtagggggtggagagagcggggatcttaacagaaatttgttctctcacaattctgaaggccagaagtccaatatcaatgtgttggtaggtttggtttcttctctggcttgcaggtggccacctttttgctgcatctttacgtggtctttactctgtatgcgtgcacccctgatgtttctctccaaagcgtcaaagtttatgttaaaagtacttagaagctagtttaaaaaaccatttataatgccctagtatcagtgataaacgttagttgtgcggcctgccttgaaatgttttaaaaaatcactttgtactttgtctaagtacacatgttactgaaacaggagagttccctgacgccctcacaggatgtgtgacaggggtgtggctcatttattcctcttatgggaaggggagcacacaggtgagcaggtacaggagccagggtgagcgcttttgggctccggccccacagcagtgtctaggagtgttacaatgctcctttagccctgctgtcccagcataagtgttaaacagctcagagaagagtcagtgtgacagcctttttgggtttctgcatttagggcatcccgagttcttttcctgtgtctgggaagaatcaggtcacagggacttgaaggatggtgaatgtggggatgttattgagtggtggaggtggctgtcagtgggatggggagctggagaggggatggagtgggaagatgatcttctcctggagttcggctatctcacagccaatctccaacggcccccagcttgaacctcctctccacctttagacacttcctctcttctctccttctctgctgtgcttctctgccactcttctgcttttggagcctggggcttggggtttatatgggcacgggataggggtgcgtggcaggccaaaagggaacacttgggcgtgaaaacaggaatgcctgttctcatttagggctgcaggtccaggcttgagccctcaccagggaccccaccctcatacctcttgtccttattcttacagtgtaatgaatgcatcagcaaattgaaaacagatagtttttgccrtttcttaatttaattaaaatgacagttaagtactttgatatattgcctttggagtcatttccaggaggctatatttgtttgttttcttggtataatggccagtgtaccaatgatcagttttaagttaaatgtagtattaatgaaacttcagctttttactttctcttcttgtttgtatagcccctttttcctgattagattcaytggtgatactaaattcgaacagttccataattcatgttttttatatctaaaaccaattactttttcccctttctatttgtaggttatgcaatggtctctgcaagatggtttattcttgaattggacctttttaagactgacaaatgctggtacttcatcttctataagtggactataatttcttttctcaagacaactacataagcagacaaaattgcaaagatctgmcctgtgtcgagtatgacagccacgactcgtggctctccggtcggagggaatgacaaccagggccaggctcctgatggacagtctcagccccccctccaacagaatcaggtaggatgttgaagatactagttaaagctacagtggggctggactcagtggttcacatctgtaatcgcagcactttgggaggttgaggcaggcagatcacttgaggtcaagagtttgagaccagcctggtcaacagggtggaaccctgtctctactaaaaatacaaaaattagccgggcgtggtagcatgcacctgtaatcccagctacttgggaggctgagacaagagaatygcttgaacctgggaggccgaggttgcagtgagctgagatggcgccaccgtactccagcctgggtgacagagcgagtctctgtctcaaaaacaaaaacaaaaaacctacattggtgggtctactgttggggtactaaatgatggaacatgttctaaataatttgtgaagcaactgttattttaagttttgattaacaaaagtgaacacgttgggcgcagtggctcacatctgtaatcccagcactttgggaggytgaggcaggcggatcacaaggtaaggagttcgagaccagcctggccaatatggtgaaaccccatctctactaaaaaatagaaaaagtagctgggtgtggtggcacgtgcctatagtcccagctgctcgggaggctgaggcagaagaatcccttgaaccgggaggcagaggttgcagtgagccgagatggtgccactgcactccagcctgggtgacagagcaagactccatctccgaaaaaaaagaaaagtgaacataggtcttgcatagtaacaagaaagctcaagtggtgtagatggtaatacttgagtatgtagtccgtctttttctgatggcttatactgtcagtcattaaaattaactaagccatgtgtcaattctaagggggaaagcattaaatcattcagtgtagcctatggttagcattggacccatcataaatcatgacaccactttctaccccataaatacatacaattgtaaattgtcaatttacaataagattataaaaagaacatggacccaagtcatgttgcctagcgttcaaatttcagctttgtaccatacttgcgttatgactctgggttaattatataacctctaagcctcagtttgtttatctgtacaatgagggtaataatagtgtaactacttcatggactgttaaaaggatcaattgaattaatgctaaacatagattttggtattaaggttttatgctggccgcaaaactcatagggtgtacctctttctgttctctggatgaatttatgcgaagtttattatttcttcattaattgtttggaagattttactggtggacccatctggcctggggttttatttatggaaaagttttaattgaagatccattttttaatttggagatggggtcttgctcttttgcccaggctggagtgcagtggcgcgatcttggctcactgcaacctccacctccctggttcaagcgattctcctgcctcagcctctcgagtagctgggattacaggcacgtcccaccacactcagctaatttttgtatttttagtagagatgggatttcaccatgttggtcaggctggtctcgaactccttaccttgtgatccgcctgccttgggcctcccaaaatgctgggattacagacatgagccacggtacccggccgatccatttttttttttttaagtggaggaattttttaatttttagtgtcttttggtaaattatggttttcaaggaattggtttatttcatctggattttcaaatttgaggtaaagttgttaacgaccctttttattatcttttttgtgtcttggggcctatggtaatgcctccttatttctgatatttctgataccactaccaatgtcattaaaccttctaaaaacaactctcttggctttactccctccccccacacccctcccgccaacacacacacacacacacacacacacacacacacacacacwcwctctctctctctctctctctctctctctctctcgcgcacgcgcgcgcgctctctctctctctgttccttttgcttactttggatttggtttgctgttctttttctcatttcttgaaatggaaatttagataattgatttcagttgtcttttctaatatatacagttttatattgggaagtattaaattgaatggcaaaacattaaaacttacgatgtacagctcacatcacaacttaccttctatagaggtaagaggtaagttgaggtgtgtgtaaatgatcacaaacatgctgcttccaattattacatgtttatgtagagtcaggtaagtttttaggcaaaagtgttattttgaagtttttatactgttatttggggataagttcttattgtccagctattacagattagatattctatcgtaagtagtatagaaaagagcttctgtctgtctctcctttttcttctttctctgccattttagagaagtgaacaagtcgggggttttttctcccccaaataaatgtgtcagttttattccttttcctctctagttcccattttcgagacataaaatattaaagtgtatggtcacaggtcttggacagagttaagaccttcctgtgacataaatttgttagccagtattcaggtttttaaaagcgtagtcagaggtttgagttggatgctaaagatttctaattttacaccagaagctagtagttagagttccagtatctttccctcttcctttttcattttatacctgcattgtccatggaattctaaccttttttgcaatgtttctgacttgcatggctttagacaaaaatcaaacctttaatttaaccttactcttattttaaggtgtacttgatgatttttagagctcttgggtttgtgatattcaacctaatattctrtgtctacattgtgttctttttcttctaaaaactttacatttttaaagatgactggtaatttaaaataacaaaggaatgaaacaaattacattatccctcactcttacattttgtttttctctactttttaatgttaggattttattttacaagatctgacacggttgtaccaagaagcagcaaccaaagtgttaatcactgttcaatttagggctcgctttttggatatgctttttatgtgctggcataaagggaatttctaaaatcagatttttcacttaattttttttaagcatgcctttaaaaaaaattctcttagagaattttaggctttagtatgtagtaaaactcgataaatgaaacagccttggcagagacaccgtgggatgaacactcttggatgtggttgctgggagggtgcaaattttctggaatgaaatttggcagtatttgtcagtggccttcaaagaaattgtttatactgttctagtaattatatatccaggatcctatcctaaggaaaagttgaagttcaacacaaaggtttatatatgagaacattaattacagctatgtttatgtttgttagcagtaaaaattaccaaatactaaacgtccccttaattttgtttaattcatgcaatattatctggccattaatatttttttaagattcttaatcaaaaaattgaatacctagatatattgaatggaaaaggacagagacttatgtataattccagttttattgaacatatatatggacagtttttatttactcttaaagattacaaggaaataaatatcggtggtgtttataggtgtggaattacaggtgttttaaattttattttttatattttctatgagcatgtgtaaactacctgtatatcagggggcaaggagttaaaaaataataaagcaggcttccaaagttacatacttcacatcagacatttttgttggacttgtaacacttgacttccgtgctgtagtttcctgtgccttgagaccagctctgtgagcacctgcacagttttactgtgttactgtgagcacctgcacagtgcaccatttagttactaattgaccatatgagttcatgtataaactttgtgagtaaaacatattaatgctggtaaactcatctgtcttcgtgcaagtgcttatttatgcaactctttattttacaactgttaaataggtgcttgaatgataaggcgaggggcccgtttctcttaaagggccatcagcctatagtgaatagaaaattcaagaacacatgaataaaaatcagtttaaaatttaggttagtttcattttgaaagagaaaataccacctgctttctgaattaagagtaaaggtcataaaagttcattcacttagttgtgaaaatattatgcactgttaaaacggggggagagaaagacatgctaaaaatgaggaatgaaagagaaaaatagccacgttagttgaaagtgatgttacttatttaagaaccataatcatgaacttctaaataattattgtttggataatggtttgggtgtagggaagttatggaataattacattttctcccttcaaataaaaaacagaagttataaattactttataatgtataaaatgtgatgtatcatatttgtggaataatttctgtcatggcttatataatgggaaatgtaagcagagaggcagtacacattatgattaagaacacaaactatttagactttgatagaaatcctgagtatagaatttgagctgtgtgatcttgggctacttactttctgagttttttttcatctattaaatggcagtaacatatttcattaggttgttgaggattagatgaaattattttaaagcacagtagtacagagatggcctgaaacatcataaactttcaattattttatcttttgtaaaaatttacaatgcagttgtcccttagtattcatggaggattggttccaagacctcttaccacttggatagcaaaattggtgtatgctcaagtccctgatataaaatggtttagtatttgaatataactcatgcacatctttctgtatatacttcacatcatctctagattacttatgatgcctaatacagtgtagatgctatataaatcattattatgctatattgtttggggaataatgacaagcaaaaaagtttgtacatattcagcacataggcaattttttctgaatattttcgatccaaggttgttggttgactttgcagatgcagaacccatggatatgtagggctatttacaaaatttttaaatctgcaatgcttgtctatgttggtgtttggattactattttacatatgttatagaaacttaaatgtggaatgtttaatttttaattaagacttcatcgcctgattcttccaatgaaaattccccggcaactcccccagatgagcaaggtcaaggtgatgccccaccacagcttgaagatgaggaacctgcatttccacatactgacttggccaagttggatgacatgatcaacaggtgagttggtgtgtaacacccaagaaagagagcagacaggaaagtaaccccactgcctccttaatagtctttatagcttcgtcactgccaagtgctttataacccatgattcttaatagatttaataaatgaaagggagtgacagtgttagtaaaaatttcacattaatgatgatgaccctagttgggttgtttccgaagtaaaattgtatgttcagtttccctcttggagagtttatgaagtttttttctcattggtctcttggttgctggatgactttcataatttttgggatggcctgaggtaaatcaggtcatgaggacattgagttcctcagagcctgatcctagtgaactcttgactagtttgagctatttaaccatcctagatgtttcctttttttggtcttcatctcagggaacagttcagaatataatttttcacacttatagtacaaacaaccaccctatcccaccccacacactttgattatttagaggaaacctccaagagagtgaagctttaagcttttgtgcagaggaagaaaaagatttcaagaggctagggaagagcacatcaaggaatcccatgtgactgtgatcttcaccagactgtgggctcaacaagtgagtgctaggaaggtgcgacacatttccccctcactccccaaaaggaaagtaatgaaaacacatgttcttaaaggcacttgctttactgagtttttttttaaatttcattttctaaaaataagtcaacactattaaatgcataatgtgaggggaaatagaaatcctttgcattaaaaaaagaaatctaaatacataaataatgagtatgcgttaacagaaatattttgtgtaggtaaatttctctgtaatttcccccttacatacacatattcctgccaaaaattactgttaacaatcaatacattcttcagattacctttgtgtttactatcatatatgaattgatttttctataaatagaggattcttactataattttgtaacttgctttcatttatcttgaatatttttcctattaataaattccattgtttttaattatatatttataagaatacattgtgtgattctggcaggtgcctatagtaatggtatataataaattatatttaatagtggtccctgaccattctctatagcagtgataccatagcagaaggttgtattgtttgttgcttttccatacttgtctggtggttggtgattggtaataaaatacttcttaggctaaagttgcatattattagcaagttctcaggggggagaaaaatacaaatgattttttttttctttttttctttttttttttgttttttgttttttgttttttttgagatggagtctcgctctgtcaccaggctggagtgcagtggtgtgatctcggctcactgcaaccttcgcctcctgggttcaagcgattctcctgcctcagcctcccgagtagctaggactacaggcacgtgccaccatacccagctaatttttgtgttagtagagatggggtttcaccatgttggccaggatggtcttgatctcttttcttttctttttcttttttttttccttttgagacggtgtctcactctgttgcccaggctgtagtgcagtagcacaatcttggctcactgcaacctccgcctcccaggttcaagcgattctcctgcctcagcctcccgagtagctgagattacaggcatgtgccatcacacctggctaatttttgtatttttagtagagacgtcatttcaccatgttggccaggctggtctcgaacgcctgatgtcaggtgatcctcctgcctcggcctcccaaagtgctgggattagaggcgtgagccactgctcccgggcaaccctgtctcttaccaaaaaaaaaaaggggggtggcggggcratgaagaggtttatcataatgtctcctttgatctgaatcctgaaagagcacttccctatgaattttaacaaaaatatccatgatacctaattagttaatatttgattgttataatagttttatatcctaagttatcaagataatttagttttcttccctctcttattgctgtatcttttgacagtacctgtaaaaatttgtagagacatcaggtggtgcttagtcccacaaagcagataatctgccaaccttgtcttaatattttaatgttattttaatattaatattaaatattttcatagcaagataattataattagtagctcatttgtagtgcctcttttagtgtacaaccattaagcatgtttttgtttggtaaaacttttaggcctcgatgggtggttccagttttgccgaaaggggaattagaagtgcttttagaagctgctattgatcttagtaaaaagggtaagttatatgtttttatgcttcctataatgtatgctactagatgtatttttactttatcccaaaagcggatgaagtggatttgttttcctccatcataaacacatactgcagcttgcaaggaggggctcatatcctttggacattcttaaaggatgtttgtgaactctctgaggtcacataaaatttatatttgtatttctacggagtggattcattgtttcgtcagatttgcaaagaggttgtcactcagaggttaaacatttttaattgagggtcttatctgttatgggaaatactatacaaaagaacattttacaattaagtactctataaatgatggatggtatgatggactccagacatatctgccccctgccctccttgtaattatcttgagtcatttctgtcctcaaaatattactatgtaagtctacaaattatttacacttgacctttgactgctttactgaaatgacagtgaattaggatgtgtggctstttgtactcagtaaaattttacctagtaaaatcttcattcataatccttcaggtaaaaattaccatttcattaatattgtacttctgaaataaactgtctcgcttacatatttgtaagatagggtcttgctttgtcacccaggctggagtgtggcgatgtgatcatggctcactgcagtctctacctcctatgttcaagcaatcattctgcctcagcctcttgagtgggatacaggcatgcgccaccatgcccactaattttttttttttttttttttttttgagatggaatttcactcttgttgcccaggctggagtgcagtggcgtgatcttggctcactgcaacctccacctccccggttcaagcgattctcctgcctcagcctcccgagtagctgggattacaggcgcccaccaccatgcccggctaatttttgtattyttagtaaagacggggtttcaccatgttggccaggctagtctcgaactcctgacctcaggtgatccacccgccttggcctcccaaagtgctgggattataggcatgagccaccgcgcccagctaatcttttttctttctttctttcttttttttttgtagagacagactggttccccaggctggtcttgaactcctgggttcaagtgatcctcccaccttggccttccaaagtgctgggattgcaggcgtgagctactgtacccagcctatttttttttttttattaatacacaggaaaggtgtgatttttctcttaaagaatcggaagatgaagtctcagtttttgtttaaccagcaaaaggaaatctggtgtttttactcagttgtccagaaaaaaagcttaatgctggaattaatcttttttttcccccaatgactttggtctactttaggtgcagttgaattatctaacagaggactaccattgtaataacttycaattcattttttaagatattgcagattaaaaagcagtaacatttcattttctgaaataggatagctatggatgtgttataactaacagtaggcactatcacaattgaaactgattattgtcaaaattaacatgtttagtactttaagttcaactccatggcaagggaaagtttgatttatcttttaataattcccctcttttgtttaaagaacgtgtccttatgcctcattaatcttgtagaaataatatcccaaagtgaaaatacratacgcggacaggttacagttgttttcaccactcagaattttttgttcttttatacgttcactaattcatcaaaattttttaaagaaaatatctttttttattttaaaaatgttgaatttttatgggtatatagtaggtgtatatattttggggtaatgagatattttgatacaggcatacaatgcgtaataatcacatcagggtagatagagtatccattacctcaagcatttatcctttgtgtttcaaacaatccagttttactctcttagttattttaaaatgtacaattaaattattttttactgtactcaccgttttgtgctatcaagtaactaggtcttattctaatttttgtacccattaaccatcccgctattctttacgtccgtgagttcaattgtttgatttttagatcctgcaaatgagtgagcacatgtgatgtttgtctttctgtgcttggcttatttcacttaccatggtgaccttttgttccatccatgttgttggaaatgacaggatctcatttgtttttaatggctaaataatactccattgtgtatatgtaccacatttcctttatccatttatcagttaacacgtaagttggttcaaaatcttggctattgtgaacagtgctgcatcaaacatagtagtgcagatatcgcttcaatatactgattttctttcttttgggcatatcagcaaattttggaagacttctttgctaagcatgttctaagtcctgactgtaaaatgatggataaacactgattaatggtatttcatttaatagcattgacattcagtggacatgtattcctccctccaccatattttttttctgagaccacggttattttcaacaagttccaaatttttaaaagtttaaattaccatctcttttgtactatcaatcaaataatactttctgtacaaattgaatagtttttatttggtcattaagagttacagattttctttgtttggaagcacattgctctgttgcctttctaaaatgaggtgaaattaagcaaagatataaagaaacagagacactgagataattgagagaggctaataaggaagacaagacataattcattttatttgatcaaacacagaatagtataaggatattgatgctaaatgaatgatttatgaacaaaataagattttaaaaattgggaaatgcttttaaggtcraagacttattttcagggagcaaaatactatttaaatttgcctcttcttgtggtgctgctgatcaccattttgtgtttaaggctagtgccataatttgtaacattttcagttagtgttaatattactcggttaatctacttttatgcaattaaatatttgttagctgtcggtgaagtttccagttatttattaccttttattgtatattggacaatgtaaaaacaaccagatgaacattttgtttgcattaatttttctccctttttcttasgccttgatgttaaaagtgaagcatgtcagcgatttttccgtgatgggctaacaatatcattcactaaaattcttacagatgaagcagtgagtggctggaagtttgaaattcatgtgagtcttgcatttgactttaaaggatcagatttacatagtgatgcctgtgagtgggaagaggtatatgtgtgtgtggctgtgttatatttattctgttataattgaattaaaaggtctaaaaatgaaaaacttaaaaatgtttataaattaagtctcttgaaggccgcatggtcatttagaataagcatgagatttagagttaagcttgggtttaatctctcctctgggatctcaagtgtctgtgaccttaggcaagtcatcacatttcattgaaaatgtaatgctatcaattgtaaggtacatcactgttttatggactattaaggaagaaaaacacccaagatggggcatttcatatacgtctgggacaccaaagggtcagtatagaggtaaatgagaaatgaacttgctatgcagaaagggacagcaaaaaatcctgcatatctcaacyttggcacttggtggagggagggattaaaaaaaaaagtgaaaatctaaaccacaagccagtatttaaacagtttcgtagtctgaattcaaattatagttgcaatacaaaaagcccttaagtggaaaatgtaaagtggtctcatgtcggtagtgcccccaagtgactagcagaagcaaacacaattcctctctgcaaataccttccatttaggaaaacagtaatgtattgttcattgattataagatagagtcagattccagagatcttaaaaagtgaaaaaagtatatgtctcagactgataaaatgccataactactctaagtctctgttgcttttgttttttgtgtgtmcccccgcaagacggagtctcactctgtctcccaggctggagtgtagtggtgcgatctcagctcactgcaacctccgcctcccaggttgaagtgattcttctgcctcagcctcccgagtagctgggactacaggcgtgcgccaccacgcctggctaatttttgtatttttagkagagatggggtttcaccatgttggccaggctggtctcgaactcctgtcctcaagtgatccgcctgcctcagcctcccaaagtgctgggattacaggtgtgagcccccatgcccggcctctgttcttttgtatactatggaaatggtcataagttgtcaagsagataatatttttgtggcctataacctatttcccaaatatgaccatagcataaaaattccacattttctgatttaacatgtaattgtataggtgtagaaatggaaactttggaagtggcgtcagacttctgcatttgacatttagctagcaaatttatcttggatgattgacatattgtttattttatttatttttattttttgagacagagtcttgctctgttgcccaggctggagtgcagtggcgccatcttggcttccttggagcctctgcctcctgggttcgagctattctcatgcctcagcctcccgagtagctgggactacaggcacatgccagcacacgtggctaatttttgtatttttagtagagacagggtttcaccctgttggccaggctgatctcaaactcctggcctcaagtgatccgctttcctcagcctcccaaagtgttgggattaacaggcgtgagccactgtgctcagcctgacatactgtttagactctagaattgctgcctctcgtgtacaaattccacagagaaaaaatagtaacttgcatcttacctgtggacrtagagcaggaatagatawcttatggtgcctcttgtattttttaagccatagcaaatggcttttgaaagtaccatataaattatgaagtaaacaaattctaatttgtcctttgataatcagtttgatcccaatattaatgattagaaaaatggagagatcgttatttgttaggatacgattaatattggaagatatttctgtttgaaattgcagtgttttgatcttgtaaatcgcctttcccccttgtataacagaggtgtattattaacaatactcatcgtctggtggagctatgtgtggccaagttgtcccaagactggtttccacttttagaacttcttgccatggccttaaatcctcattgcaaattccatatctacaatggtacacgtccatgtgaatcagtttcctcaagtgttcagttgcctgaagatgaactctttgctcgttctccagatcctcgatcaccaaaggtgtgttggtttgttattttcaaaattaaataatacarttgttttgttctgacacagaatcttcagtgatctgtatttaaagtgtgacaatgaaataacactttaaatgaaaatacacacaaccaggagcctttttcgtagctttgtcgttctagttctttgttttttctgcatgtataattatccccattgtcttctgtccagcctctttagaagtagtcataatttgggttagtaggaaacagactgtattttttctttgaaatagagtaggagattacttctttgaccaaggactcaattgttgttctgtagggccgtgatcattttaggcattctaagattttgactccaaaatcaagtatatcctctaaatacctaataatacatcataaaattacagaaattgttaatgaaatcaatatagtaaatcttccaaatctcacttaaatatattgtgtacataaatgtaagttttctatattggtgtaaacagactgtacactttaaaaaatttttccctaaacgctgcttcttttaataaatattatataattttmaaattttagattttagggagacatttttaatattataggtcttgtacaaatttccctttttctatccagccagaaagattttaagtcatacattatggagaacttggtttattttactaataagctgaagttatcaaaaaaaggtcaaacttaagttgagattttctgatatttcctagttcatatagttgccactagatggcttatttttgcttgagtagatcaggttactatctaaataatggcartcttcaaaatgaaaattttaatctatacctgtatttctttttaaattttactttttttttttctctatgtgccagtaatccacaacttaagagattcacagggcacaaaacttgatttaacatggctaaatgtaaaatttttagatgacttctggttgaagatagttttatatctttgaaatatagttcttgctattaaacttataaagtrtagcgattgtgagagtgttagcctttcaaagccttcaagagtacaatttttaaaaatatagcccaaaatatagttgcgaatcaaggagaagcatattctatggagttaccttcacatttacttgctattgaagtaagagaaattttatcatacagctaaacaggtcttctataagcttttaaaaatctgattaaaaggggacatgtttggcagcatcttcaaccatgtcctagttgaatgcagatgtcatgatataatgaaaaatctaagagatatgtaatagcctccatatgtttttttctcctgttctccaaaagtggtagtggcaaaattcagatcatcagacttagtcgatggagataaactttctaagctgtagattcactttcggatactgtttgtaatgagtttcatttacctttgagaaatttgagttacagagcttaaaagtgttttattcggaatatttttgagccttaatacttaatcattctctggagcttttggtaggtcttctgttctacttcaaattctctctacacctcctaccctcctgggacattgaacctctgtggcctcaacttttgacccatgayaaagctaaagctgtcaggactatctctcagagtgtttcctaatccccatcttcccccaagatgtttgaagatgtttaaatgagatcatttattcaaacatttaaaatataataaaaacttcattggttacgacaaaaggtcttaggtgaaattcaccatgctatctttgagaaaaggaacttgtagcaatagaaaactatgtggaaagcatatggtgaattgtaagctatgtggtcattttgaattttctatttagggcgactgatctttctctgccagtcttgaaaacttagagccagagaaggaaagctgttgttggcagctgctgaagctagcctattagcctcagtttgaagcactcttatctgaatattcccaattgtttaagcatacattgcagccaaagaaatacagaaagattagctttagactaattctttactgtgtccacacctgctgttttataaatattgtatgtaactatcaagtatatcaatctaatagtctcattatagttactgaagaaataaaatatattacataatgagcatgtactttcttacaattgctgaatgacaaaagggatctggtgaattaagtactcgagttttaatggttttgaattagcctttcatgactaaaaaggtaggaaaacactattaaattgaaatacgttaatgggtttattagagaaacttagttcattcatattcttttaaaaccatataaaaactagcagtaggccaggcaaggtggctcacgcctgtaatcctagcactttgggaggccaagacgggtggatcacctgaagtcaggagttcaagaccagcttggccaacatggtgaaaccccatctctactaaaaatacaaaaattagccgggtgtggtggtgtgtgcctataatcacagctacttgagaggctgaagcaggagaatcctgcttgaaccctggaggcagaggttgcagtgagccgataatcacaccattgcactctgggcgacgagagtaaaactccatctcaaaacaaaaaaacacacagaaaaaactagcattagctatcatattttctctttaaacaaacattgaacatacagccatttagcatctttactttttcctgtattttttttttaaatagctgtagaaattatttttgcttaaggcttagaagagaaattgtgtattttgctccttgttttccagtggcttctaaaacatggcctaaattttagaaggtggcaaggtgtgaaaggttttcttaggtacattaatttctacatatatttgattcttatatttatatagccttttaattcattttaggtttttacatacagacaggcttttagcctcacaactgttgtctgtgccagctgtatggtactttgagctacagctctttcttagacagttcatcctgttgcatggtgttacttctaagataaggagaactgggtgcaatttgtataagcaaaagtatcaaccagcatattctacttaggaacagtagatactagtaccagaccttagtttttaattgacaattgactctcaggctattagttactgtgtttatagggaaattttaatgttttacaactaaacaagaagtagattcraaattcattaccaagtagcttcttcttaactctcttgaagtctttctgcctcctgaaaattattttaatataaaagactttacagtaattagaaggtattcattcttatatggtgggatatctgaaataggagcatgtcttctaattcctgttcaccacttacattggtacaracagacagaactatgccccagtgatttaatctatacttactacgtatactgcttctgtctcacagatggaattactatgaacaaaatgcaatgttttgtggtcctttgaaagatgatttattttattgaatttactatttctagtatatttcaataaggcttttttttcgtgctttttaccctttaaagtaggaagttaacttttttcattaattgtgttacagggttggctagtggatcttctcaacaaatttggcactttaaatgggttccagattttgcatgatcgttttattaatggatcagcattaaacgttcaaataattgcagcccttattaagtaagttacatttaaaaatcaatggttagtgcaccgtagaattgctggtttttgcttcataaaaattgagtttttcaagtgtggtttcttcaactaataactgggattttttaaaagtaatataaagaatttagtcctaaattgattttaagaaattgcgtatttacaggagttttgtatctttcttatttcagaccatttgggcaatgctatgagtttctcactcttcatacagtgaaaaagtactttcttccaataatagaaatggttccacagtttttagaaaacttaactgatgaagaactgaaaaaagaagcaaagaatgaagccaaaaatgatgctctttcaatgattattaaatctttgaagaatttagcttcaagggttccaggacaagaagaaactgttaaaaacttagaaatatttaggttaaaaatgatacttaggtaagatacttacctcttgaaataattgttaatgccgattttagaatcatacttatcactgaatttttcttacagattattgcaaatttcttctttcaatggaaagatgaatgcactgaatgaagttaataaggtgatatctagtgtatcatactatactcatcgacatggtaatcctgaggaggaagagtggctcacagctgaacgaatggcagtgagtctttcagttcttcttcataggaataagaatctacttaagacaagaaattagaatagctctagctaaaaaaattagtaatagtaacattttaaagtaaactgaaattgggaggtgttttgattgatttataactctgttaatcctgagaactttttgaaataacatagtttattatttggtagtgatrtgggtagctttaaaacatctttgataaacttagtgatgaatgtggcgttttgaagtaattattagtttgttggagagtgggaagttggttgaaatggagtaggtagagttgatctagaaaatggattgggtagtatctagtaccttataaagtggcctattgttcatttgmccatttacagttaaacgttttaaaacaggaaataaaattactagaataagatctatacaaattgttttatcacgattttgagaattttattttgaaagcccttattttgacattgaaattttatgaaactttatgtaccatagctattttgtattatattgttttgaaatgagtaagtatgccatttaagttacagtgccaatattttttgaatgtatatgtgtaacagtcctggggaaacatctgtaggagaactgtccttgccctcaaggagccctcacttaataggggagttagtgattagagtatgttaaaatgcatgtggagactgcttagatattgccctgtgttagggggtcaggtggtagacatctggtttcatacatatgatgtacgtatctgcctcatggaaagtccagcacagagctattcaaagtgtgctctgaagactggtgctggttcttgaaccagtcctagataggacagagaatggcattaagtgtttagaaactttcattgcagtttgacattgcgacatttttattgtgttytacaaaattatctrtggctctgcagtggctcacgcatgtaatcccagcactttgggaggccgaggagagattgcttgaggccaggagtttaagaccagcctgggcaacaaagcgagaccctgtctccatattaaaaacatatgtgtatatatgtagaataacataaaaacaaatatctgcaacagattagacattaaaaactggctcattatcagctgaracatgtacttctctagcacattttgggcctaactactttttattctcagctaaatactgcaaaatcatatagtgtggattactccctgtttgtatcatgagttagcactttattctgttgctatagattaaatgaatgctagttgagcaagctagcacagtgttacagaaaaacagactgtggaagcatatgacttgattcatattccaattctagcatctgtgagcctgtttacattttgtaatagaataatgtatctcttactaggattgtttggaaaattaaagagataatggataagcaataatagtgcctagcacatgataattgttaataaataaaagtaaaaaatagagagcctttttacccaaggtcaaaacataattctgtggcaaaattgggataaagaatccaaagatcctaaaattggtcctgtactcaccctaccatggtgattgtgtacttaaataatatttttctgagtaaatgctggagtgtagaatcttcttaatttcagtattatttatgggagcatttctgtatgtgcaaaattgttataaaatttcataattttccattaaagcaacacataagtatattttaccagtattatattttgtaaatgtgttttgaatttccttatattatttaataatagtgtgagcaattaagaaaaaattgttttaatttctgctttcaaacacgtttttgaattaacatttaggaatggatacagcagaacaatatcttatccatagtgttgcgagatagtcttcatcagccacagtatgtagaaaagttagagaagattcttcgttttgtcatcaaagaaaaagctctgaccttacaggatcttgataatatctgggcagcacaggtaaggaatttaagatgatggctatttagtttttaaaataaagatactaaaaactgaagaaatacagtagctgtcatgaaatggatgcaggcttgtattgtttgactttgagaacgtttaaatgcttgttaccctgccaggaatcttyttgaaataaccaataatcttttaaaaataaaaatattcttttatctgtatttgataaaggttgagaatttgtcagtggttttaaataaagatgcaaacagtaaaatcataaggaatgtctattgaaagagagtaaagacatctgtaattggtttcttcatagatttaatagaaagcaaaaacctccagtgtyaggagaattaattcacttgattatttataaagacctgtaataattattccagagaatttataactcttcagaaggattagtaacctttttagtttttgagttggaaactacaactccttctattatcttaatgacagttttctaatcgtggatttcttgggaagcattattgagttgtagattataaagctttgtttttttagtctataaaaaccaagaaaacagctttgcctttgagtgcttaaggttccagttttgaaacaatattgttagtgtgccttatttttgtatttgcaatattaaaattgtcaaattaaataaattgtattaaaggtttgtatgaaccgccaaaatacacattagctgtatttattatatcatgaaattaagttgccaggttttagatggcagttctaaagcattttataatgttagaattttttttttttttttttgagatggagttttgttctgttgcccaggctggagtacagtggctcgataccggctcactgcaaccttggcctcctgggttcaagtgattctcctgcctcagcctcccgagtaggtgggattataggcatttgccactgtgcgggctgtgttaggaattttcttgtgttacatagttaaatgaaggagataggagtactttattaattgtcagcaagcagtatacactacttaatctattactcagattcttgtgcattgtgatttcgtttttgtttttcaataggcagggaaacatgaagccattgtgaagaatgtacatgatctcctggcaaaattggcatgggatttttctcctgaacaacttgatcatctttttgattgttttaaggtaattgttaacatagcaaaatattaccattctatttcaaatagaattgattaattagatctgtgaattacttttagccaataaatacttaaatagaaatcccattaaacagtctgtggtgtgaaggaattggcccattgttttcttttccaacaagaacttgatgttcattttcttaatagcccccataatggaaactcaggctatcactttttctttctttcccctggtagtttctattttagttacaggttcaagcaaattgtaggactacagggaaggatgattggctacaataaacagtaagatgaaagcaagagaataccaatatcttggtattctggggtcatatgtacaagcaaaatatgagttaatcaaaatgtaactgataaggtagcccaagaactcctcctacagtcatatctgcattgatgccatcatgttggtttttgaggccatgttttgtaacatctttgattagttgccagggttaggtttgtgaaagctcaagtggttagtgaatttgtggattaagaacgtaactttttggcagtttgcactaagaggtgttctgttaacaactggcattagatcaataggtcaccaacgtttcttgttaaaaataataattatactgaccagtgggaacataaattgctatagccactttggaaaatacttggtatttctggtaaagtttaagattctcataactcatcagtttgacttctgaatatacacttgagaaactcatgcttatgtacaccaggatacgtgttcagcaacacttgttagcagaattacttgtaatagtgaaaaaacctgctatgtaggatagataaaacatagaatagataaattatggaatgttcatacagtgcaatatttcacggcaatgaaagagcaactcaaccatatggatgagtctaataaacagaaggttgaagaaaggaataaagccacacagtaattaatacaccttgattacattaatgtaaagttcygaaatgggcacagctggtttctgggatgttacttgccgtgtattattttttacctgggtactagttacacaggtgttcacattgtgtactgtaataatggtatatgcttgtacttttctagatatttcacagtagaagaaaaaaataccatttttactggcttccatcacagacatgttagatcagtaggtactgaagcccaagagtctgtattttaagcaagtttcacagataagtcttagggacattaaagctttgatttatggaaaaatcgctgccttatggaaaattttattttgaagggaacaaattattgagtgaatcttttatgtggtttttatatattttgtttctatacatgtaaaagcaaaacttaaatactttttccatccattgaagtatatcaaaggcagctgaggaaataatagaattggtcatcatgggcactgcaaagataaagacttccgaaatgatgatacgtgaccagtgatgcctttgatgagagaaggaaaaaaaggggttgttattatatctgctgtatcccccctcttctcaggatagtctaaatacaataatggtctgaatataataataattcttcatgttcttccccctttggcttaacatatgtttattgagcacttgtcatttggtaacaagcacttttttyccaaggtgttggtaaatctggcaattcttatggagtgttgaaagtttctgctaaagatgattttgaaaggaagcaatgaagtctgagtcaccttgtggttctttgcagattgcaaccaaatgattccaaccttctgggttagactttgctttatgtacttggcctagagcctagtttttaaacatttgagttctaagtaagtttcatatctttgccagcacttgttcttgtcagagttctgaatttttgacaatcttcttggtgtttgaaatgttacctcattgtgcttgtgcttttagtttttatatcccttgatcaataatgagattgagtatctttctgtatattttttgagctatttgcctttttttttttttttttttkggtgaatgcctgttccccccctccccccaccgtggcattatttgtatattttttggattgtagttcttgatatattttgaatgctaatcyttgtcagttcaagagttacaaataatttctcccaatttggttatctttttcattcacttaatggttgtactggttgaatagatgttcttaatttctccttttcatgtagtttgtatgtctaaaagatgagtacatgaaaaaattcacgataccattatctacctaaaaaacaataattccttaatatcataaaatagttttaaaacttccagttgtcttagatcatacatcttcattttagaagtgagttttaatcaggatcctggtgcagtccatgtgtatgtcttttaagtctctttgaaactagctttcttcttttttacttcccttgcaatttatttgttgaagaaactggattgtttgttgccttggtgtctgtcaatagttttgatacagaaggttttttttttttttaattttactagagcatatctcaagtggtggtgtgcttttccttgaggaggaatacctagttgtctctctttttataatgttagctagaggtttttaattgtaatctgatattttagtcttacatttttagcagttgtcatattccttttgttattttgtgtaggctggaaggaaataaaaacaggcattcacatcatctttgaagacgtaccatattaataattccattgaactaatcttctctcattaacttaatcgttgttttttttttttttttttttggagacagagtctcactctgtcacccagactggagtgcagtggcgcgatcccagctcactgcatcctccacttcctggattcaagcaattctcctgcctcagcctcccaagtagctgggattacaggcatgcgccaccacgcccagctaattttgtatatttagtagagatggggtttcaccatgttagccaggctgatcttgaactcccgacctcaggtaatctacctgcctgggtctcccaaagtgctgggattataggcgtgagccaccgtgcccggtcagcttaatcgttcttctgctgtttgacgttaagttcgtttcagtttattttctaataaacactgatcagcaacttagtgcatttgctgctgctataacagaacaccacagactgggtaatttataaagaacagaattttatttggcttatgrttctggaggttgggaagtacaagaggcatggtgccagcttaaccgtgagttttgggggggacattcgaaccatagcagtaactttactcataaaacttttcccatattgcttagcagcatccctggtctctactcactaaatgccattagtaccctrcccttccccaagcatgataaccatgttgtattacaataccattttagaggttttaaaaaaatgtattttagagtttttaattgggtgtcttctaaattgaaatagtgtatcatttatttttcttttttggaatttaactctaccctataaaaaaaataccaggctaactatattttcagatctcacttgaatcattctgtgcttagctacgttgcttttgatgaatttgaatatagttaacctggtgacaatttatgaagtggtgactaaatatgtgttgttttcatgtcacttaatttttttctaggccagttggacaaatgcgagtaaaaagcaacgtgaaaagctacttgagctgatacgtcgtcttgcagaagatgataaagatggtgtgatggcacacaragtgttgaaccttctgtggaatctggctcacagtgatgatgtgcctgtagatatcatggacctggctctcagtgcccacataaaaatactagattacagttgctcccaggtaagagtgtactgctttgctcactttttgtgacttttccccttcagttaggttggcttagttacaggatagttctgttactctgacattgttagtttttaaatgatcttcyggagttgacttyttttgttcattagtctgctttccttaggatctgtacatcaaggttttgtgactcatctgaaaagcattttagtctccttgggagaaagtataaacagaacagattatacagtggtggcattatcaagtgtatggttctgaaatgcygtttcgaatagaattcgaatgttaaagctgatagggacttcagagggaagagaaattaggttttctttgctcatagggaagttaagaaaaattaatagaatttcctaaccattaaaacatttagtgcctccacagtgagcaaatcacacagtttccctacattctaatttgtggcatgtgtattttttaacacatggtaaagtgaacattgctgagtaatttctcacatgttaataaaactatttgttacactgatgaactggtatttaggtaagagccaagaaaagctcargaaggtgtattaatgtagatactactcaggttttgactatgtttacttgtgacagttcggtaagtatttattcagcaaattaaatagtaataagggccttgagtataaattatttcattaaaccaagggtccttytgaggagtcttgaaatcagagcagtacatttgctatcagggcttttaactagtaacttctyttttaaatatctattastatcagtgcctggcatagtgatgtacacattcattcatgaatagttactgagtttcactgaatttagtagactgttgccttttttcaacttcaactttcatttattgtttgggaaaaaatttttaaaagtcattttccaactgtcaccttttcccttctrcttgccaaaactgttgtcaaagtgtacatttgatcataaatgttttcatggccttaaaaatgtacacactattaaacccaacaattctacttagagaaatttcttctcggaaatagtgaaaaaggatacaaagaggtacccacaaggacattcattagtgtttatggacatgaacatgtggaagcctcctgaataattactttttttttttgagacggagtcttgttctgtcgcccaggctggagtacagtggcgcaatctcggctcactgcaacctccgcctcccaggttcaagcgattctcctgcctcggcctccccagtagctgggattacagacacgtgccaccacacccagctaattgttttgtacttttagtagagactgggtttcaccatgttggccaggctggtctcgaactcctgacctcaagtgatccacccgcctcggcctcccaaagtggtgggattacaggcatgagccacagctcccagctgtgaataattactaatagtttatacaaggttcgattatggcgccattaaaaggattaatatcacttaagagtatgattctaattttgctgccgaaaaaggaatatctgtgtattacaaaataaccccaaacttgaggggtttcaggaaaaaaaaaaaacaaaaaactccacaaaattgttttcctttccctgtacgcaaaagtaaaacaatccgagcttacgaaattgttaggcacacaaacttgcagttctgattactattgactttaggggaagaggtgaagtaactgaggtttgagaagtaaaataccataattgaaataattttgagtttataacatttttaatttttaagtttatatctgcctctgtcctttttctctccttgtacgtgtgtttctttattttgattttggygattatttttaaatgtagttgtcattctatttattttcttagtcaaatatacattttttgtgttcttcactgtactaaaagatggcccatttagagtaagtcagggtcttgttatatattaattctggattttatgatacggtagaatctcttaaaatactggctaaatacctaccctctggcaaacttggaaaatgaaactttctgtcagtgtgcctaatacttaggatctgtagtgtgtacagatatatttcagtccatataatacaaagcttttataacagtgctgggctttttggagttctggtagtaagtgtgaaataaaaacaaacttaaagcttttattatttaaattaaactmtytactgtaattacaacatgatgcttgtattgctaatcttaaaagaaaagcttttattttataattctcaaaataatttgaaaataaaattctcctgagtattgatctatttaaaacattgaaatcatttgtttaaggaccgtgatacacaaaagatccaatggatagatcgctttatagaagaacttcgcacaaatgacaaatgggttattcccgcactgaaacaaattagagaaatttgtagtttgtttggtgaagcgcctcaaaatttgaggtaagactttttaacatagaaaatttcaatacttaaaatttatgtactttattgaaaagaaacagcatattggctggcaaatgcaaatttttaaattagtggagtgagaagaggctatataagaagtgtttggaacaaaagaattctttattacatctacctccttttttttattaatgaggaagtaagccacagttaagtgataaatcagaatcaaggtaatattgcctttgggttcttggttcagaattattattatatacatactatatttccagcaagtatgccaagaagtttcatagcatgtctttaaagatggattagaccacaagaacatttaaattgatgaaacatgacaagataaagtttcataatttttaaacatttattttagctaaatttctttttaatagctgtctttatactatcttaggtgtcatattctggttactgaaataatttgtcctattttctggtaatacagttggaactgataacatgaaaaggaaaaataatgtgaagagaaagagagcagggtgcagtagaaggaatattcacagtggagtcaggattcctaggtgtgaatcttgtgtcaaaccagtaatttaatcttgtaaaaattctgtaaagaatcatgtttggcctggtgcggtggctcacgcctataatcccagaactttgggaggccgaggagggcggatcacctgaggccaggagttcgagaccagcctggccaacatggcgaaaccccgtctctactgaaaatacaaaaattagccgggcgtggtggcatgcgcctgtagtcccagttactcgggaagctgaggcactagaatcgcttgagcccgggaggcagaggttgcggtgagctgagattgcagcactgcattccagcttgagcaacagagtgagactgtctcaaaacaaaaacaaaacaaaaccaaaaaacatgttttctttatatgtaagattaaatgattgccaggatcctttacagctctagattactatgattatacctcagacagaaatagaaaaggtcatgtatatgtctttatttaaacagttgaactttgtctcacttttttccctaaggctagaaaaaattagcaaattggaaaagctatagagataaacactgtaagaaattgagacatatatctcgttaacaataatatttgaggagcatattttgagtatgtttggctcatcgtacatatttcggcctttctcaaatgaatgcatttatctttcgaagtagacacagtagttcacatactctcccaagaacagtggccttgtctcccctaaaatagtagtagtggatgtgaaagttgattggtttcagtgaaggtagcaaaacagattagggtttcaatgaagatagcaaaacagatgagtctttgtggtgacacctgtgggcaaacttggctacaaacagagtgtcccaggatgttttcttaaatagctaataagaagaaaatgctaagagcattttctttgattgaattcttccttacaactgtagcataatctttgtgatgctagtcttgcaaaaaatgtttctattttataattttgggaataattacataacataagtgctttggtacarttatagtatagacattagtcattgaggtatactcccatttggtgaagttggagaatagtgatggatgctttttgtgtaaaataataatgtaataaatgtcttatcttttgaagagtttaagttggttgtgatattttcattaaaagaagtaaatgtmcaaaagtataatttttaaktttttacatcagtagctaagaatttagatagtacgaactcttctggttrcaacagagtttaattgcctaattatattgttaagttcttctcgtttcagtcaaactcagcgaagtccccatgtgttttatcgccatgacttaatcaatcaacttcaacacaatcatgccctagttactttggtagcagaaaaccttgcaacttacatggaaagcatgagactatatgctagaggtatgtattgtaagctaaaataaactatgggaaatagcagggacctttttttgcattaattaccttagaaatgtaaatcatgttcctttatggatttaagatccactattactcccaactcttagacatcctaaactctaggccagcagtttaagagtcttcactaagtgcttgccttcccccattctctttgttaaatagatttttgttctctgctttgggagctctgcctgccttttttacgattgatcgctaccttcttaggaatgtacttggctcmttttcaacctttatgtcctttaccaccacctttagctttttaaaaggaaacttgttttgkctaagtctgttcttactttatagttcttttataatgccaagcctatgttttgtaagtgcttcaagactccatgaatttaaaaaacataagagtagagatgagaggctggctgtaagaatctagatgtttacattggcattcaaagtgtgaaattgtttgaacatgtttaggataaagtttcctgtgatttcaacagatcctgattgtaagtcttagcctgccatgtgtggagccctgtgtcagtgctcttttgccctttgacagttatgtcagtstgtgtgtgcaagagtagggatggcttctcagtatatactgttcctcttctgtcttatgacaaattcatacccctttccccactgatactttgttgtttcaagtttgtttcccgagcagtatgtaagaaaatactgtattacgaatgttagttatagagttaaacatactgattactcaacttaccattcatttaacatgttatgtaggatctgcagaagcccatagtgtatgttaaaaatgagaatatttataatactcattatttgaggagtaggcttttgacattattgaataaaatcccctcgtgcttaagaattaccagatttttgcttaatacttatgtacatttcccaatgaaattcagataaacataaaaattaagtaactcttctgatactcccagtgatagtgttgactctttattcttccattyatcccctcggggccaatagattgttagagctagacaagcaatctaaatgttaggcagctgatgagsaacagacagtgatcttagcattttagtcttaggttccttctaagcagtgtaatagaatgatcaaggcaatacaaccatgtgatttatgttctataccaaaggtactcaaaatcagtgacataaaaaagaggtttatgtgtagtatacccaagcatttgggtttagtatattatgattataatctcttcctggtggtacacagccctcatggttgccaaggagggccttcccccagagtggagacatataattcataygtgctttaatgctaatttttatttacttcatttgcatgtggtgtttaatttcattgtcagaggtcaggaacccggctgtctcactagggttttttctgctacattttagtacaattctacttgagttaccgcctcatctcaacttcgttatcacaggaatgattacattcttcagtttttcctccttatgttgtctgtatatctgcaaactgagagatgtgagtctgcatagttgcctaggtctgaaacatgacccaaacatattagctgtatgactgtgggcaggttatttatgctakaataatgtctggcacatagtaaattcccctctgaattttaacatcatacctttttttcctcctaaccttggtaccttttcttcttccaatttattacactactcttgattaatactgatgagtctggagatagttaaatatgggggtgggggcaaataatttttaaaaccagtaaaattcttctattaaactttttacaacgttaaatcacttctgtggtaacatccactaacatttctaaatttgcaattctaaagttaattatggtttttgcctctataataaaagtgatagacaaatcccattagctatgaggcattaggttacttggcatgataacatcaggctttcacagtttactgatattctcaatttctgataaccattttaccaatggtttgtgctgcctgtattttatcttcactagcatctttagcttttgggggaaaaacatttcctcagtaagcatgatcagctgattttacctcctataaacattatttagataaaagaatgaacttagtaaaattctctacagtatttactcatgttctcactacaagtgttttcatacactggtacttaaattattctttaaaagtttttcatatgcatacaatgaagtataaaccaccttttagttttcactcaagttttaactcattggtagaatagtcattctactgacttcaatacttaccgaaagtttaatttaccattttttcttgtttctggatagagttggatgacccaacttcactgtaggtcagatttttccactctgtttacttaggatgctaccttctgttacttcttcccggtcttttccatccaacagtaacagtttttaggaacgttttccacacaaaaagattgctttatgagtgtcattcaccaacagtgctatgttagggtgcagatcctgtgctagattttctcaggactcattccttacatcaactatgaagtactattaagtctgtgtgacttctctgtggtttaaaaataattacatactatccattttgtgaacaatttgtaccttcttggagaaacggctgtttccaggcgtggaacagggaaagtaccacatgatccttgaccatcctattccagaaagtaagaaagtgctcaacgatcatgttgacatgtcaaaaggacacaggagttggctttcactggccataattaggtcaaaattagtaatgaaaataaaatatgaaaatactcatgtagacaaaaatgccaactaacaaatgaagagtatatgatgaaaataaacccaagggggtgaggattttcacgtctggaatggcagaataaaatgttcagcagaccttaacaaaacaaccatttaaccggagaaaaatataaacaatagtcatttagagtacctgaaaattgtcctaagagggagtatagcaaatgggaaaacactcaagaaaatctattaaatctgcaaaacagcaagagtctgtagcatttgagccacagcttgttctgttctcccatgttcagatccagctttcttgtgtggaaactctactccaggcaggtgtgactaagaagcaggggctccttccctgaggctgccagtctagggctgtagtttgaccacatgaggtggtgtgggctactggcatttctgatccttttcagtcgtatgtggcagaagctctgttccaggcagtcatgtccaagaaaactgagactcccttaccccattcagtgcctgcttgtaggataaatgctttacttaaggcatggcaggctgagaatattgggctctgattatccccaacctggcttgctcacagggtggacattatatgtcagggagtgcaatctgaraaaatcagagtttgatcccacacacccaacaccagcacctgctcttaaggcagggatataattttgggagaagttagctgctgtcctccctctatctcctgaacagtaacatagatgttctgtccagatggagagagaaggtgtgaggatgctgtgctcagcagttgtgcttgaagggaccaactttctttggaccagaccgtgctgtgcctaagggtattatcacaaatggagatttgggtgatgaagaattaggagagtgcttgtggctcccttatactggtatcagcaagtcacaggatgagcaaccagaaatttaacagaaagatctagataaagagatggccaagacaagctctcttgtgatcacagtcaaccctgggggtcaggaatgctacgtgtatgcattaggcttcacctaagcagaaacaatcagaactggacacgggacaaattgaaaacattccccaagcttcatgtcaatccgtcagcaaagggtgaaagcctcaccagtacagtggacttaaatacagctctgaccaaacaaagcattgggtgaataataagctaccccgactcaggggcaactcttaggaagccagacatgaaaattacatgtatccctggcagtctggaagacttgstgcatccttgctggagtgattgagaagggaacaagcaagctgctagtctccgaatgagcataggacaaaaacataaactttctgagtggtgtgatagcagcctccaagccacacagacakgcagtggtaaagggtaaaaatctactagtcaaggaggcttaaacacagcgtttggccaataaggggcttatactgatgcaggggcaactcctaggtaggcaggctaaaggattaaaagaaggaggaaaacatgggggcagagctgtcggaagctgtgcactgtgagggaaatagactatgaagtctatttcccagtcactatatcccatagccatagcccttatttcccatagtcatatttctgtttcccatagtcatagcccagtcactaaacaagcaagcaaacgggtgggggaagggagatcagtattcaggttgttgttgcatatctaacatgtccagattttgatgacaaaaattgaggcatgcaaacaaatgggaagatgggacctgtagactgacgcagagactgcctttgaaggaggccaaatggagggctttgcagacagacttgacagcaaagacttgaattacaaatatgctcatagaactgaagaaaaccatgtctaaagaatttttaaagtatgatgacaatgtctaatctaaattagaggatagtaaagagaaattattttttatttaaaaaatcatgtagagattttgtacttgaaaagtataataaccaaaatgaaatattcataagaggggctaaacaatagatttgagctggcagaagaatgaatcagtgaacctgaagatagattagtagaaattatgcaatctgaagaacacaggaaaagtgaacagaatctcagggaaatattgggtaccatgaaggggaccaacattaattttaatgggaataccagatgaatgagagtgacagaaagagacatagtcactgaaaacgtctctaatttgatggcagacaagaagcttaaaaaagaattgcaaatagggtaaatgcaaagagccccagactgagacacattatagtcagagagaacaattggaaggtggtgagagaaaaacgagtcttcctgcacaaggaaaccccaataaaaattaaccgctgacttctcatcagaaacattgaggccagaaggcagtaggacaacatattcaaagtgctggggttgggggacagacatgacaaccaagaattttacattcagcagcacagtctttaaaatctgaaggcaagctgaagatattcccagataaacaaagactgagagaatttgttgctctaagacttggcttacaagacaccctaaaggaagtaattaggcccaaaacaagtgacatcagacagagtgttccgaatttgcaggaaaaaaatacttgaatactataaaccagcagtccccaacctttttggcactagggactggttttgtggaagacagtttttccacggactggggggtggggggctcacctcctgctgtgcagccccgtttctaacaggccacagacctgacagacatctgtggaatactccatccaacaatagtgaaactactaaaagcacatatcatcttaatagatgcagaaaaagcatttgtccaatccagcctcttttcaatatagaaaggctcaaactaggaatagaagggaacttcctctacctgatcaagactgtcccaaaaaacccacagctaacctcatactaattaatggtaaaaaactggttgctttccccctaggaacaagaatgagacaaagatgtccactccaaccacttctatttaacattctgcttgaggcattagccaggataactaggcaagaaaaagaagtagacaacccaattaagaaatggatgcaaaggatctgaatagaaatttctgcaaagaaggcatacaaatggccaatgagcacttgaaaagatgcttagtattattagttattaggggaatgaaaatcagaaccmcagtgagataatgctacttcatacctactagggtgacaaaaaagacamcagtaaatgttgatgaggctatggagaaattggagcattcatatagtccttgkgggattgtagagtggcacccaccttgcaaaatattaatcgtagaatttaccatattacccattcccagttacatacccaagtaaaatgtatacataaatctgtacaacatgaatgaactttgaaaacattatgctaagtgggaaaaagtctgtcagaaaaataccacatattgcatgattcttttttttttttctttttttttgagatgaagtcttgctctgtcgcccaggctggagtgcagtggcgccagctcggcacactgcaacctccgcgtcctgggttcaagtgattatcatgcctcaacctcccgagtacctgggattacaggcacatgccgccattcccggctaattttttttttgtagaaacggtttcgccatgttggccaggctggtctcaaactcctgccctcagatgatcagccctcctcagcctcccaaagtgctggaattacaggcatgagccactgtgctcagccatgattccatttttatatgaaatgcctcagacttaagcagggagaacaaagggagagggtggtttgtacagggtttcttcttggggtgaggaaaaatgtagacttagattgtgatgatgattayacaactgtactaaaaaaattgaattgtatttaaatggatagattttatggtactttatgactcgatgttttttttttaaatgaacttttaaaataagttctaaaatgggccctagaaaacttgctgtttatgatgacaagaaccaatttatgttagtctcagccatgattcactacctcttcctacctattttcatagacatctgagtaatttagtctcatctaattcttcctgctgttttcagcgggatatttgccacctagacaatatgagtcaaaagtggattatcctcctcatttgactgctagctaacaagtccaggtatttgttttgaactgaatatttactactaaactaccaatttatatatatacatatatatatatataaatttgtcttgacagcttggaagcttctctgtagtaagagggcctcttcattcctatttagcataaaggcatcttatttcttgacttttattgattagctgtcagctgaatgtttccaaagttctactctttgtgcagggtcccagttcttcataagtaaagtgttagcacctaaacaaaaaaagggaggtgggttgttagctaaaactagtgggcaaaagtttaacaaaatagttacatagcctcaaagtctctctctacaaattacttattaattacaaagagcaaaatagtacctttacatcagagaaacctgcctcccttctgtgttactcgccacaatgcttagactgatctaattatgacgaagtggcatggaagcccaaattgagtgacatttcaacaaaattgacctccagttttcaaaaaggtcaaagaacacaaaggatgattaattctgcagattaaagaatagaaagtcatgaaaaccaaatgcaatgtatatttaatcttgggctttgtagaaaagatgtaaaaggacgttattgggaaaattgatgaactcgaatatggaccatggattaaatcagtgctcctccgagggggtggaggtggctatttgacagtgtctggagctgtcttaaactggggttgaggggtgggtagaagcctggaatgttactaagtaacctatagtgcagtcctagacagaacagtcctgtacaacgaagattacctggccaaacgtcartaacggaaaccctgggttagatgatggtagtattttactagtgtagttttcttgttatttggaaatactcattgaagtatttaagggtaaaaggacatatgtccaactcttaaatggtttataaagattatgcacacacgtgtatgtgtgtattttttacatgtgtggcaactaatgaagcaaatggaggaagatgtaaacaattggtgaatacaggtaaagagtataagagaattcttgcctttttttttttttttttttttttttttggkgacggagtctcgttctgttacccaggctggagtgtagtggcacaatcttggctcactgcaacgtccacctcccgagttcaagcaattctcttgcctcagcctccagagtagctgggattacaggcgcctgccaccatgcctaatttttgtatttttagtagagacggggtttcaccatgttggccaagctggtctcgaactcctgacctcaggtaatccgcctgccttgccatcccaaagtgctaggattacaggcgtgagccatggcgccctgcctttttttttttttttttttttttaaagagacaaggtcttgatgttgcccaggctggagtacagtggtgcaatcatagctcactacagccttgaactcctgggctcaaaccatcctctcacttttttttttttgagacagggtcttgctatgttccccaggctggtctcgaactcctggcctgaagcaatactactgcctgggttgggcttcccaaattgctgggattacaggcatgagctaaaacttgattttctttccagtttcttaaraaaacctcttgaagtagtcctttaagtcccaatctctgatgaaatatgcattcctgaaagtagagtgtttatgcctgtttgcatattccratatatgtggaattagaaagtagtttggtygtaatatatggggcttttttctttaccaaagcatcaaaaccaaatatgtttccagacattatgaatgtcccatctttataacacatcaggagtttgttcagagaagaaacatcaatgttttgaagaatttgattactgatttccaaaagagcttacataattagaatctttaacaatagcttgcacataccatagggtctgggatctgatatggaaatatagtaattaatgctgaaggaaaatgacacattctggacattaacatggtaatggtgacaattgtatgataacttggtcatgtagagtagcatcttgtgttaccctcacttcttaggtgtaaattagtaatatttatttttataccaaaataattttttcttcatgaaaacacctttcaatataacaggtaagaaattgaagaaaaaaattttgtcttccttatcagttcatagaccacttaggtcagtcttaggctgcaatcatgaattgcttcattgtgtgtgaaggttgcacgaaggggttgtgctgaataattatttttgatagcatatttaacagattattttgttttggttatgtaacaggaacgtatttttgtggggaaaacaggagatggatagaaaccaccaactggtagaatttaggttgccttttaatgataaaggattagtgacattttaactggcctaatttctttggttgaagtcaaagcagtgatttgggttatccatgtgtataatgcatggttttttcttaatttgcagaccatgaagattatgacccacaaactgtgaggctgggaagtagatatagtcatgttcaagaagttcaagaacggcttaacttccttaggtttgttttatacagttagtgttgctctctttaagaaaaagataaggaatacagaatgaatagactgtatagcttggtctttgttgggtggccttttcccaagtccccaagtcatgtaagacatttccctgtatttgttactaaatactttaaaatgattcgctgagttttaactttgttgcaatattttaagagaacacattttaacctttagaattgacttcgttcttcatatctgtttatgctggaaataatgtttatttttaaagggcaaattcccatattttgacacaaccggaaggaggactatactgacttaatgatatcatagacactaaggaaacgggggcaaaaggctgctagaccagcacctcaaaagagtggttggagtcctctggtatcttgtttattctaacagtggctgacaggcaatctaaagtcatgtgttaataatatcatttctgattggcttgaggggaaaaggtttattaagataaaatgtagtctagggctggattttctctgcaatatttagcgtttggtgatcatacacttaacagatgtgcaaagtgcctttgttaaaaattttgatggtcaggcacggtggctcacacctgtaatcccaacacttggggaggccaaggcaagtggatggtttgagcccaggagttcaagaccagcctgggcagcatggcgaaatcccatctctaaaaaaaaatacaaaaatcagccaggcatggtggtgttcacctgtagtcccgggtactcgggaggctggggtgggaggatcacttcaacctcggaggcggaggttgcagtgagctgtgattgcaccactgcactccagaccctgtctcaaaaaaaaaaaaaaaattttttttttaaatgagaggttccttttgaattcaaaaaaccacatgtagcaaaagagcttgtttagattacaagtgtgctaacagaaatgcccagattatcactgcttcttgaagtctattttatttatttatcttatttttttgagacggagtctcactctgtcgccaggctgaagtgcagtggtgagatctcagctcactgcaacctccacctcccaggtacaattctcctgcctcagcctcccaagtaactgggactacaggcatgcgccaccacgcccagctaatttttgtgtttttagaagagacggggtttcaccatgttggccaggatggtctctatctcttgacctcgtgatctgcccgcctcggtcccccaaagtgctggtattaaggtgtaagccaccgtgcctggccccatttattttaataacatattctgggtagttttgtcctgggctgtgttaattatggatttctatttattgaactctgtgcttatttatggagaaaattttaagtagctatataatgattttgaggaaaaacctctaccaaattttaagaaatttggcatttgtttaaagtgcattgtttttttttttcctgtgtgttttgtttttaaccacctggatagaaggacttgcctcctccccacattgagagttactgccatagtaagcagtcgttactgattggcatgtgttatatgtctcttaggtttactagaacagaaaagtggtttcaagcctttttgccattttaaagtttggaatcagaggaactattgtagtttctactctgttagtacctctgtatgtgagctaatagcaactaactcaaggaagaggaacctgactttaatgcctgctgtgtgttgggcctgtgccagacactttatatttactccgaagcaacacagtgcagcaggtgttactcccatctgatcagtaagaaacccaagattccaatggcttaaggtagcttgtttgaaataycacagccagtatacgatggaattgcactactcaactaggtctcttttacttaagtctgtgctcttcctattagaccggtagtttttcaaacttacgtaggagctttagggcttctgagttaagttccttgaagatttctgaacaagcagtaggaagtttcccgatttttcctttctttttcctctcccaacaactggtgcagctctactttttaaaatatatatcagattccaaatgggattttcatttgaagaagggtctatgccatctttagaaaaaaacaaaaaaatggaaaacctttgaaaakttaagcagttttaactcataaatattgatggattagttatttgtgaaagtcacttgattgaatacctcatttttcaatgatgccatataagcaggctgctaagtcttttttctggttgttgttgkgagacagggtctcacccaggattctctacttaaatatgactgttgttaattgagtgctacaattaaattagccattgccatctttaattggagtgcagcggcacagtcttggctcactgcaacctccgcctcccgggttcaattgattctcatgcctcagtttccccagtagctgggactacagacatgagccaccacacccggctaatttttatatttttagtcaagatggggttttgccatgttggccaggctggtcacaaactcctgacctcaggtgatccgcccacctcagcctcccaaagtgctggcattacaggcgtgagttactgtgcccagcctaagtcttttatttttaactcaagctactaaacatgcttctttccaaaagtctggtttcaaaaactaaaggttcatggaatgaatcttttattcctaattcagctagctgcatttcaggcacaaagtgggtgttcagtgtgtgcttgttgaattaattaatatctagtggggatttttttttagtaccagataaaagtagagaaataggttattttgaaagaatgaatatctttttatctatagttaaaatataatggtgataaatgtattttataggtaatacagattgcctttccggataaaaattacataaatctaattgccaattttcaatgttttttcaagatttttattgaaggatggtcagctgtggctatgtgctcctcaggcaaaacaaatatggaaatgcttagctgagaatgcagtttacctttgtgatcgtgaagcctgttttaagtggtattccaagttgatgggggatgaaccagacttagatcctgatattaataaggacttctttgaaagtaatgtgcttcagcttgatccttctctgttaactgaaaatggaatgaagtgttttgagcgattcttcaaagctgtgaattgtcgagaaggaaaactagtagcaaaaaggagagcctatatgatggatgacttggagttaataggattagattacctttggagggtaagtcaaaagtaggaactctgtaaatggtgtctgatgtactttttcatgtacgtaaggaattgtaattttgcatataaattgtgtattttactctgatgtttgtctcaggaatttggtgtagttaggaattgttcatttttattatgtcacctgtcagtgggctttttcttctctcttcctctccctcctcctgccactgatgttccttttgtcttagcttagtatctgtgtattccatagatgtgcactaaacatacaaatctttcattmctcccccgtggatattaatgttccttcccgagttttcattcagtgtcgatctgtttcctcctcttcaatgtttaacactaaaatagaggacagaagagaggacttgtgtttagtatagattatgagtatatgctttattggcactgtttaccttgtgatatttttaaatacctgggggaataaaatactatctttttaaggctaatctatttttatagtactactctattatgcctatctttaatctgacctgttatacagcagtttatattgtttggatgtctcacatattttcctgcaaaccatagataaagatgtttattgtggcatttgagtatttaaaagcttttaattaagtatgtggttttcaacattgttttaacagcagaaacacatcttaaaactcaaaatttgcaccacactacaaaagtaaactgaattgaacaaggaaaatatgttttcttacttggtctccccatgcttatcccctttcccctccccaacccttttataggggccaacactgaaacacttcctcaaagtcccctagggttctgaacatagtttggaaaccactaatgtaattagatgagtgataaagatttatagaaactgggggtagagtagtcctttatgctaaactgtgtttcatgtaatctcttatttcctgtcaactaatttgaatttcttcttgagtgtctcacttggttatcaagatattaaattatagggttaaataatagtggtcaaagcgtattttatttttacaaaaatgtacctttcattcttaaattattcagagactttcattttgcatttattaccctttcttttggtctgtgcttctcacttaattttacttgattatcaaagtcaacttaccattaaatcattgaatagtgtgtttaagataactgaggatatggtttgaatttaaatgcccaacaaaaatatatgttgaaagggatgaatacttttatcattttgaaaccaggtcgtgattcagagtaatgatgatattgccagcagagctatagatctcctcaaagagatatacacgaaccttggtccaagactacaagtcaatcaggtgaggattgatgtgcattaaaacttccatatataattctttcggcccccatttctcttatacaaaagagaaaaaatattatctaaatgaatcttgccttgttagttgtcttgaagtgattgggttatttttaatataactatttattagatgttgaaatggcaaagaaagtctatgtgaattcattttgatgctaacacctaatcctgaagttcacttttgactaatttatgtttgttaacttatgtaatgctagcttccttttaataaacatacattttattattgtatggattctctacttaaatatgactgttgttaattgagtgctacaattaaatcagccattgccatctttaattggattaatatttggtttttacattttaaagcaattttaactgtgtttatttggcctgatatttgtaggtggtgatccatgaagacttcattcagtcttgttttgatcgtctgaaggcttcctatgacacattgtgtgttttggatggtgacaaagacagtgttaattgtgcaagacaggaagctgttcgaatggttcgagtattaactgttttaagggaatatataaatgaatgtgacagtgattatcatgaggaaagaacaattctccctatgtcgaggtttgtgaataactaatctattggtgctaattcttaattatttgatattttcctagccatttggtaaaaggagagcagaaatttttctcgtttgaaaattgttgtctttgcccattaaaaacattttcatttcatctaattttttttaataacctcccccactctcccatctggttttgttttggttttttgggtgaggcattcttaagttgttttctagttttctttttgtctttgacattattactcattaagtgttgcagtggcattttgcagttgaagtgtttttgtttatttgtttattttgagaaaaggtcttattctgtcacccaggctggaatgccgaggtgtaatcatggctcactgcgggctcaagcgacctttccacctcagcctcccaggtagctggggctacaggcacaggctaccacacctggctaattttttttgactttttgtggaggtggggtttcactacattgcccaggctggtttcaaactcctacgctcaagcaaatcctcctgctttggcctcccaaagtgctgggattataggcgtgagctacagtgcctggcctgtaaagagctcttaaaagctgccttgcatggcatataacaaatattttcaaatggtgtttatagttttgggatgttttgtgtagtcaatgccatcattttttttaaagagttttgtttattaatcatgaaattatatacagttgcttcttgaatatgatttttattttgtattttactttaaaaaaggtactataccaatataaatagcattttggagtgaattttgatatgaaggcttttttccagaaaaaaaataaagtgcattgtggcatttttgttgatgcttttaacaaaatgtaaaacgaccttttaaatgtaaaaggtaaactctaccttctttttttgaatttttttttttattaatacaaggtctacctatgttgtcgaggctggtcttgaactcctgggctcaagggatcttctttgcttggcctcccaaagtggtaggattacaggcatgagccactgcgtccagccaaccttttacatttaaaaatagtcttagtgagttgggcttttacagcataaaaataagcgttatatcttggatttaatttcattttagtagacacctcattttctgcaaccatagatacaagactaacaacaatagaatatgattatgtttttaaatattatttatatttttagttaaaaggagcaatatttttttttcttttgcatttcactcttgttgcccaggctggagtgcagtggtgcagtctcggatcactgcaacctttgcctcccaggttcaagcgattctccagcctcagcctcccaagtagctgggattacaggcgcccaccaccaagcctggcttattttctgtatttttagtagagatggagttttaccatgttggccaggctgatctcgaactactgacctcaagtgatccacccgcctcggcctcccaaagtgctgggattataggcatgaggcaccatgcctggccttattttcaagatactgaaagtaatacaggttgagtatccctaatccaagaaatccaaaatttgtctggtcccagacatttcatataagggattctcaagctgtattaagtatctttaattcacatcctcttgtttaataagaaaatacttagtgttaaatccccagcattattttcttggcaacaaaatttcagagtctgctgaatatgatgatgtctgtctttctttttccccccagagcattccgcggtaaacacctctcttttgtagttcgatttccaaaccagggcagacaggttgatgacttggaggtatggtctcatacaaatgatacaattggttcagtacgacgatgtattctcaatcgtattaaagccaacgtagcccatacaaaaattgagctctttgtgggcggtgagctgatagatcctgcagatgatagaaagttgattggacaattaaacttaaaagataaatcggtatgtatgtatagttaacagatttttcaataaaatcaaaccagagactatcgtttaatcagtaaatactaattgagcatttgttatgtttgggactgtgttaggtgttagagttatagcattaaagtatagcatgtagtctttcggattttttggttggtatatcactaagttttgtgttttgtgtaagtatttttccttgtttttgatattaacatagtatataattttcagcttatyacagccaaacttacacagataagttccaatatgccttcaagccctgatagctcttctgattcctccactggatctcctggaaaccatggtaatcattacagtgatggtcccaatccagaagtggaaagctgtttgcctggagtggtgagtagatacagttttgaactactgtatgtaaggcatcatgctagggtttttgagaataaagtatatagagtggttctttcttttcttgaggagcttacagtttaatgagacaaaaaaatacagttaaccaccaacttcagaatggatccctctaaaaggtaattgtaacacagttggaatttaaaacataatttccccataggtatagtattgttacttttacataaaattaaccaattagagcttaattataacactattggatgtataaatttagaggaaaacagtcatccctcgtatacgtggagaattggttccaggacctctgcatatacccaaaatgctgcagatgaccctgtgcaaccagatatacaaaaagttagccttccatatacttgggttttgcttgctggaaatactgaattttctgtccacatttgattgggaaaaaagtctgcatgtaaatggacctgtgcagttcaaacttgtgttgttcaagagtcagctgtatcactttctaaaatttataccacaaaacggatagttcttttagaactatatatgagctgggcatggtggctcacacctgtaattccagctactggggaggctgtgaggcaggaggattgcttgagcccaggagttctaggctgcagtgagctgcgattgtgccattatgctctagcctggtcaacagagtgagaccccatctctaaaaatataaataaatgaaaacaagaactatgtaggaaaatacctgtaatctttatcagattgtcagtaacatatagccaaagaaatatttttaagctctcctttcgcccctcccgacagaaattttaatggttacaatagtagcagccactccagtgtcaggaggatttggctctctataacaactggattaagaatttggtagtgggcatggcagccttttgttatgtccagagtctaaattgtatatatgagagaaatggtttaatagaacaggagaggagctatcacaaaaaaatgactggaagtgactwgatgatgtatttgatctgcactattaaggatttgtagggattaaaagatgggaaagtcagactatttcaaagagtagaaatttcataagtaaaagtatagggattaacacagagaaacttacttgggcttttataaaacgggagtaaataatttagaggtaattattttgtgtattttatrttctagataatgtcactgcatcccagatacatctcttttctttggcaagttgcagacttaggtagcagcctaaatatgccaccccttagagatggagcaagagtacttatgaaacttaygccgccaggtaagaatttttaaatgatgatcaagtrcttgctggacaataaaggagtatattagcaaattctgtttctaaatggaccgtgctttttggtatagactataacaagagttgacagatgacagcccacaagccacatcaagccccctgcttgtttttgtgcatcccaagagctatatttttaagtggctacaaaaaaaaaatctagaakaataatattttgtgatacatgaaaattatatgaagtttaaattttagtgtccatgatcaaaaccaggctcatttgtttacattcagtctacatgactgcttttgtcttaaaatagcaccgcccaggagttgkggcagaggccatatggttcacaagcctaaactgcttaactttcctggccctttacagaaaatgtttgcctatacctggactataatatgggtcatgtgtcatctgcggtattgttccttttttatccttagaaacaaccacttccaacttctcgcttttactttagtatatatatgtaccattatgtctggagtgtcctcatacagctatttctttgttacttacagatatatactgattttctgctgtgtagatgaaaacttaactgttacatacccccacatcctcccagtatttgcttaaatccagattcaacatctacgtttccaagattgtttgaaatatagttctctagatcactgacaacttttatcctggatttaataatttcccttttattttcctgattgtacacctatcacttattcttcccacatacttttttttgagatattttttatctgaatgtgggcaractatcacgtttgattaatggtttgtgtatagaatcctaggtttgaaaatatattccttctggctggtggcattgctgatgagaagaccaaagtcctcttggtttctattcctttgcatgtgaccttcgtttctggaagttttggttttatccttacgttttgaaatattatgatgtgccttagcgttaagtctgttttgtggtgcgtcacctgtgggcctggagatttcctcagttgagagagatttgtattctttgatagttttctcaccagcattttgcgttttgtgtgtctttgaaatgtctaagtgtgatggtgaatttactagatctgattttaccttttctctcttcccttctctctttaatcttattccacctttggggtggcttctttaaccttttccagctcttctgttggcttttcccctccaaatattctagtgttaaaatttcaagacctttgtctccttagtgatccttttccatatacaggattttgtttttcactaacacattcttgcatttatgttctaatatatgtgtgttcctttaaaacctaatgttcggcaaaattatgcactaaaaatagtagggcttttggggaaaaagtagagttttggcagatcattcaagcctatacaacctaaaaattttttaaatgtattttttggaaatacttacaatcttacagaaaaattagaagtataattcaagaacacttgagagtaatttactggtttttgtagtcccatcgcccaccaaatactttccctacaaacaaggatatttgtctgtataagcaaaattaagccatctataccaggaaattaatgtcgattcattactgccatctacttagcagactctattgagtgttttcagttatctccttcacagcaaaaagatatagttcaaactcagatatagtcagccctccatatacatgggttmtggatctatggattcaaccaactgtggattgaaaatgtttgggggaaaaaacattgttgaaagttccaaaaagcaaaacttgaatttgccacatgctgagtactgtgttgaatccacacgaatgaagctatgtgtaagcattgtattaggtgttacctaatacaatgtacagttaggcaccagataatgacgtttcagtcagtgatagaccacatatacaatggtggttctataaaattataataccatatttttactgtaccctttctmtgtttaaatacacaaataccattgtgttataattgcctacagtattcagtacagtaacatgcttgtatgggtttatagcctaggagcaataggctataccatatataacctagatatgttgtaggctgtatcatccagatttgttgtaaacacaccctatgatgttcacacaatgatgaaatcacttaatgatgcatttctcagaacatatgcaacacgtgactgtaatctggagataatttatacaggaagatgtgcatcggttgtatacaaattccacatcattttatataaggtatttgagcatccctggattttggtgttgggagggtggatcctgaaaccatccctgcacccccaccccccatggataccggggaataactgtattgcatttagttaatgtatctctttagtttccttctgaaacagttcctcatactgtctttgaccttcatgaccttgactcttaaagattacaggccagttaattatagaatgtccttcagtttagatttgttttatcatgattgtattcaggttatgcgtctttggcagaaataccacagaagcgatgttctgttcttctcaatgcttccagtcagatagtatgtaatttcaatttttcccattactgacgatgatcactgtgatcacttgagttttttccttgcttccccactgtaaaattacccttccctttgaaagtattttgggccaggcacagtgactcatgcctatcatcccatcactttgggaggccgaggtgggcagatcgcttgaggccgggagttcgagaccagcctggccaacatggcataaccccgtctctactaaaaatacaaaaattagccgggcgtgttagtgtgcacctgtaatcccagctacttgggaggctgaggcttggacctgggaggcggaggttgcgttgagccgagatcatgccactgcactccagcctgggcgacagcgagattctgtytgaagaaaaaaaaaagtattttgtgcagaggtactttgaaaatatttatactgttcctcatcagacattttattcattcgtttatatctgtatgaaatcatgatcaaggagttataatctgttactatcatttatcttgatgctgaaatgatctcgtttggccagtgggagtcctttcagactgttctgtgttactttaatatgttcccattattctttcagcacttgtgtgctctttggctcaagatgtttaagattaggtcaagtgtagtggctcacgcctataatcctaacactttgtgagggtgaggcaggaggatcactggagctcaggattcatgaccagcctgggcaacatagccagacttcatttctattaaaaatttcaaaaattagccaggtgtggtgatgcgcacctgtagtcccagctacttgggaggctgaggtgggaggatcacttgagcctgggagatggagactgcattgagctatatgatcaagccactgtactccagcctgggcaacagaacaagacgctgtctcaaaaaaaaaaaaatttaaaaaagttccagattaacatcctgtaccctctctgccccagtcctgaaattggctgtttctccaaggaggcctgtttgatttattttcctggagaatggtgtttagaaaccaagatctggacatttattgcactcattgctatcgatgtattgttgctccctggctctctaagcagttagagctaaggaatgtgtgtatgtgtatccacatttaagtctattactatatatatacacacacacacatgaatatatatatgtgtgtaagtttttacaaaaccatggggtcacacgacttcctcccatcccagcctatcacagtttcattctagttttctccctttctatatttgtaattttttttttttttgagacagagtctcgccctgtcacccaggctggagtgcagtggcgcaatctcggcttactgcaacctccgcctccctggttcaagggattctcctgcctcagcctcccagtagctgggattacaggcgtgagccaccatgcctggccaaactctcttttctgacaatgaaaaacctggcttctgttatcctctcacttattttcctatttaatcagttatctccagaccccccaccctttctttgaacgcagaaggactcttgtctctgaatgttgggtctctaccccagggacactcctcgctctgcttgagttgaatctttatgctgagctctacccacttattgggctccctcctcctccttcatggtctgtaattcccaacataggactacctttaaaacttgcacatagtttaattagagcactcataaaatgataattagtatcctcagagataatttggacagtccaggcaggtacttcagtgtggctgaaggcttcctcaggagatagtaaaaagacacaaaaccagtacagaggaaatgctgacttgacattgctgagatacagtgcaaaagagtggagctctgagatagatgggctaccattaagataggcacagggggaagtagaacctgccaaggtccatgaaagtctagtttaggattgtatctcacaagatgagcccttgatgcaagtattcactttaaattttcctttaaaaagaaacaggcttctgcttacacatctacccagctgagggggctttttgctttgctcattttaatttttttgttgaagattaacagttctgttgttctggctactgttgcctggaagaaatcacacatgaacaaactcaccttctgcattatactgacatcattatatttgccaattgattgtgagctaattggggttatagaaacgtgctatagcataacagactgtaattatttctctctaggctattactgatggatattatgttttcttctttttccagcatcatcttttactgtccttgagttttttaactagctttttatattaaaataatttcaaactgtttacaaagaatacagttggctcccaaattcagtaattaacagtttgccgtagtgatggcaaaagtttcctaacatttggagaacaagttgtagacaatcatctttttcttcctaaatagcttagtatatgtcttctaaaaacaagaatgttctcacttacattaacatagtattattcaaaataaaaaaaatttagcatatacagtaatatcatctaatctgcagaccattttcatattttgacactttcctcagtattggactttataacaatgttttctggttgaggatctaaatccaggttcatacattgcataattattcggtatctctttyagttgtctttaatctggaatagttcctcagtctttgtcttttgtgactttgtttttgaatggcacatgtcagttgcgctgaatatctctcattgggtcttatctgttctgatgattatatggaggttgtacatttgacagagtactacttgtatgttgatgtgtctaagagcatcacattgagagacacatgtcactgtgtctttggtgacattaacccagatcacttagttgatagctgccaggtttctcctctaaaggagagagatgctttgtgtagagagatgctttgagacttcgtaactatctttttcctcatcaaacatttgttttatcatctattgkgattgytgcctaaatgtttttactatgatggttgcaaaatggtaattttgttttaattttgtcatcctttctacatttattagttgacattctataaggtagtgctttgttttctcgcctttatattygkcatatatgatcactcttatgggtttatyttattcattgggttataaccattgtaatggttatttattttgatgctcaattgtcctaratatggtcagtggaagcccctataggttagacccagacatacaacctcaatttttttaaggtactttattgtactttattattttctggtatgagaagatgtttcaagcttatctatagtatttcctctgccccagctctggaatctgccattccagagtttttagaaggaagggtatttagaaatcaaaatccgaggtttaaatcttttttttttttttttttttttttttttttgagacggagattttgctctgttgcccatgctggagtagtgcagtggcgtgatttcggctcactgcaccctctgcctcctgggttcaggtgattctcctgcctcagcctcccgaatagctgtgattacaggcacctgccmtcatgcccggctaattattatatttttagtagagacgaggtttcaccatgttggccaggctggtctcgaacgcttgacctcaggtgatccacccacctcggcctaccaaagtgctaggattacaggtgtgaaccacagtgcccctgccaagtcatccttatttcattctaattgkggtaaggkgatacctcattgkggtttggatttgcatttccttaatgattrgttatgttgagtgtgctttcatgtacatgttggccatttggatgtcttcttttgagaaatatctattcaagtcttttgcccattttaaaaatcggattttttgctgttgagttccttatatattctggatattaaccccttgtcaratgcatagtttgcaaatattttctccaattctgtaratttgtctttttgkggkcttatttcctttgttgggtagaagctttttagtttaatgtaatttcgtttgtctgtttttgtgtttgttgcctgtgcttttgaagtcttagccaaaaagtccttgcccacactaatgacatgaaacatttcccttgtgttttcttctagtagttttatagtttctggtcttacatttaagtttttaacccatcttgagtttatttttacatatgatgaataataggggtttagtttcatttttctgcatatgtatattctgtttttgcaacaccatttttattcaagagattgccttttcccccaatgtgtgttcttggcacctttgttgaaaatcagttgtttctgattatgtggatttatttctgggttctctattctgttcaattgatctgtgtctatttttgtgtcaataccatgctgttttggttactattgctctatagtaaattttgaagtcaagtagctgatgccttcagctttgttcttcttactcaagattgattcggctatttggagtcttttgtagttccatatgaattttaggagtgttttttgtatttttttgttttaccttgcagattcacctcaaaggatgttttttctatttctgtgaagaatataattggtattttaatagagattgcatcaatctgtagattgctttgggtaatatggacattttaacaatatttgttcttccaacccatgaacatagaatatttttccatttatttgtgtcctgtgttcgttctttcatcagttttttttgtagtgatctttctcctccttgcttaaatttattcctaggcatcttatatttttgtagctattgtgagataactttcttgatttctctttcagatagtttgctattggcaaatggaaacactacttagttttgtatattgatttttgtatcctgcagttaactaacacaggttcacgcttgtaccagtccagcttcctagtcatcttccattccgtatttgtatctctacagcaatgagaaatctgaaacctgagggagttggaaaggcttcttaatcagtcttcagcctctgtctttaggccttcgaatcatttgtgccttcccaagtgtttgttgttttcatacccttggcttttctcagatttagtggggcattaatttataggcaccctcttctccttgccttcacaacaactaaaccaacttcacaacttcagctaaaccaactatctatccccatcttcactacaccgtcagtaatttgttgacagctgtttaatgtgttgcttccccttctgtttttatgttcttttgagtttatgtatttttatattcattcattctcattttagtggggtttggggatgaagtactgataaatatagygcagtacaccatatttagttgacataatttttaaagctgtcttctgcttttattacctccattttctaaattaaacaccttgttgggcttctcatcttgctttgcaattattatgggacagaagcatttcacattagattcttagctaaggcttctctcaaaagatatatttcattcttgtctgttacatcgtttagaatttacatagtttcatttgttagtatttcagtaatagtccttgcagtgctttactgcagattcaaccttcacaacatactgtaaaaacacaaacccaccactgaatccttgatcttgtgattggcgcttaatgccaccagatggcgagcatgagctcttgtcagacagttaaggcaagaaacttgaagtgggtgctttcttcatgttttatataatgaaactagaatacctaaatttgaaacagccagcttttgaaaaagctggtaatggttrtattgcagcaraaaatcataggctttggactcaaatggacttgagttccaatcctgcttctaattgctactctatggcgttaaacataagtttcatagtttattagagcttccttatccttagaactgggataatgataacttttttgtgtaattgcagggattaaatgaaacartgtatggaaaacccctagcctagggactggcacttagtattcattaaacattaaaccactctctgtcacttccttttcttagagctcctgcttcctttcttatttaagagtttgtgtctaaaacgtggtratacaatcttttgtaaaagtctgttgtaagctcttagcactgataaactcaacttaaaccacacatcatctctataaggtatagttaatgactaggaaaaaagctaatgattctctctttcccctccatttaaaatacatccaagagtgcacaaatgctaaatgatcacccaaatgttacacttcttttcattctgaatctttgcctgaagccaagtgcccatgttatgatttgctgttaaacttaaaacttctgcagtcctctctatatgtaataccatcttttgtaaaagtctgttgtaagctcttagcactgataaaccacacaacatacctataaggaaattattaattttatctgtattttaaagacggagaaactgaagcacagagagattgttaattcacctgggacacatagcttaaatgctatttctcatttctttttttttttttttttttttaaagagagagggccttactctgtgtcccaggctagagtgcagcagcatgatcctagctcactgtaacctcaaactcctggcctcaagtgaggctcctgcctaagagtagctaggactacaggtacacaccaccacacctgactttttttttttttttttttttttttttttgagatacagagtctcacactgtcgcccaggctgcaatgcagtggcgcagtctctgcttactgcagcctgtgccttctgggttcaagtgattctcctgcctcagcctcccgagtagctgggattacagatggacgccaccacgcccagctaatttttgtattttttgtagagatggggtttcaccatgttggtcaggctagtcttgaactcctgacctcaagtgatccgcccacctccgcctccctgagtgctgggattacaggcatgagccactgcgcccggcccacacctggcttattttgaaaatttttttgtagtgatgggggtcttgctgtgttacgcaggctggttttgacctgggctccagtgatcctcccatcttggcttcccaaagcttaggtatcttttcaaaaggctagaaagaaaccaaaatcgtcataaactctggatgacaagattatgactggcttaaatttttctggcttccattttttataaaatgtaacatgatataatcrgggatgaatatgagagctggaatggccactgagtgttaactttgattcagatctctcaaatgagtaaactataattcaagaccattaaatgatttgcttagaattcactacttctgaccgggtcaygctggtaatcccagcacttcaggaagccaaggtgggaggattgcttgagcccctggagtttgagatcagcctgggcaacatggcataactctgtctctacaaaaaaatatgcaaaaattagctgggcatggtggcacatgcctgtggttcccaactactcagaaggctgagatgggaggatcacctcagcccagggaggttgaggctgcagtcctcacgccactgcacttcagcctgggtgacagagtgagaccctgtctcaaagaagaaaaaaaaatatccaccacttccttttcttgagctcttctttttttttttttcctcctactcccctttgcctccatccttcactcagaatatttttaagccaagcaagatactatgagatacagtggttaagcatatgaattgggttgcttttagggagtaatttgacaatgtatgtcaagtctttgggcattatgttcaacttctttatgcttgcagggttttgcatggtgaaaattataaaaattcagctgctaggatctttgatgtttaaaaaggtgaggggaggtaaaaacctaaatgcccaataataggaattaaactggtaaaataatattgtcattttaataatcagataaaatgatatagatgaatattcaatgacacgagaagatatttataaatattttattataaaaactattttaattggttacattatatgtcgctatgccttcagagtagagagaagtgacagtttcaacacaaactgaaaaatttgtaagataatggctgctatttctaggcctgtaaaaattcatttacccaaagaaaatcatagtttttttttttttttctggagatggagtttcgctcttgttgcccaggctggagtgcagtggcgcaaccttggctcactgcaacgtccgcctcccaggttaaagcaattctcctgcctcagcgtcccgaatagctgggattacaggcgcatgccaccacgcccggctggtttttgtatttttagtagagatggggtttcatcatgttggtcaggctggtctcgaacacctgacctcaggtgatctgcctgcctcagcttcccagagtgctgggattacaggcgtgagccactgcgcccagacctatttttcttttctttaaaagaagcttttacttaaaaaaaaaaaaaaaaattatcaaggtatttttttaatcatagggcagttaccttagatcatcaaaatactttccaaggttgattgactattaataaagttggaatatttggtagctaatgcttaattgtattttgggattatcttatttttcccccactgtgtcttttcaccgtaatttaaaattatgttttaatattatgacaaaargacaaaagctctgcttgctttgaggtgaatgtacataggcacttaccctttttcgatgtttgctttttagggttcattttcttggatatcactacattcctttcagtgaagcaagccagttaatatatagtgtcagggggcaaacaataaagaggttagagggaagagtttataatttttttcttgttattttcagtcagaactacttccttttgaaatgtatttttttccatctccagtggctgagaggagagtatcttgatttgaggtccctgagtagcagatgctttgtattgagagtaactgattaaagagccctgttttttgtttttgtttttgtttattttttttttcttttttaatcattccaggtcttgtcatgtcttaggaagtttgagcctatagcccaactgagtggattgttattccatattagtatggtcttcaagatatcaaaagttaaatatgtatgaacacatgaattacattttcacactgtctctttttttcctccagatagcacaacgatagaaaaattaagagctatttgtttagaccatgccaaacttggagaaagcagccttagtccatctcttgactcacttttctttggtccttcagcctcacaagtgctatatctaacagaggttagtttttggggttttttgttgttgttgttttctttgtttttccttttaaatttrttctgtgttctttaaatttgacctttcatatggtaaggtgaatgatttgggtaaaattgtaatgaagtagttttgaaatgaaatattaatttgaaataaataatagtgagatggtcaagagtttcttggcactgacaatagtacaaatagaagttatttttttttwaaatcttttaatacagccctctccccctcttctctatttttccaggtagtctatgccttgttaatgcctgctggtgcacctctggctgatgattcctctgattttcagtttcacttcttgaaaagtggtggcctaccccttgtactgagtatgctaaccagaaataacttcctaccgaatgcagatatggaaactcgaaggggtgcctacctcaatgctcttaaaatagccaagcttttgctaactgccattggctatggtcatgttcgagctgtggcagaagcttgtcagccaggtgtagaaggtgtgaatcccatgacacaggtaatacagacttttyaaaaatccttttataatagtagatagcaatttttaaagtaaaactaattagtattttaagtgtagagttcaaggttgactcaatgttcaaagtgccttatttcagaggttttctttatgatgtttgtattaaaagtgcaaatacttttcgctgacagctgataatctgagggtagtttctccctgcccacttaaatcttgcttgactttcatttattttaaacctaacaaaaactccatatgaatctcttattaacttgtgcctggtagatatataaagacacagattgtaataagagatataattggtttatcttgttgcttgtttcccttcccaccttgggcttaaacccaagttctgagcttattctgactcggtttctgccttggtggcattcttgatccatgtcacaaaaaattctcaagacatgccagaatttgatacttatttatgagagatcaaactatgcatttaattctaagtaaagttttataaacatcataaatgattgttttactaagttactgatagaaggtaaaacttcagggataaagattttcttctttagaaatggcttagttttcaattgtggagatcagaatgttgatatttatggtaatatcacatataattgttttagctatgataatactgtggttatgtttaaaaggaagagccccctatatttttgaagtgattgctaagatacttccaggtgaaattacatgatatctaggatttgcttaaaaacaatcctggggtggagaagtgatggaaagcaagggaggatagtcagattaaacaatttggttcactggcgataattcctgaagctaagtaatatgtacatgggagttaattatactactttcgacactttgatgtgtgttacgaattttctgtaaaaaatggcttaaattttatattgttttgtatcacaggtcccatctttgttaggatttttttttttttaaagtagttcttattaggtaagtaaaaagacagcttcttgttaggataaaaacagatttttgtcatgatccctgacacagatacttaatgaagtamacagaaaacaattacatgtttccactttcacctttcttcagtatttattcagagaatgtgccactatggatacagaggtacataataacctctaatctcaacgagctcacagtagggagcccaatgcaaacttagtaatatagaaatatcttaaaataatattgttgaaatatttacagtatatatatataggaggggagttacaacttgaaggcagtcagaattacctcgctaacaactacgtaatgaaattaatctgtcactgatttaacaacttgattatagcattaagtaaaaactagggtacctttcatacattagtcctcttactgctttttcagwattccttaatttttcttttttttttccaaagaaaaatgtggtaacaatggggaatacaagcagggtctgcccaaggcatgtacataaaagatgtacaatactttactgagtctctagaagggaaccagtctatttagtgtatcattatcccctgcaagttaagctgaggccagatttagagacacgagttgattgctctagaatggggatttgcagacacgtggcactacagtgcacaaggaagagaggaagcccactttgttggcagtgctttttgtgtaagttgccacaggttctataatgtgtatatgcaaggaagtcgttctgcaggagtgggtgatgaatgaagagcaattggttaggtctggttatgtacaaattatttactccaaataaaatggttaacttttttcagatcaaccaagttacccatgatcaagcagtggtgctacaaagtgcccttcagagcattcctaatccatcatccgagtgcatgcttagaaatgtgtcagttcgtcttgctcagcagatatctgatgaggttagttttatcaagacttctgtcacaattttaactttcctaggcccacttattttaatcactgtctcattctatagataatgtccccttaatatcagttttgtctactattaatattagtactttctgtttttaatcaactttatgtataataaacagcatccttttaaagtatacagatggggtgattttttttttttttgagacggagtctcactctgttgcccaggctggagtgctgtggtgctatctcggctcactgcaacctccacctcccaggttcaagtgattattctgcctcagcctccacagtagctgggattacaggtgccacacccacccccccatgcccggctatttttttatttttagtagagatggggtttcatgatgttggccaggctggtctcgaactcctgacctctggtgatctgcctgcctcagcctcccagagtgctgggattacaggcatgagccaccatgcccggcccagattcggtgaattttgacatatatgtgtgaaaccactgctgcggtcgaaaccgaatgttttcatcactctttatgcacttttgcagtttattctttccccaggtaactactgctctttttgtccctagagagtattttttgtcttctggagttttatataggtggattatagtgtgtgttcttttgtgtctggcttctttcactaagaataatgactgagaattacctgtgttgtgtggattagtagttcattcctttttattgctaactagtacccattatgaatattccacattttgtttatccatatacttggtgaaggacagttggatcattttccctttttggctgtgaataaagctgatgtaaacattgtgtacaagtgtttgtgtagacataaattttcatttttcttggataagaaactacgagtggaaaggttgtcatctttgtagtagtaaaatgtaatagtaaagagctagagaacttggggagcgtactttgttgtattgctgtttaaaggcaggaggtggggaataagccaggtgcagtggcagatgcctggacttccacctacttgggagcatgaggtaggaggatctcttgagcccaggagttcaaggctgtagtgagctatgatcacaccactgtactctagactgggtgacagagccagagggccctccgcccccaccttttttttyttttttttttaagacaaaggcaacttgggaatttaaaaacaatggtactacacagtaattcctatttcctttacaaagtgaaacatttttgtttttctaaacataatttcactctcattctatcaacagttctatttactcgttatcttgcaggcttcaagatatatgcctgatatttgtgtaattagagctatacaaaaaattatctgggcatcaggatgtgggtcgttacagctagtatttagcccaaatgaagaaatcactaaaatttatgagaaggtaagaattatcacagaactatattccttgtaaacaaatgtttcttaattgtgcatgtggtttgatttttattagctttgctatttttaaaaattgaatcacttgcatcttaatggttgaaaattaattgatagctatgttgagaatatggtaaaattttactttgaaaatgaagtacttaagaatcgtgccatgtggctgctttttaaatgaaattgccttttgctgcttcttgtgggggtcagatataattgtctcatactgaatttgctttatcccattctcttttttcttttatcatctttctgtcctgcgtaaattttggtttgtcagttatggtatggcatttaagtayttttatttgattgtcttaaagcagtcaaaaataagagtgttagccaattagatatcattcctgaccttctattagattaagcaaattatctacagaagagaagctgtggttggctttttgatttatcatgtgtacctgcccctgatgctacatatttagaaggagaaattgagttacaggaacttccctgacttggtagagcttcttttacatggccaacatcaccctgatttgcccaggatatatgttgatgttccatagtatctgtctggcacagccctgggtattcattcagcttattaactgaatacttattctgtttcaggcatgtactgtagttactactttttgattaataaagtcagattagaattcattaggtacctccccaggcatattttaggttgtaagcctttgaaacccttcctgaatagttgtcagacaattgattttgaataaaatggcacaataggcaagcaacataatggaactagtcaaaagtacctaagtgctatgccacagtggttcctgagaaaggattggttgttggttcagaagtaaacaactcagaaggtctcaaaaagataggtagtgtgctcagtgtgctccttcagccctcctgaagacataggaaaataatggaattagactttattttctattatagtcatttccagactattccaraggggcctcaagagttaacatgcagccatggagaggctgaggccaggtggtttaagtgagcagatgagttttaagcactaactagaagttgtgtgagatttttcttaaatacttctttgggtaatttgttcttgattgtaattttacagaccaatgcaggcaatgagccagacttggaagacgaacaggtttgctgtgaagcattggaagtgatgaccttatgttttgccttgattccaacagccttagatgctcttagtaaagaaaaggcttggcagacattcatcattgacttactattgcactgtcacagcaagtaagtatcttttttaattgtaagaaacttactttttgtaaatggagtgaattaatttaggctggcaaaatgtgtccccaaaattaaatatttattgtctctatggcatattggtattgaggaaaattttattatttaagagtgttttgcttaacctaaatgtttggttttagtctctgcaaatgccaatattaattgtcaaagcatgatttttttctaatcttagaatttagttttacctgggaggtatatagattagcctatttctaaaaatctagtttgcaagatttaaatcatataggacattagcctcctatcttagattcctagatgccaggttttttttaaagccaaacagaatttgatatgaaatttgtaagacagggtcattgtaagaacttttgcagtttacactgataataaagatcagttataaagctcatgttttcatttcaagagcatttaatcagtggcagtaattttgttttgggtttctttttctgcaagtcagtcagatttatagaaaatgttggtttccatcctcttgtatcagtctgatcctgatcttcgtatatggtaactttattaacttgggctctaatttgtgtcactgttgtatgtaattaacttgttttatctgtattttgtgaaaagacacagaaaatgtttactttcatcattccatcacatgccattcaataatgacaaaattcattgatgaaaggttgatgtaaattcacaataagtcatttgttgaaatgaaacatagtaataattaaagttttaaaaatgtacatgctgtggggggtagggttcaacttgcccactcgagaggatgtagagtctgaagtgggaatgtcactttagagtctaaagtgatttagtgggtttaaagtgtgaatatcacctattttaagaaggtccttgggtaagttctttgaagaaatccagtccagcctattcagaaactcttaacaggatccccacaaatcgggttgggcgtgctacctccttgagaagacaatcctgcacgttggaaaagataaataggtttagtaagtctaattccatttaatgatgcatacgtgtgggaatggtgaggataggaaagatgattagccaacagttttaatgaygtcaaacctggagggtagcaagtttgttattctatgttgaatttttaaaatcttaaattaggaacttatttcatctcttagtctactaactattaaggaacttgatttaacagggttttttgccctctaccctttatgaaaattacccttatataagtcagaaccattttgcccctctcttccctgaaacttgcatgcagtgcggtaawgtactgyagaaagcatgttatctcattatgtcmccatattgtctgcaataatagggagggcgttctaagttaggatctttttgagttttaagtacctgattttttataaatatctgaatacctatgtaggttcaaaatccattatttcccgttagtaagaatttgtcagcaagtccgacttggacattaattattggcattaatattctaaaatctgaatccccaggccgggcacggtggctcatgcttgtaatccctgcactttgggaggctgaggcaggtggatcacctgaggtcaggagttccagaccagcgtggccaacatggtgaaacctcgactctactaaaaatacaaaaaattagttggacattgtggtgggcgcctgtaatcccagctacttgggagactgaggcaggagaattgcttgaacccggaaggcggatgttgcagtgagctgagatcgcgccattgtactccagcctgggcaataagagtgaaactccatgtcaaaaaaaaaaaaaaaaaaaattgaatccccaaatacatactggccccaggggtttcaaataagggattgtgagctgtgtacaaatctgcccctcagatggagtttataatcctatagtaacgtttaagcatagttatttacaaggtacttctcacttaatccgtatagcaactcagaagtagactttgctgatggagaggcacaaggactgtagaaattaaatgactaacaagggcataatgatcactaaatgctaacactaagactgaaggttttctgcttcttgagttctgacatttctgccacacaaattgggctctgggtgtaattataatccaccagcaaatatgtgaatccctacctatgtgcttggcaattaaaaccaaagtcaaataaggcagttcttgcactcaaggaactttgagagagaaattggtgccataaaaggtaaaatactttgagaattggaaaggccataacttactttctacctggaaggagcaaaagtgaaggttttgtgcaggatgtagcatgygagctcatgtttgggcaggatttatatgtgcataaaagtagaagatggtcattgccagtgcgctctctctctccctttctcactcccagttatgtggcttttacttcatgtgtctttgaactccatacactttcctcctcatggtctaccctgatctaagcagtctggacccattgcctggacaatcatagtatccttgatcttcccacctgtagtgttgtactcttctaatctgttgactryacggcaagcagagtgatctctagaaaatatgagcatgttgctttcctgcttaaaatctttccatgtcttcccgttatctttgaattaagttcaaacttttaaatttggcttataagcactccataatttggtccctgcttctactcattcagaagtttcaacttaaatgccacatattctagtaacttttccttatccctaatctaggaaaggtttcctagacctctgttcctgttagatggtctgcttccacatcatgacactgactttattttattgtagttagttgcaatggatttaaattcttttagataaacgatatttttttctgctgtttccacagcctgttgttttattccctgcctagttaactcacttatgttacctctctgatccgagaaagcatttgactttgccackcctgggatagtgctttcagagcagagctgagtatttggttaaatgtttagaaaaggagtcaaggataatactgtacaggaggttagtgggagtcagtttgacagaaggcctatggtgctaaggtctaagcagtgtttgatgttaatgtggtgtaggcagtctcatgtatatgtttggtaaatattgatcaaatacctattgtctacaagacactacccactgtggatatggcaaaacagacaaaatcttagccttctaggagcttacatgccaaaagggatgggggaagagaaggcatacgagaagtatatcagataggaataagtgctatgggggtgaaataaagcaggaaaaggggctgtgtagtacggggcatgagtggagttcatttttttatagggtagttgaagaagacttcacaaaggtgatagctttgtttagaggtcaccttttatcattacctttcagagcaaagtaataatccatgtgactcatggagaaagtatattttaagcagaaaaaacaacagatgtrtatgyccaggcatgtcaggaacatgcctgacatgtgaaagaacagcagggaaactggagtggatggaacagaggcggtaggggacggggacagttgtagggartaaagtcagagaggataacaaacaccctgtgagggtttttataggtcattgtgaagacattgaccctaagtgagatgggaatctttcagagggttttaagcagagaaatgatgtgctccaccttaactttgtaagtttattctggttaagaatagtatgtaggatagcaggaaaagcaagctattttatgaatttaaataaaagatgacagtgggctgcatgcagtggtggctcatggttgtaatcccagcactttgggaggccaagacaggaggatcacttgaggccaggagtttgagaccagcctgggcaacatagtgggaccttgtctctaaagaaaatagaaaaaataagccgggtatggtgaacatgcctgtagtcccaactactcaggaggctaaagtgggcagatcacctgagcccrgagaggatgaggctactgtgagccctgatcgtgccactgcactctagcctgggtgacagaacgagacccagtctcaaaaaaawtttttttttagctggatgtggtagcatgcacatgtagtcctaactagtcaggaggctgaggtgggaagattgcttgaacccargagtttgaggttacagtgagctaggatgatgccactaaacagcctgggtgacagagggaaaccctgtctaaagtaaaagggactgactgttgtgaagatagaggcaacaggattagttgacagaaatgtgtttcttttgaagcactctagaagtctgcatttgctcagggaagttctatcgggtattcacgagcatcaactttttattgcccctcatatttgggctgtatacctagcttattgaaaaattagtaaaccaaagcagtgggaatagcatacctttgaaaatctgattaagttatgggcttgctcccagaaaagtagatacgcctgactttggtttacttgggttccccccaaattctacctccaaaaattttaggggcttctgaatccctctgatttataggcctatggactgttttcagaaacctaagataccctctagggagggaggttagtacacagaatgtatgctgtcaggtcctttacacttgtactttaaattaagttctgagggctgggctcagtgactcacgcctgtaatcccagcactttgggaggccgaggcgggcggatcacctgaggttgggagttcgagaccagcctgaccaacatggaaaaacgccgtctctactaaaaatacaaaattagccaggtgtggtggcatatacctataatcccaactactcgggaggctgaggcaggagaatcgcttgaacctgggaggcggaggttgcagtgagccgagatgttgccattgcacaccagcctgggcaacaagagcgaaactctgtgtcaataaataaataaaaataaatttggttctgagttatctagtaactagyacaaagacagaaatgtagttatccatgaaatgcagtttgtgatgtctataagatattcacaaatgcttagcaggtacttgttgagcatcttccatgtgtcatacattgttctaggtgccaggacctttggcatcaagaaagcccctacccttaaagagcttactttgtaatggagatagactacacatttgataactggttcttgaggtcctcttatacgccagacactattctaggttccaatggcacagttttaattaaaggtagatgatgtctctgccctcttggagcattttattctagtgagatctatatagtacataacagtttttaaaaaagatagatccatgattcccagatctgagaatcatgagacarggttttcccaagggtcatcagagagaaaatatggtattgtgattctcaatctttcttttttctttcttttttttggagatggattcttgctctgtcaccaggctggagtgcagtggcgtgatctcagctcactgcaacctccgccttccgggttcaagcaattgtcctgcctcagcctcccaagtagctgggattacaggcacccaccaccacgcctggctaatttttgtatttttagtagaaacggggtttcaccatgttggctaggatggtcttgacctcttgacctcctgatccgtccgcctcaccctcccaaagtgctggggttacaggtgtgagccaccgcacccagcctgtggttctcaatgtttagtgcacatcagattgacctaaagagtttattaacacattgctgggccccacctccagtatttctgattcaggaggtctgcattggagcctgagarttggcatttctaacaagttcccagataatgctgatgttgctgctctggggaccgtgcttttggaactgccagtacggtatacggcagcagtccccaacccttttggcaccagggcccagtttcatggaagacaatttttccgtggatcagggaggtagtgggggatggtttcgggatgaaaggattccacctcagatcatgaggcattagttagattctcataaggggcacataagctagaacccttgcatgtgtagttcaatagggtttgcgctcctatgagaatctaatgccaccgctgatctgacaggaggcggagctcaggccataatgctcatttggccttctggcctggggtttggggacccctggtgtaagagacatctgccacaatagccttaccgtggttactacagaatttccacagagctgttgtgcagaaccacagttgaataaaaattctgtggaaggccaaaaagatgcataaggttattgtagtagagcatttggtatatagaggaacatttccagcctgttccaagaaagaggtgttagaaggtggtatccctcaaactcttagtgtcaatttgaggttatagtcctggacatasagcttaagttcatgtattatgtggtgttggcttgagtgcttgttgtgtgtaggtagggtaatcctgtatccttactattaatttatttcccttttatactccccccacctctcctccccaagagggaacaatgttacaatcattttttaaaatggaaataatgtattaaatgtgaaacattttttatttcagaactgttcgtcaggtggcacaggagcagttctttttaatgtgcaccagatgttgcatgggacaccggcctctacttttcttcattactctactctttactgttttrggggtgagactttttaaaatatgcttatcaatgtgattcattctttaagcaagaaacattcagaaatttgtggttttagcttgcattaaagttaggacagtctatatttaataaatgaagtactactttatttcccgcactgtggtagtcatcttctctagttaactctgggtttttaaaaaagtggattttgaggatggacgtgtaaattgatattattctactctgtttccagagcacagcaagagagagagctaaacactcaggcgactactttactcttttaagacaccttcttaattacgcttacaatagtaatattaatgtacccaatgctgaagttcttctcaataatgaaattgattggcttaaaagaattagggtaagttttagttaatactccatttatatgtcattattagtaaatagaatgttttattgatgrtttatattttttgagcattttggttaaatggaaaactccaaagattgataaaagggaccaaagaatgtactctgcatcagtggacgttagtaatctgtgattcacaaaatgcatatctagtttagtaaaatgaattgcttacttgacacttgaaatactgatgttcagcttcttttattttagcattttgggcctttttgcaaattctaatttttaaaaaaagtattcttgaattgtttatgtcaaaaatgagtctgatagagcagaactttctaccataacatctgatactttttacttaggcaaaatgatacaagaatttatttctgaagagatttgtagtttttarccttcaaattagcatttcttctagtagttcataaagccaatttctagaaagttctgaagaaaacaaagttgtttgaatggaaagacttaaggaaattatctcatatccctccagctctgtctcgttctggctcctctctccctctttacctccctttcataagctagacatttgatttcttcccccccccaccccaccccccgcctttggcaggatgatgttaaaagaacaggagaaacgggtattgaagagacgatcttagagggccaccttggagtgacaaaggagttactggcctttcaaacttctgagaaaaaatttcatattggttgtgaaaaaggaggtgctaatctcattaaagtaagttctgtgttcttggttgtaagctacatatcataaccttctaaatgtttataatcaaatttaattaatttatagtagtatcatgtctttgtactttcttgatcttttctcttttttaagaatctttatcaaatttacagtaatttaagaaatacagttatgccttactttattcaagagacatttctaaatttgtatttaaataagatttcatggctggacttgctggcctcatgcctgtaatcccagtactttgggaggccgagtccagtggatggcttgagcccaagagttgaagaccagcctgggcaacatggtgaaaccccttctctacaaaagaaaaaaaaaaaattgccaggtgtggtggcgcacacccatggtccccagctacttgagaggctgagatggaaggatcacctgagcccaggaggtggaggttgcagtgagctgagatcgcaccactgcactccagcctgaaggaacagagcaaggccctgtctcaaaataaatagataaataaataagatactttataaagtaattgttgtttagtttttctctttggaaaatctgaattgttaatttcatttaatgaggcaaacctctgttttgtaagaatgcatcttgtatatctttaatgagttttttcatacatgtagtaacacaaggaaacaaagtttcatttttgtacattttatttctattcaaaatgggtttaatttgctatacacttgattaaaggagcaaacatttaaaataaaaattttgataagtactatattcagttctttcttaatatttacaaatttatttaacctgcgaaattaggtatgttagtgatagtaaatagtgttttgaaggaagatctttttattagaaaatctgagttttctgagatgtaatgagatcttaaattccaatgagtaattttaaaatgatttacttacaagagaactttttttttctaaaaatatatagcattgctaatatgtaatccctttttcaactttttaggaattaattgatgatttcatatttcctgcatccaatgtttacctacagtatatgagaaatggagagcttccagctgaacaggctattccggtctgtggttcaccacctacaattaatgctggttttgaattacttgtagcattagctgttggctgtgtgaggaatctcaaacaaatagtagattctttgactgaaatgtattacattggcacagcaataactagtaagtatttttaatagaatgtgataattgatcatttcaatgtttcaaagttgttttcctgtttttctttcagaaaatatttccaacttacgtatttctttcagtaactagtttaacatttttagtgartgaatgwacagttaagaccattataggccgggcacggtggctcaggcctgtaatcccagcactttgggaggccaaggtgggtggatcacctgaggtcaggagtttgagaccagcctgaccatggtgaaaccctgtctctacaaaaaatacaaaaattagctgggcattgtggtgcacacctgtaatcccagctactcaggaggctgagacaggagaattgcttgaacccaggaggtggaggttgcagtgagccgagatcgcgccactgcactccatcctgggtgacagagcaagactccatctcagaaaaaaaagaaaagaaaagaaaagaaaaaagaaaaataagaccattataagcagaccaccttgtatagaaaaaaattcaaacatttgttaagtggcatcctataagtggtgtcgccatttggcaagataaatttcatctcatgaaacctgtcataaaattcaaactccagattaaaaggtagccaaagtaaatgccgtagagtatagacgtaaaactttattttatttatttatttttttgagacggagtttcactcttgttgcccaggctggagtgcagtggcgcgatctcggctcactgcaacctctcgggttcaagtgattctcctgcctcagcctcccaagtagctgggcttacaggcgcctgccaccatgcctggctaattttgtattgccaccatgcctggctaatattgtatttttagtagagatagggtttcaccatgttggccaggctagtcttgaactcctggcctcaggtgatccacctgcctcggcctcccaaagtgctggaattacaggtgtgagccaccgcacctggcccagacttaaaactttaagttgcatgtattggaaaacctttcaggtcttcacttagaagttcygtaacgttatgagttcgaagaaaatctggctttgaagattagaacgtgagaagttaccattttggtgcaccttatttatgttctcatttaatgcccacaccaggcgcatgaataggctgcagatttcagaccttacagataaggaattgaagctcaaaagggcaagggcaatataaaatattaataacagaaaaagcagaaataagcataattgatgctgttttaagagaaaatcgctatttagaacacttaagaatataattgattatagtaaatctttaagaacatgtcaaattactttttgatgtgtttcagaatgtttggaagttttaaataacatctcaggaatttctgaataaattgattgcttaaaaggttagacctttagctgtcctatcaaatctatgtattgtgagaattcttgtattttttttttaacttaatgggggttaattttttaatcacagattggagtatagtacaacgttgtttgcatccttccctatctgccattgttccctgtcaacacagaaatatttacctaattccatttttggccatgcagtttggtatgatataattaactggccccctagacaatgatacttaatgttgtttccaggtttatactaggtggagggagataggaagatgtacagtgatttacaattatcacaaatctgctgtcttgcttgctcctcaaaatagcattatagatatcaggaaagcaagtgttacttttattattacatttactaggaagaaacagaaagttacctaaaggtgggggaaaaaaagtggtaagcatcagaaccaggatgtgagcccatgtggttttaggattatttaaaactgagaaaattataatgtgttgatatatttagataacatttcattccttgccaaatttgaaggcaaaagtatcaaatattaagaaagtgaataatggctaaaaataaagatgcaagtaaagttagcatgtagacattagaattatactatcttgtacttttgagactgccatagaagcaacatcatatgaaacgggtttgcgggtgattggataagaagctgcacagtggtgcctgttgctgtatattttagattgttggaagatgaagtgcaaactcagaacactgcttcaggttgctgtagggttagtcgaattatgggtggtagaattattgccagggttgctttgtcagcataatagagtttgaaaggacagaatggccgtgttcatgctacaagaatctttccttctctcagcttgtgaagcacttactgagtgggaatatctgccacctgttggaccccgcccacccaaaggattcgtggggctgaaaaatgccggtgctacttgttacatgaattctgtgattcagcaactctacatgattccttccattaggaacggtattcttgccattgaaggcacaggtagtgatgtagatgatgatatgtctggggatgagaarcaggacaatgaggtaaatttgagttaccatttctgttttctgtgtttcaagttatgataccagatactattctctcttaagagagtgttatrctttcatcaaacgtattaaagtatatttgaaagttagggatgggccgagcacacacctgtggtctcagctactcaggaaactgaggcaggaggattgcttgagcctgggagctggaggctgcagtgagccatgatcatgccactgcactccagcctgggttacagagtgagaccctgtctcagaagaaaaagaaaaagtaagtagggatggacttctcccagccagcatgaactgctacctcttaacatagtatagttctcactacctaccagaatttaaactgcagataatttttagaatggtttgtacatttctaaagcaacagttggctgggcatggtagctcacacctataatctcagcactttgggaagctgaggcaggtggatcacctgaggtcaggagttcaagaccagcctggccaacatagtgaaaccccatgtctactaaaaatacaaaaattagctgggtgtggtggcacatgcctgtagtcctagctactcggaaggctgaggcaggagaatcacttgaacccggaaggtggaggttgcgatgagctgagatggcaccagtgcactccagcctaggtgacagagcgagactccgtctcaaaaaaaaaaagcaacagttaatgtactcgtgtttttttgtgtagagtgtttagtataatttggggtttgtttgatggtaagaaccttcatttttgataatagttttaaatttttacttttctatttctaaattttaattttctattttatgccaagttatacagtatctgccaatttcacyktstgtgcttacttttaggttattctttgaatttcccttagatcatagctcttcttgattaggaaacaaactttccctactttaaatagtctcacgtagtcttgtggcaaaatttaggctgcctactgagtatccagtgcagtataaagcagtgaagaagttgagttgtagtggcgaatcagaattgacataactgtaagatagctctttaaagaagagcatatggcaagaagacttaagttgtggtcatgtttgtgcttaccatgtaatatttccttggttttacttttcctgtttatagtgatagtgggaactgaagagagaagccagagtatattctaattgtagtaaatggttcttttcattccctcccttcagttgccagaactgattttgctctgaagaagtagtttatcaattggagcttctgaaacatctacttgcctcaactcttccctrgacctgctgtgccagatggtctagggattgggttctgagcactttcactttataaaaaaaagcttcataaaggacacttatacccatacctgattaaaaaccactgctctgggaaaaaaatgtaattcaaattccagttctggagcccatcatatacctgggatattgagttaaacacaagtagatataggtaattgtactggcaagaagtaaatgaggcatagaaaatataacacaatttcaaataaggtgtaccacttttactctcatggtatcctctgctccatgttgtctctgcaccccagtgtactgtgggagtttttgtggggttttttgggttttggtttttttggcttatgtttttgtttccatccctagagtataagtttctcatgggcagggactggttgttgtctatttctatatcagagttatcagatacaactcagagaatactgaaagatagttaaatgtaaaaacacattcttctttgtagctgccatatgattatgacctttaggaattctgtcttcatgttacatcttacaccactacttctgttgttttttaaaattgtggtaaaatacatataacatgaaacttaccatctgtttttaaatgtgcagttgtcctattaaatacatttacattgttgtacaccatcaccaccacccatctccaaaactcttcatattgcaaaactcaaactgtagtcattaagctactccccattctccctccccacagcctctggcaactactattctttttgtctctatgattgactactctacatacctcatataagtgattatataagtgaaatcatacagtgtttgcctttgcatagctggcttatttcattttaaagtctaagtaatattccattatatgtatataccacattttccttatccattcatttgtcgatggacatttgggttgcttccccatttgagctattgtgaataaggctgccatgaacatggatatacaaatagctgtttgaggtcctgctttcaatatttccaggcatatgctcagaagtggaagtactagatcatttggtgatgctatttttattttattatttattatttttttcagacagagtctcactctgtcacacaggctggagtgcagtggtgctatctcagctcactgcaacctctgcctcctgggttcaagcgattctcctgcctcagcctcccgagtagctgggactacaggcacgcaccaccataccccgctaatttttgtatttttagtagagatgggatttcaccatattggccaggctggtctcgaactcctgatttcaggtgatccacccaccttggcctcccaaagtgctgggattataggcatgagccaccataygcggccaaattttttgaggaactgttttctagagtgactgcaccattttacattcctaccagcattgcacaagagctccaatttctccatatccttgccaacacttgttatactcactcgttctggtagttgacaccctaattgagtgtgaggtagtatctcatggttttgatttgcatttaccaaatggttaacgattttgagcatctttagctgtgcttattattggccacttgttgatcttctttgtctatttttaaattgagttgtgttgttgagttttaagagttctctgtatgttctagatattaactccatatcagatatgtgatttgcagatactttcttttgttgcctgtacctctgatgtcatatccaagaaatcactgccaaatccagtgtcttgaagcttttgccctatgttttttttttttttttaacagttctgtggttttagctcttacatttaggattttgatccattttgagttaatttttgtatgtagtgtttcataagggctcaactttattcttttgcatgtggattatccagtttacccagcaccatttgtggaagagtactagtcatgcaccacataacaacgtttcagacaattacagaccatatatatgacagtagtccaatgagattataatgtcgtatttttactgtaccttttctatttttagatgcacagattcaccgttggtttgcagttgtctacagtatgtagtacartaacatgctgtacaagtttacaacctaggagcaattggctataccatctaggtttataggtacactatgatgttcacatgacaaaatacctaatgatgcatttctcagaatttatccctgtcattaagcaaagaatgactatactgatataggtatattttattgacagatctgagcattttatatacaacagctacacaraggatatattacccccattcacacrtaaagaaacttgaagcctagaaagtttaagtagtttttacttgctcaaagttacttggtttataagtggtagagcctgcatttatgtctagttcagtctaaattactatgctaatgctacactatattatctatctttcttacacatggtcagggttatttggttatgataactaatatgtgaaatggtggggataaacactaaataactaaaaatttataaattgaaaagtgctttggaaatgagcataataggaatacaaatcatttgttcaataactgcttggcatttgtctcaacgtattttattatactttagctcattggtgacattttttggtttctagagcaatgttgatcccagggatgatgtatttggatatcctcaacaatttgaagataaaccagcattaagtaaaactgaagatagaaaagagtacaacattggtgtcctaagacaccttcaggtcatctttggtcatttagctgcttctcgactgcaatactatgtgcccagaggattttggaaacagttcaggtaaactatggatggacagtaatagagatacttcttaaaatgaacatctcaatacactaacattaaacctctaaaagacatgttggaaggcatctttttttaagcactggtaatattcaaactgtccttaattgggtgggtttttttttttttttttaggtccccttaggaagaagtagaaactgccatagtaagtaagggcaacatcctttagtctcttaaccatattattaactttttattaggaaaacatctaataaatacagaagtagaaaaaatagtatgaacccctgtatacttgtcacccaacttcagtagtagtcaacttgtggccagcctcatttaatctatattcttaacctattttttttttctttttttctttttctttttctttttttcttttttttttttgagatggagttttgctcttgttgcccaggctggagtgcagtggtgtgatcttggctcactgcaacatccgcctcccagattcaagtgattctcctgcctcagcctcccaagtagctgggattacaggcacccaccaccacgcctagctgattttttgtatttttagtggagacggggttttaccatgttggcccagactggtctcgaactcctgacctcaggtgattcccatctcagcctcccaaagtgctgggattacaggcgtgagccactgtgcccggcccctacctatttctttctagattgttttgaagcaaatcttagttccatctgtaaatacttaagtatgtgtctgtagtgtctgtctcaaaacatgatcatgataccattatgtttttttaaaattgcttaatatcaaatatctctgtcagtgtttgaatttaccgagttatctcataactggtttttactgatattttttaaaaataagattcagttgaggtccatttaccacaaatggttggtaatgatcttgattattcatctgtttcttttttccctttacaattatgggggaatcggaggacaaatagtttagcatgtaaattttcccacagtctgaattttgttgatggaatccctgtggtcgtttattattttctgtttttctwggtcacctgcatcttctataaacaccttatgagatctagaggcttgatcagattgtggtattatttttctttttgtggaatggataggcaacgctacttcataggggataatgtttatctccatgaggagtgacattataatgtctgtcttcttatgatgttaacagcaattttttattattattattatatatatacaatttttttttttcccctgagatggagtctttgctctgtcgcccaggctagagtacagtggcgtgatctcagctcactgcaacctccgcctcctgggttcaagcaattctgcctcagcctcctgagtagctagggttaacaggggttacaggcgtgggccaaccatgcccggccaagttttgtatttttagtagagacggggtttcaccatgttggccagtctggtytcgaactcctgacctcaggtgatctgcctgcctcccaaagtgctggattataggcatgagctactgctccctggcctttttttttttttttttttttttttggagatagagtcttgctctgttgcccaggctgaagtgcaatggctcgatctcagctcactgcaacctctgcctcccaggttcaagcaattcttcagcctcagcctctcaagtagctaggacgacaggcccaccacaccccgctaattttttgtagttttagtagagatagggtttcgccgtgttggccaggctggtctcaaattcctgacgtcaggtgatccacccgcctcggcctcccaaagtgctgggattacaggcgtgagccactgcacctggccaattatcattatcttaatacagtatttcttcagggttataaaataacaatattttattttttcatttaatagctagaaaagatctataaagggaaaattgccctcaccattttctttttaagttagaaaactcagattacatttttatcttgtttcctttgactttaagtcagtactacgtcatgcactgtgctaaaataactacagtacaaccacgtaactcttactgtgtatgaaaaggggtataattctttatagcagtgaggtttggtttgttttgttttgtaagtaatcctccttggaatcccttcaaggtgcttcccggccagctgagaggagcggggaacgaagggtcacctgatactctgatccgccttcccttcttctgacaaagcagtataaatttcttttcctcccctaactaggccctctacttactctgtactagtgtcttgcgtggaccaccctccctcccatctctcattttgcttttagtcccgtcacccagcataccattctccctcctctctgactatttcagttctgtcttctttccctaggttattccaattccatctctgccttaaggctattttagcatttctgtttatgctcttccaaactgaagaacacaaacagaggcttatactgggttttttttttttttgagacagagtctcactctgtggcccaggctagagtgcagtggtgtgatctcggctcacggtaacctctgcccgctgggttcaagcaattctcctgtcttggtagctgggattacaggcgcctgccaccatgcccagctaatttttgtatttttagtagagactgggtttcaccatattcatcaggctggtcttgaactcctgacttcaggtgatccacccgcctcagcctcccaaagtgctgggattacaggcgagagccactgcgcccagctgaggcttacactttttaaactttcgtcttgtcattcagttacaattttttctcttgtaatgcctttgcttttttgacttttcagttactcgctgtgctagtggagctcggtttgtatagactagcactttggattatccacactttagacacataatctactcttgacacaagcgggttagttaactacacttcctcaccccactcttttattttgaaaagtttcaaacctacagaaaagatgaagaagaggtataattatcacctttatgttatattctttatgcggttttactaattaacattttgccatatttgcttatcttgccatatgtgtgcttggtttttggtttattttttttttaagttttgtttgtttgtttgtttgttttttgtttttttgagatggagtctcgctctgtcgcccaggctggagtgcagtggcrtgatctyggctcactgcaagctccccttcctgggttcacaccattctcctgcctcagcctcccgagtagctgggactacaggcgcctgccaccaatgcccagctaattttttgtatttttagtagagacagagtttcattgtgttagccaggrtggtctcgawctcctgacctcgtgatccacccggctcggcctcccaaaatgctaggattacaggcgtgagccaccgcgcccggccttttttcttaagttgatagtgaagttgcaaacaggacgcttcaccccttcatacttcaacatatatcttataagagatcatatatcagaataaggcaattttcctacttatgtatgatacagttatatccmagtaatataataacgatttttaatctctaatattcatcagtatatattccgatttcccaaaagtggtctttataacttatctctctatcccaatctgatactcatgaaggaatcacaaggatttggctgttagctctttagttgccttttatgtaaaataatctccctaacttgtgacttgtatcgcactgaaatttttaaagaatccaggccagttgtcttgcagaatgtgttttttgatttgtgtgattgtttcctgatgattagctttatgttaaatgttgagggggtgggggcaataaaactacataattgatgttttgtgtttctcactgcactgtattgggaggcatgtgttatccacttaattattaagtgatattaattttgatttcttggtgtcttaacagatctctcctttataaagggtaccttttcccttttgaaattagttgattacatgtttgaaagtttgaggagttgaatatggtttgaaagtaaatagaacggactggtgtaatttccagtaatgaaacaagctgatttttaacaaataatatatttgattttaaacttacygtatacaaatttttacttgtgtaaaatataatagagatcagattatttgctatgtagaaaaggtttttacaaaagtataaacagacagttcttgcatactttaaaatgtcatttcttgcttagaacaaatacacttaaattctctatatacattattctgtatatacaaaatcaggtattattgatagtttccagcagtgcctgagttttagcagtatgagttctcatttttgtggtatgtagtgatggtgtcttttcttagattactcaagagattaactctagaacaagttaaacctttctctcttcacttgggaaaaaaataaatttaagagtaactagatctgatctttttactatttataatccaaaatttaagcaaaatgaaagaaataaaatagtgattgtaacatccacataagagtgagatccaccacctcatcttaatagtatctttaattggattcaaaatgcatgcatgtgtcataccacctgaagcaaccatccttcctggagccgtactatccatcaattacaccactagttttgtggcagttctttgccgctagagtactagttttactatgaggctcactctcttaccccactacattctacagggaaagcacattctttttttcctactytttccatgtaattgwggaataaaatctcggttttakatactgttgtttgtgrtyttgttgctttyttttcccctgaaaaatatagttgtacatattgttctgtgaatgttacatgttacatgttttatttcattcatttcttaggctttggggtgagcctgttaatctgcgtgaacaacacgatgctttagaattttttaattcattggtggatagtttagatgaagctttaaaagctttaggacatccagctatgctaagtaaagtcttaggaggttcctttgctgatcagaagatctgccaaggctgcccacataggtaagtactaattacacattgaaagtatatgttgtaccatgtatatactaacagaaataaaatttttactagtacttaacatacaaaagtggagtatatcactgattactaaatacctgaaacagaatgatttatatactttgcataccttactgctgtggggcttttttttgtttttgtcagttaacttttagttccttctactctgcctgatctcttagccattttattatattatactcttacagtctctttcttcctttcctttcctttcctttctcctttttcttttcctttctctttttttttctttctttcttttttgaaagagacaaggtttctctttgttgcctaggctggagttcagtggcatggtcgtaactcatagtaactttgaacttgtgggctcaagcaatcctgctgcctcagcctctcaaatagctgggactacaggcatgtgccaccacacctggctaatttgtaaatttttttagagatcgaatctcttgttgcccaagctggtctcaaaactgctgacctcaaaatcagtcgtcacacctcaacttcccaaagtgttgagatgacaggcgtgagccactgcgcctggcctactcttacattcttttacagaagattattcctgaggaaatraaatggcattttgcatatagctacaggtgttatttataaatttgccctttatcttagaacttgagtgattataatagtgtaaatacagtaagtttagaagatgacaaagctatggtagtatttcctatacaaatgaaataatgacttttaaaatagcattgattattgtcattatctttaaggtatatttgtatacaaaacatatcaaacctattgtaaaaaaagattttacccccgtccgggaggtgaggggtgcctctgcccggcygcccctactgggaagtgaggagcccctctgcccggccagccgccccgtccggraaggaggtgatggggtcagccccccacccggccagccgccccgtccgggagggaggtaggggggtcagccccccgcccagccagctgccccatccgggaggtgaggggtgcctctgcccggccgcccctactgggaagtgaggagcccctctgcccggacagccgccccgtccgggagggaggtgggggggtcagccccccgcccggccagccgccccatccgggaggtgaggggtgcctctgcccggccgcccctactgggaagtgaggagcccctctgcccggccaccaccccgtctgggaggtgtactcaacagctcattgagaacaggccatgatgacaatggcggttttgtggaatagaaaggggggaaaggtggggaaaagattgagaaatcggatggttgccgtgtctgtgtagaaagaggtagacatgggagacttttcattttgttctgtactaagaaaaattcttctgccttaggatcctgttgatctgtgaccttacccccaaccctgtgctctctgaaacatgtgctgtgtccactcagggttgaatggattaagggtggtgcaagatgtgctttgttaaacagatgcttgaaggcagcatgctcgttaagagtcatcgccactccctaatctcaagtacccagggacacaaacactgcggaaggccgcagggtcctctgcctaggaaaaccagagacctttgttcacttgtttatctgctgaccttccctccactattgtcctatgaccctgccaaatccccctctgcaagaaacacccaagaatgatcaattaaaaaaaaaaaaaaaagcctaaaaaaawaaaaatwaaaaaagattttacaagaaaaacattgacaaaacaaattgtttgacttgaaaattgattaagggcttctattagaaatagttaatgagttcattactgataaatatacatgcctgtcatatggaagttttactttgggacttgttataatatggattaatgttgatttgcaatcgtttttcaccaaaatgtcacagtaagatagtattttctacaatccaaactgtattaaatatagtcatgggttgagtacacatgtggtttgtgggggtgttttgtttttgattaccaggaaatgattgggygagaggtaatactatataaatgagaaatttctagcaagttatagtcttaccactcattcataattagggaatatacttattcacttagcctaggcaacttttagtccttttgaaaggccttttatattaggtgaacaataaaataaaattttaaccttgtttttaattagtgataaaaacagccaactttggggtcatttgttcatgttactcctccttagttttagacaattttctaaattatttggaaatcactggttttctttggcaagtgaaatgtcaaaagattatggtcttgaaatcagatccttatacctgatcaacagctaaactagtcttatttttttaactagckgggcatgggggtggactcctgtagtcccagctgcttgggaggctgagtcaggaggatcgcttgagcccaggagttagaagttccagtgaactgtgatcatgccactacattccagcctgggtgacagagtgagacctcacctcattaaaaacaaaaaagaaagaaactctactttgagtgcccatacaaccattctgtttttcactctcagtacagtattcattgaattacatgaatctttgtgttacaagattttgcccaactgtaggctaatataagtgttctgaacacatttagggtaagctaggctaaagctatgatgtttggtaggttgggtgtattaaatgcattttcagcttatgatattttcaatttatgatgggtttattgggctgtagccatttcataagcaaagagcgtccgtacttgctgcagagaccatatgcttcacaaagcctaagataaatttactatctggccctttacagaaagactttgctgtcctctaatgttagaacaccttctttttatagatgttgaagaatatcctacttttgaagtgtagtctaagatctaacttttttccctctatgggctgttccctgattatatagtaraaatttgcttaatacctgctttatattccattcatataatttataaatgcctttgtgtaccttttttccggagtttaaaattccttaaataagggactatcttaaacagtgaatatccctcagtacttttacacatagaaagcactctcagtctatccattggatgaattaatggttaataatgtattcctcacatcccttgttttgcatttatgcatgtgtctcaccagaaattggaaagtctctttggtagaaaatgaccataaactgggattctagctccttctcaggttgctaatcctgtactcatttgtgtgtgcaaacttttgctttactaaggcttccattacagaaaaggaagaatatataaaaatttagcttattcgtagtttatcattttcagaacttaataaattcatgctttggcttcagcatgaattactatctaaacagataacactagaagcagcatcgtatactacaaagagattaagctgtgagcccagacagattcaactttaaaataccatttcacctaataatcttgatcaagttaacttttttattgctaacattctatgacttacgggtttcgcattataaaaatggcaaatgtatgggtgcagcaaaccaacatggcacatgtatacatatrtaacaaacctgcacgttgtggacatgtaccctagaacttaaagtataatttwaaaraaaaaggcaaatgtagtttacattaagtccataactaaaatgtttacaaaactaagggataaatcctttttttaaatcgtttttaggtacgaatgtgaagaatcttttacgaccctaaacgtagacattagaaatcaccaaaatcttcttgattctttggaacagtatgtcaaaggagatttactagaaggtgcaaatgcatatcattgtgaaaaatgcaataaaaaggtacgggctgtccagttttgtttaattttgattacatttaatggatttagaagaaattggtttttttggttcatcctcacaagtcaccctatttttattttctcctactttggtatagtggtagcagagaagtagtcaatatgataactaataraaggtttggcaaggaaggaaaaaaagtagtgccaaaggggctaggtaaataagataaaaataggtaaataagagtgaataattttaaaagtcataacgtgatagcacattctcttatataagttacacagacactttccatctctaccgagaaacaaattgccattgaacccctcaaagatacagagctgatagaggaaaacatttctcctgtcatgtccaggattacttgtcaagaccaaaacatttgctgaaaccattaattactttattgaaccacataagatttcttttagactagtcaagtggcccataagatttcttttatcacctatgttataaaaccatttattttggaaacttattagcagttctttgagagagatgattcacacgcattatagtaatgaataaggtgtatctttgggagctcccaaaccctttcaccctcaagtcacttgtgttgttttggccttatgcaccacttagagaagtcctgaagtttaaagattgagattgtgggctgtaaagccatactgcctgccacctgcagctcctgagacctgaggcaagttacttgacctctctgtgattactagttttcatcttttaaggttcagtagtacacacttgagaaggttgtaaggattcggtatgtttttacttgtgcggcacttagtatatattrcctggcatctgaattacccaacaaatattagctactcttattgttattgtagttctttggtttgtgcataggaaaccaccttcgtgggaacaacagtaaacatcaaacaggtaataatggctagataacaatgacagaaaccagtcaacaatttaccatttgcatattattaatttcagcatttaaatcagctgataggattatcttgattatgctcattgtcatgtatttgtttatacttaaaaattcagataagtcttaatatcatttaaaagtttgcttggggtttttttttttttcctgtggattttaatagaacatctggtaactttgtcttgtttattttaggttgataccgtaaagcgcttgctgattaaaaaattacctcctgttcttgctatacaactaaagcgatttgactatgactgggaaagagaatgtgcaatcaagttcaatgattattttgaatttcctcgagagctggacatggaaccttacacagttgcaggtgtcgcaaagctggaaggggataatgtaaacccagagagtcagttgatacaacagagtgagcagtctgaaagtgagacagcaggaagcacaaaatacagacttgtgggtgtgctcgtacacagtggtcaagcgagtggggggcattattattcttacatcatccaaaggaatggtggagatggtgagagaaatcgctggtataaatttgatgatggtgatgtaacagaatgtaaaatggatgatgacgaagaaatgaaaaaccagtgttttggtggagagtacatgggagaagtgtttgatcacatgatgaagcgtatgtcatacaggcgccagaaaaggtggtggaatgcttatatacttttttatgaacgaatggacacaatagaccaagatgatgagttgataagatatatatcagagcttgctatcaccaccagacctcatcagattattatgccatcagccattgagagaagtgtacggaaacagaacgtacaattcatgcataaccgaatgcagtacagtatggagtattttcagtttatgaaaaaactgcttacatgtaatggcgtttacttaaaccctcctcccggtgagtatcaagagagtttagcttcttagtaataaagaataatttatagtaggcrtcaacatgtttaagttcataaaattaatgttttcactttaaatgagtctaatttgctgggtgtggtggttcacgcctgtaatcccagcactttgggaggccgaggtaggtggatcacctgaggtcaagagttcaataccagcctgaccaacatggtgaaaccccatctctactaaaaatataaaaattagccaggcatggtggcatgcacctgtagtcccagctactccctgtagtcccagctactccggaggctgaggcaggagaatcgcttgaacctgggaggtggaggttgcagtgacccaaattgatggccactgcactccagcctgggtgacagtgagtctccatctcaaaaaaataaaataaaaaaataaatgggtctaaattaaagtagcctgagaagggttcttaacaaatttaggacttctcaaaattaatggaaacacagacttgtttgaaaatggggttggaaaataaaaatgtgtttttatatctgcattttatttatagggcaagatcacctgttgcctgaagcagaagaaatcactatgatcagtattcaacttgctgctaggttcctctttactacaggatttcacacaaagaaagtagtccgtggctctgccagtgattggtacattgctttggattttcattcctattatactaatgtttggtttgcttctttaatagattgctttatgtttttctaaaccaagagaattttgtttgaagtttggaatatagaataaaaactctgggtcacaatagagaaatcatattaaaatagttacttagtctaaacatggccttttgttattcagaagctgacttctgcttctattaccttgtatcatatctttgacatccctgcaccaaagactacaagctgagactgggggacagtgactcacacctgtaatgccagcactttgggaagccagggtgggaggattgcttgagctcgggagttcaggaccagcctaggcaacatagtgagacccccatctcttcaaagaagattttaaaaattacccaagtatggtggcgcacacctgtaatcccagctactcggaaggctgaggtgggaggatcgctggagcctgggaggttgaagctgcagtgagccatgactgtgccactgcactccagcctgggcagcagagcaagaccctgtctcaaacaaaaccaaagattacaagatgagactgaaaagtgtaagctacttatgamatttattaggttttagcttacctagattgaattctgacaccgattaaaagggtaaaaaattaaaatggttttcttaagtttctaattgtgaaagtatagaggccattatratacattgatttaataatttttacttactcatttcaggaatatgtcaagataagggggtggtattttgtcattgaatctaggaagagtttgttaatggatttttagaggacaagctttcacctgtttggtaactctgagagaatagaccaagtcatagtatttatctattgttttaatattagaagcaacctttgctggttctctccagcagtagaggaagatctttgtcttttttttttggttcaatgagactcatccttttactatagagaacaagttattgacttaatagtcataggtttttttgttttattttaggtatgatgcattgtgtattctccttcgtcacagcaagaatgtacgtttttggtttgctcataacgtcctttttaatgtttcaaatcgcttctccgaataccttctggagtgccctagtgcagaagtgaggggtgcgtttgcaaaacttatagtctttattgcacatttttccttgcaagatgggccatgtccttcaccttttgcctctcctggaccttctagtcaggtaattgcacagctttctttctaaatgatgagatgtttacaaataaattgtgtttcctggaagtcgaagtcacaagcatatgtgcatccacttgatatgtttacctaacagaaacacacaatatgatgtcagtgagttccatttaatattactgcatggcaatgaatagtaattattggctctttaaaaatgtaagagaattttctctgttcggttacatgcagtagcttaattataagtttactgttaagtagattttttcctattttgaaggttttttaaatagtcttagatttttttaaaaaattacaagtgtaaaaaattataatgaaatccgcctctgatcttcattccctttcccaagaagcaaaatagtttagtttgtgtgatcagtccttccataaatgtatgcctgtatcagcatatgtgcatgtcctttttatgcaagtagaagtatacatataccttgttgctgtaaaacaggtaatgttttatcctttacaggcttatgacaacttaagcttgagtgatcacttactaagagcagtactaaatctcttgagaagggaagtttcagagcatgggcgtcatttacagcagtatttcaacctgtttgtaatgtatgccaatttaggtaagaatttaagtttttcagaattctgttttgatgtatcatattaaattgtgaagtcatttaggtcaagtgatgaaatataatctgatctgaagtagaaacaatttcccataaaaccwgttgtgmattttmwctgaacatggcactttcaccttttactttgtttatgcatgtgtctttgtggtagacacaggtcagaatctgtgttttgatttttttttttttttaatctcctaatgcagtggtgccaaatctggctgcttttggaaaatactggtttctaggcctcttctcacactgattgaatcagcatccccaaagctaatgtcagggaatccatgttttcaaaggggtccccaaatggttgtgatactcaccaaatttagatagcagacttggtctgtacataagtttttgtttaagtaaactacaattatggataatataaatactcgcttaaaatattaatttaggggccgggcacaatggcttatgcctgtactcccagcactttgggaggccaaggcaagaggattgcttgagcccaggagactaacctaggcaccatagggagaccctatctctacaaaataaaattttaaaattagctggatgtagtggcatatgcctgtagtcctagctacttgggaggctgaggtgggagaatcacttgagctaaggaggttgaggctgcagtgacccgtgattgcaccactgcactccagcctgggcaacagaatgagaccctgtctccaaaaagcaaacaaaccaaaaagtcatatatccaaaatgaagttctatatccaggcgtacctgtcgtttcaggttttttttctgtgatcttacttaatcaccattggatccatggcccttttaacataagggagattgtacttttcatttgtctatttagtttgtcttcttttcccttgtcttttccgtaattgcagatatttgggtatttgtagatgagaaagagaatatttattacacagacaagcataagtggaatctgtatttcaaacttaaaaatgccaaatttagacattcagaagaatcctattctgttcaactcttttagatattgcctgttcacaaagcacacatcattgttccataatgtaacctacttgtaaaattttcctgctgaaaacaaatactgtagggcctgtaaaccttaatatgaagtccttaagatcagatatgcattgggattgagaattgtttggatttaagaaaagcaaggcagtgcatataccaacatctctatagcagggtctgagacaacaacttacaattgaacacattaatatttctacagtaaaatatgaatatttatactgaagggagaaataaagactataagtagcctttagtcagtttgggctaggttatcccaccaaccacattttgacagcaacttaatgaaaaactttgttgggctgggcgaggtggctcatgcctgtaatcccagcactttgggaggccgaggcaggcggatcacctgaggtatggagttcaagaccagcctggcaaacatggcgaaaccccatctctacttaaaaatacaaaaattagcagggcgtggtggcgggcatctgtagtcccagctattcgggaggctgaggcttgaatctgggaggcagaggttgcaatgagccaagatcgcgccactgcactccagcctgggcaacagggcaagactccgtctcaaaaaaaaaaaaaaaacttgttataataatagcttttgggccaggcgcggtggctcacgtctgtaatcccagcactttgggaggccgaggcaggcagatcacaaggtcaggagttcaagaccagcctgaccaacatggtgaaaccccgtctctactaaatatacaaaaattagccgggcgtggtggcacatgcgtgtaatcccagctactcaggaggctgaggcagaagaatcgcttgaacccagaaggcggaggttgcagtgagctgagatcacaccactgcactccagcctgggagacaaagcgagactccatcttaaaaaaaattaaaaattaaaatagcttttggaatcttaggatttcagataagaggttgtggacctgtttttattatgtttttgggaatatggcaataaataagattgtctaatgggatatagaagcaaataatgtagttgccataaaatatgttaatagctataatagggaaaatgcaaagtgcatcacggggggcatggtacctgaagggatttggggagtgcagaagacttaatggggaatgtaacgtgggaattggttagttgagctttccatctagagtgtgaacagcagatgcaaagacttgataaacttggcgtggcttattggatgggatgaaaattgtccagtctgactagaattgatgtaagatgggaatggcaggagtttctgatcatgcagttctaataggccttgtgagagagactgaggcattggatgagccattgtagggttttgaacagataataccatctagaaagagcactgtggccacagtgtggaatgtattgcagtggagtaagatcccagagagtgttaaaatgatctatagacataagatcattgtgacctgtactggagaactggcagtgagggagatacaagtggacagatagatatatggtgctttttataagaagtggaatcagtggatttggtgatgggatattcagagaaggaggggacagggaagagatgtgaagaatgatgcccaaaattntaacatgaacaactgtgagtggatagtggtaccatttactgaggggaaacacaggaggagaaacatgtatgtatgggaagaaaggggtgagttcagtttgggtagattgagtttgagcctgtgtgacacccaaatggagatatacagtagaacagtaagtaatttgtcttgaaatgtttttgaatcatctgaatgaagatatctagaacattaaagccgtgagcgtgggctagatcatccagggaaatcagtgtgagaagatagcstggcatgggaacttggagaaacatcagtttttaagagacaaggaggagtcgcaaataagaacaaaaagaggtagaaagaaaatcaggaatccagggaggaagaagtggttatggtttgagaactgctccttagcttattactgtgaagaggggccaaaaccaaattggcatgagttgaggaatagaaaatgagaaagtagagagaccaaatgtaggtatctttttcaagaagtttggctgtagaggaaagaagagaggcaggcaatttataaaagagtttttgcttctcatttaatgtagttattttgttgttttcatcctccttacaaatgagggtygcagtgttggttagtccctttagactctccaggctgtagaaagtgttcgtcttctggtcgggcgtggtggctcataatcccagcactgtggaaggccaaggcgggcagatcatgaggtcaagatatcgagaccacccaggccaacatggtgaaaccccgtctctactaaaaatacaaaaattagctgggcatggtacgtgcctgtagtccagctactggggaggctcaggcaggagaattgcttgaacccgggaggcagaggttgcagtgagctgagatcatgctactgcactccatcctggcgagagagcgagactgtctcaaaaaagaaagaaagtgttcatcttccttacagtgagccggtgtgattggaatgtcatagtcatagtcactgttgaacaatgttaatacttatactcaatgggtgagttttcttttctagtaaaataattctctgaatgctaagtaaaagtgataaaattacaaatcaaaatttttctgatcataaaaattatagacaagatattttgtataactacttgttttattcatgaagcccttgccatcttaattttttcctcatatttttctccctctctttcttctccccttcactcctttttgttgtaggtgtggcagagaagacacagcttctgaaattgagtgtacctgctacttttatgcttgtgtctttagatgaaggtccaggtcctccaatcaaataccagtatgctgaattaggcaaattatactcagtagtgtcacagctgatccgctgttgcaatgtctcttcaagaatgcagtcttcaatcaatggtaaatttgaatgctccattctttacactagttttgtttgtttgtttgttttgagacagagttttgctgttgttgcccaggctggagtgcaatggcgtgatctcggctcactgtaacctccgcctccctggtttaagccattctcctgcctcagcctcccaagtagctgggattacaggtgcccaccaccacgcccggctaattttgtatttttagcagagacggggtttcgccatgttggtcatgctggtctcgaactcctgacctcaggtgatctgccgtcctcggcctcccaaagtgctgggattacaggtgtgagccaccatgcccagccctctttacggtagtttttaaatgctgctgggcatatatagtactaagagtctggaggaagatttttgctttggaatattttagccctgtaccttttttacgtgtttaatgggggtcttttttctgtctccttgtgactgaggttgataccatgtttatgaaatagtttaagaattaactttttaggctgggctcagtggctcatgcctgtaatccctatgctttgggggaggccaaggcaggagaakcacttgagctgaagagtttgagcctgggcaacatagcgagacttcatctctactaaaaattaacaacaaaaaagttggctgggtgtggtggtgtgcacctgttgtcccagctactcaggagactgaagtgggagaatcacttcagcccaggagatcaaggctgcagtgagctgtggtcaygccactgcactccagcctaggtgacacagtgagaccctgtgtccaaaaaaaaaattaactttttatatttagattttgtatttttatatcttggtatatctatctgatcattataatgcataatgttactttcttcgttgtgcttaggtaacttgatttaaaatgttatttctctaaaataaaacatttggccagacatagtggctcatgcctgtaatcctagcattttgggaggccgaggtgggtgggtcacttgaggtcaagagttcaagaccagcctggcaaacatggcaaaaccccgtctctacaaaaatacaaaaaaattagccaggcgtggtgacgtgcacctgtagtcccagctactcggaaggctgaggcaggagaatcacttgaacctgggaggtggcggttgcagtgagctgagatcgccccattgcactccagcctgggcgacagagcgagactccatcttaaaaaaaataaaaaaaaattataggctattttctatcgtgaaagttgtgtattattattgtgaagaagcttattagttttttattggtgacaaatctgtattctaggtaatcctcctcttcccaatccttttggtgatcctaatttatcacaacctataatgccaattcagcagaatgtggcagacattttatttgtgagaacaagttatgtgaagaaaatcattgaagactgcagtaattcagaggaaaccgtcaaattgcttcgtttttgctgctgggagaatcctcagttctcatctactgtcctcagtgaacttctctggcaggtaaaaggaaaataacatttgtatgtttataatttgatttgttattcctttcattaagttactcaccatgtcttacttgtttttaggttgcatattcctatacctatgaactgcggccctatttggatctgcttttgcaaatcttactgattgaggactcctggcaaactcacaggtggatactctttttgtgactggaaacaattaggcttgcccaggtgttagagttaactgaaattgacagtcaccacattttttttaacctattggagttctagtgaatgttttatcttaaacctaggacaagggtaaataacasgttctccccttttcctcagaattttatttccttttttattcttttttctcactgcctaagtttcatacttaataagcctgtttctttagaatgacttttttaattaaggaggagctagcttgggcatttggtaaatatttgaatttcattaatgatgcccgaggattattttatgattatattacatttgttttagaattagtcacttgaagcaacttagtcattagtcacatgaagtataatagtatatgtaaaaagtcttcaggtaagtacggtttccatttttcatggtacttatattctgtaaagtcaccacagacactgagttagcaaatactgaaccattactcctaggaggaaatacagaattaggtttctataagcctctgtttacatttttatcaaccagtcaatacataaccttgttgtatgtgtgtttctacttaaagtcatttaatatattttgttgactcataaagttcacagccaacagctctgtaacttaagcctgaacttaagcttctcaatgcattctgcataaggcacatcacagccttcttgtggttaggaacattagatagcacttcaacattatatacttgggtcattttaaacataaaaataaccagcaaaagcacaaatatgtggaaaatgtggcactaaatacaccatgaagaaggacacttgtttacagtttaagctgaaacaagagagaatgacactcttctggacttcagctaggaacgtttgtgttggacaacttgatatttttgctgctctgtatatgtccacagatgacgaagaaagcaccttgatgattgattttgcagttataaataaagtttaggaagtaagcgaattcacaaatgtggaattcatgaataatgaggggatcaattataattagtttttatgagaacttttagaatgttaacttttttcccccgtaaaaactaaggttatccagcttaactggccctcaaactttcactagaatttttctatttgtttttgggggtttttttgtagtaaaagttgaatatattatctttaatcccaagagttatataatagatgataaattatggtattagttgacagcactgccaggttttagaacttcccttcccacatggaagatagtataatagtttgtttgggaaaacaattcaaagtctatgtcgcagtttgcctcccatctgccaaggtaataaaacaaacttaaaaacaagttctgtaacaacaaaatgcttaaagagaagtaacaatctggagttttagtggggattgcgaaagccagaatttgcaacttagtattttcaaattatctccaaatttaccataatagatttcaaacaaatactgtaaaaatagcattaaaccaaaaatcaattttcgtgagacacaaaagatagtagctcagaattatagtcgtttattcaggcagtattcagtgcccttctaaatatgttcataggatttgaaagcttccttcagagtagattttaatgaaatctaacttttactattttcttttttaaaaatgctgtatttctgggcacagtggcttacccctgtaayaagcactttgggaggccaaggcaggagaattgcttgagaccaggagttcaaggccagcttgaccaacatagcaagatcttgcctctatttttttaaaaaagaaagtactgtaagcacttacagttttaaaccagttaatcacatcttagctcttgtttgattagagcaagtgataatggcaaagacatacgtgctagattaaatgtgggaattacacttttgtgtaatgagattagtaagatactgttaaatgaatcactggcccaaacgtgaaaataattttctcataatgagcttttagttcattcagtaaacaatgttcaaatatttatagagtgtctaccatgtgcccagcactgcttggcatcaggtaataaggcaagtgaagatagtattaataaaaatggcatttgagagcagttgatgctaatggggagaaaatatgatatggcagaaataatgatttagcacttcattgttacttgaaaaaactgaaggtaaaagcaatttatatgtagtgtttcagatgaaacagcaagagggcctgaacatggttgatttgtctgaaatgattaagctttgcaaaattgttgaagtaatctgttttgtttggaaatcatgaatgcatttgatggaggaaaaaaatcttactttgactttaaacatactgttaagtaaaatacatagtgtatattagaatctttaaattctcagtgtccaggttatgttttctaattgaggtaaaatttacataacaaaactcaccatttcaaagtatacaattcagtgacttttagtacattcacaatgttgtatagccattaccactatctgattccagaacttttttttttttgagagggagtctcactctgtcacccaggctggagtgcagtggcgcgatctcggctcactgcaagctccgcctcccgggttyacgccattctcctgtctcagcctcccgagtagctgggactacaggtgcccgccaccatgcctggctaattatttgtatttttagtagagacggggtttcaccgtgttagtcaggatggtctcgatctcctgacctcgtgatccgcccacctcggcctcccgaagtgctgggattacagatgtgagccaccgtgcccatcccagaacatttttttttattaccccaaaaggaaacccctacccaattaagcagtcactcaccattccttctaaccctggcaaccactaatctgttctctgtctctgtggatttgcctcttccagacatttggtaaaaacgaaatcatgcaatttgtgtgtctgacttctttcacttagcttaatgttttcagagtccatccatgttatagcatgtatcattactttatagctgaataatattttgttttatggatatatatacaccacattttatttactggcacataatctttttaacacaaaagaaacaaggcatgtttgtgcccctacaatcatgttttaagttagttagttcagggaaagacaggactagttggctttgtattattactctgttgtagtttgggagaaactgaaatgaaatcctgtgttattggcaaatcagccaaattgtactattgcctgtcaaaatgctttgcctgccatgtattctcattattagaattcaaatactgtacctccaaattatgtcactgaatcctaacttgccttcagagatgcagttttrtaaaaggtattgatgtgtagcaaattaccctcaactacagcagtcataaacttagttataacttttttaaagtttgcattactctcgagtgtcctgaattcacttcaggtaatgtgtttaaattacatatatggcagaattattttggactggtaataagttagtaagagcacagactctggagtcacactgctccgcagctatatgacctcggcaagctgtgtaactctgtgccaattttctcacctgttaaaagttttaataataaggccaggcgcagtggctcatgcctgtaatyccagcactttgggaggccgaggcaggcggatcacgaggtcaggagattgagaccatcctggctaacacggtgaaaccccgtctctactaaaaatacaaaaaattagctgggcrtggtggcacgtgcctgtagttgggctgaggcaggagagaggcgtgaacctgggaggcaggacttgaagtaagccgagatggcgccactgcactccagcccaggccgtctcaaaaaaaataaataaataaaaaataaaggtttaataatagtacctattgtctaatgttagattaaatgactaaaagacattattgagtggcacatagtaggcactcagtatatattagctattagattttagatgtttttattttatatctggttctctttcagaattcataatgcactgaaaggaattccagatgaccgagatgggctgtttgacacaatccagcgctctaagaatcactatcaaaaaagagcataccagtgtataaaatgtatggtagctctatttagtaactgtcctgttgcttaccaaatcctgcaggtgaggatttttttcttataattttgtagaaatcttaatcagaattaaggattctgttttaaaagaagagaatcatgagaacttggggttgtcattttaagttaactttgaagtattccaaatcctcttatctatatggttttattttcttttgcagggcaatggagatcttaaaagaaagtggacctgggcagtggaatggcttggagatgaacttgaaagaagaccatatactggcaatcctcagtacacttacaacaattggtctcccccagtgcaaagcaatgaaacgtccaatggttatttcttggagagatcacatagtgctaggatgacacttgcaaaagcttgtgaactctgtccagaggaggtaaaaaaagccaccagtgtgcagcagatagaaatggaagagagcaaagtaattctttattttataggccagtgtttatgtattaatgatattattaaaagattatgttgaagttttgggttttgaaaaatgtttattcggctgggcatggtggctcacgcctgtaatcccaacactttgggaggccgaggcaggcggatcacctgaggtcaggagttcaagaccagcctggccaacaaggtgaaatcccatctccactaaaaatagaaaaattagtcgggcgtggtggcaggcgcctgtaatctcagctacttgggaggctgaggctggagaatgacttgaacccaggaggcacagattgcagtgagcggagatcgtgccagtgggctccagcttgggtgacaagagtgaaactccatctcaaaaaaagaaaagaaaagaatgtttattctatgtcattttaagctaatgaagggagctttcttttggagaaatttctgtgaaattgcctgaaatgtagtagttctgagagaatgcaaatcaggttttttgttttgtttttttttttttgttttttccccaagttctttatctgcagtaaaagaaaagttgctaatgggtcagttttgtagatttttaaaatttatttcaaatagaaaaagttaaaagtaaacttgagtttgcctacgtaattttttatcttgaaatattcaaaattaggagccagatgaccaagatgctccagatgaacatgagtcgcctccacctgaagatgccccattgtacccccattcacctggatctcagtatcaacaggtaaacaggagtcagtttatgcttttatcccctagaactgggttttatgcttaattttagaggatggctcaattgtttgttgtgactacaaagtamgaagtaggattatctagactagctttgggagcatgatccagaagagggatggtttggagtgggggtcatggtgtaacatgtttgaacttaaccactgtagggttttccttgtcaagaaggtgtccttcttgtgctagtagttaataaaactgtatgagaatttatatcaacataaaatgatcattgtttagtgcaaaggattgtggtgacatttccggtgaggtaaaatcttcacctggattccaaaaacattattaagatatggcaatgaagtaagaagtccttggttacttagccacaggtttcagtgatggtaaaaatcactggaaaaaaaaggatttgggtagatttccataggtgattaaagtaaataaactagtaaatagcaaaagaaatgagatgaagaaacattctaaatgataactttttctttctgaaaccaaaatgtgactaaatcagctcttgkgaggcagtggtactcaaacttgcacaggcgtgagtctccctggaaggsttgctccagcagagagctagatgctaccctaaagtgtcttatttcataggtcttcaaggggctggaaaatgtacatttctagcaagttcccaagtgatgctgctggtggtccaggaaccatacttggagaaacatttcaggcattctttcttacatttcactgtgtacatagaagcaaactgaatagttaggaagtacacattcagcgtacttattttcatctatagaaagtaaagcctggccaggcgcggtagctcatgcctgtaatcccaacactttggaaggctgaggcaggtggatcacctgaggtcaggagtttgagaccagcctgaccaacatggagaagccctgtctctactaaaaatacaaaattagccgggtatggtggtggcgcatgcctgtaatcccagctactcaggaggctgaggcaagagaatctcttgaacccaggaggcagaggtggtggtgagtcgagatagcaccattgcactccagcctgggcaacaagagcgaaactcccatctcaaaaaaaaaaaaaaaaaagttaagcctaaaatcttggcttggctgatggagcatgtacagaaaaatgagagcactgtagggttcagacattttaaaaggttaaggaaccaaatccacaaggaaggttaacttcctttgaccctgagaaagctcttatgttaatcatgcctggttactttatcatcttgaacattgttctgtttttartcagcattattgtgagttcagggttactgctcctatatatcttacatcatggttagtcaatcggatttagcatgtggaagagtcaatagatgctcatagatcattctctgaaaattttttaccaagagcaacagtgggttaatcctttatttgccagacttgagtctaaataatttttggcactaaaaatcactttggccaaagatttatgtggacctacacaatcactgctcttattcagggttttggggtttgcatttacactacgtttttcaagcctttttttgtttttgtttttgtttttgtttttgttttgcactatagtagtccaagggtatttacagagtaagtcccaagaataagagtatacatttccagagacttcagaccatgattttgaagttgttttactatgtgaaaagttttaacatacagatcttttctcctttcccagaataaccatgtgcatggacagccatatacaggcccagcagcacatcacatgaacaaccctcagagaactggccaacgagcacaagaaaattatgaaggcagtgaagaagtatccccacctcaaaccaaggatcaatgaaatgcacataattaactggttccatcaagactgtgcacccaggccttacagtccaacctttttctgtgtctggctaatatttaaaactagaaaaactattcctaatcaacatggagtggagagtttattcactgtcttatctgcagaaatttgctgtcaatatrtaacccgcctgcagtggaaagtgtatagtgttttgtaataaatggcctgatgctaatgtgtaaatggcaaaggtgtatatagtatattaatgttgactgttaawtcttaagcaagaaacttttttcttgatgagactcacagatctacacaaactacaaaagttaattttcttgttacacccactgcactctgcaaccagtgttgcctgcctcatggcagttggatcagctcctttacaaaaaagaaaaaaaaaaaaccaacagcaacaaaacagagcccatccatgtcagccacaccaatagtttcatgttaattctttgccactggagtcaattttgctatgagcaatgtaaggctggtaacctttaaattatttggttgatgtggaaaattggtgatgtaacactgtttctagatttttttcattgcctttttattctgatattaggttaatcactttgaagctatagttatgctgtaacatttagcatggcttcacaccaagttagtgtagccaatgaggaaaaagttaccataatgacagcagttgtccgagaagtgacagctgtattactcagagcttttacttcttacacctagaatattaaaatataaaacaaggggagaaatgtgacagtctattttcagttgcacatatgttccttatatataatgtttgacagttcaatctctgggtggaataaagaacacttacgtatcagtaatgggaatttttaaagatttaaaacaaatatgcaaaaatttgctatgccaagatgctggagcataatataagactgtatttggtgtgcttgttttgtttctttggtagagtttattaggtgaatcttctaaaactttccttctgttggatcccagtgacgtggaagtcatcagaaccccacrgtacttggagtacctctctgcacmaagatagctggctgattttctgctcagtcacaattttacttgaaagcaagaattgtcctagctccttttccattattccaaaacgtttaacgttcaaagcagggtctcattaaaaaagaaactactggttgatataattgagatattacaatttcagaataaacatttgattaaaaataaggaaatcctcagttcatactgtatttaaaagagaattggtaacttgaatgtgtgtaattttttggaacctgtctaaaaaccaaatacccctgcaaacagatacagcccaccctattctatttaaatattttgctgttttattttatagaaattattttgctgaattcacaaatagaatttgatttaagaagaactttttgtcctgtggtgtgtttttggttttttttttggttactttttttgtcctttttttttttttttaaaagaggactgcatattaaaattcattctgtgcatagcatgcctaggcatgacactgattcaggatttcagtcacatcaagtttttgtgcacagaaagwtttgacctttggccctctactgaagattttgagaaatcaggatgttgacactgtaaaagtttcctaacataatcttgtactttttgtatgttttttatatacatgtatatttaatgagcacaagcttggttgtattttttacaattcagttaatagggaaatgttttgtcaaaaggctacacttggaactgaacaaagcagaaacaaaattgagcattgcattattttgtgattaaaaggggcaggtatttaagataaagctttgggtatcttatttgtagtactgtatagtcaacctgtgcttctaggtgttcctgtaggacattttgacaccgatactttgagtgaaagtcacacacggtgtttgcaattccaactgatttttgttttgtttttatttttttgttgttttcttctttgagatggagtcttgctctgtcacccaggctggagtgcagtggcacaatcttggctcactgcaacgtcgcctcctgggttcaagcgattcttccgcctcagcctcccgagtagctgggattagaggtgcccaccaccacgcccagctaatttttgtatttttgtagagacagggtttcaccacgttggccaggctggtcttgaactcctgacctcaggtgatctggccgcctcggcctcccaaagtgctgggattgcaggtgtgagccaccgcgcctggccccagttgatagtttttttaatttaaaagttcctcaattccaagctctttaaacgagtgaaataggttaactttatttggatgagttaggtgtaccatctcaccatctgagaggagatttatatatttcctgctgctccttaacaaaatatgtaatgtacttaaaaactttaacgacttcctagttgagagaaaacttgacatataaaaggctgtgaatttttctgcttggaggaagagcccaaccttggttgctttgaagttacaagcccccttgtgccaggtgaggggcttgtgagtcatttttgtctccatttgaggaagagtggtattcgttgtgactaggagcaagggaaagtggagttatttttgtttgtgcaaattattttctatatttaactcaagcattaatgtataaccagaaatttaaagatgcatgttgttgcaagagcaacataatggtgattttgaggtctttttctgaacacaagtggcacattttaaatttcaagtcttcaaagtgcctaaggattatttagttctccctcaactgattttttgagccatatatttcctattttaaatgtttgcggaatcgccagtcttcctttgaaagaaacagcccccagaattctaaatgacacgattatagaagacagtagaatgtgttaccataaagactgaagatattttagttgtaaaaccatgtgaacaagggcttttgccctattgtatctaagtatttcagtgcacaacttgttaaaccatgttgctgctgtttctaagccctccaccaactgaactttcatgtttagcattgtagaggcagaaataacatactaggttttttttttctttcattgatttttctcctggtgataatttcccagccttgtgtcttttagctgttgtgtatacaaatttagaattaaaatgttttctatttttttcatgattaacttagtgaataacttaaatccttaatcctcgtagtggttagaaagatgaggagacttttttgacttacatttgtaaatgaaaacaagtctgtgaatattcagatgactacttcgaagtaattcagtttttttattagtatttttccagcttatgttttcccatgagctattttactttgctgaattttgtgggtaatttggtggatatatcctgccttatttaggattatagctggataagaaaattgccttttcattgtaagtgcccagttttggtctctagtttgaaggtactacatactgccgataaaggaaaacactcccctacaccccagtttttgtgttaccaagaaaaaaaaaacagtattggtttcatagtaggactcaaccagaattggtcctacatatatgtgagtgttcagtttttgcaaataaggtttttgagtgtgataaaacactacagaagtgctaagtgtattgagaatttgctgctgattgtatttataacaattacttgacgtttgcagaaatttagcactttccctccaaatttataggtgtaagagaagcgggggcaaggtgcaccacattttaaaactgcaaatgtgtgaaaatttatttagagattcagattcctaaaaggaaatttcaccacccaagtcatgcacttcttagccttttacaagccaacagactgacatgaagattgttcacagttcctaagatttagcacatatacaaaaataaaactttataaattcaatttcggttttccctttatttattaatacaagatttctaaacaaggtagatgtgtaatagagctgaagggaattttttaaagggaaatgtttatgaggaattcagccatcattgtgtatatccaaagtggattcacacctaaggacctcaaagaaatgagttgtgatctaattgcagactttagagttaaaactaagattcagcaaactgtggtgtttcagttctcttaaactggaaataaagcagaccacatgttttgaggggagccacagaagtgaaagttaactctctagcaagttccatctgctgttttttagtgtctagaaatagctctttgttgtcatgtcccagggaaattaagatttcctcagaaacctggaggtgctttcctaaagttgggttacttcaagaactgctaaaagacaaatctcagattttcactggatttaatttcactgatttttttaaatagaaaactaatatttaacttttctgcaatttggaaaactccctccagttggattagactgtattttaagtatttttagctacatgagtacatctaactgaaaatctacatcaccaccaatattttgaattgtttcttgtaatctggtaacttagagataggcaaaaagttgacatctttatttttatctgtacctgaaagtttagatactcttactaaagttggggttacataaaacgtttcagtaactttagggaggtaaaatctcaagagaaatttcttaaattacaccaaaaaactttcctaaatagaacacgtttcagagccatttaaataaaggttgattattttaaggtcattctatttaaatggtcaaaactcaagagtaaaataggaatcattttagccatctgagaaaacaagtctcattctgatccattaacattagacaatatactgcatttcaacaaatccaagatgccattggttacaaggcgcctcagcaagcaaaatcactgactttcatggatattaaaacgtggggtatcccatctggtagtaatccttgtcatgacaaacgtcttttcacatctggaaataggtttttgtagtgggcttttctcacattgcttttttttccattagtggaacgaaccctattagaaaccctatttttatgtgtaattgctaacaaagctggccaatttacaagtttatgaagaaatggcttgatggaactgaacctttgaggagtcaccgaattattaatgaagtgccctgtgtaagcggtcttcttgagatagttttgtgtcgtagcttctggttttcacatgcattatagttaagacaccaagtggactttcttgctctgccagtatggttcagctgccctggactagtctctgcctgtcaaagcactccctatgttagaaaatgagtatagaggccaggcgtggtggctcacgcctgtaatcccaccagttggaaaggccgaagcgggtggatcacctgaggtcgggagttcgagaccagcctggccaacattgtgaaaccctgtctctactaaaaatacaaaaattagctgggtgtggtggcgcacgcctgtaatcccagctactcaggaggctgaggcacgagagtaacttgaaccagaggcagaggttgcagtgagccgagatggggccactgcactgtagcctgggcgacggagtgaaactctcaaaaaaaaaagaaactggcttctgtagccttcccagcactagccaaactcctcaaaggtaagcaagtgggggccaccttgcaagatagtaagaattgtgttcattttctatttatattcaaccctatagatgtgtttaaaaaacaaaatattccaaataggtactttggatattggaacatttttttccatggagtcctttttagcaattcagttgcatcaggaatagaaatgtattcttaacagtgttgctgctgtgtctcttaaatcacttgccattaattatcttatgttctcatctaattcttcccccacccattaaaacattggtacacctttggagttcagaagtaaggatgattttggctgggtcttaattcccatgctgctgggaccagagagaagaaaggatatgcttcatggaggttcagaattgcattcccttctgacccaccaactactgcctgcacgatagctgttaacaagaggaagcatttgcaggatgtcaaggaaatgagtcaacatttagggcacatggtatgttgagggaaagtccttcagaatccattttcctcaggtgtctatatgtttaggatgtggcccttatttcttgatgtaaactagtgttttctgctgggtgattaaggaaacaactttttcaggctgtgtttaaaatcagtcagaaacctagatgggactgcttaaatttggtaagttagtaccattaagttgggtttttgttttgttttgttttgtttttgagacaaagtctagctctgtcagcagtggcgcaatctcggctcagtgcaagctccacctcccagggtcacgccattctcctgcctcagcctcccgagtagctgggactacgggcacccgccaacgtgcccagctaatgtttttgtgtttttagtagagacggggggtttcactgtgttagccaggatggtctcgatctcccgaccttgtgatctgcccacctcggcctcccaaagtgctgggattacaggcgtgagccaccgcgcccggctaagttggttttaaataagctcttaggttgtagttagccttttctattgctccaagattggattttttagttttcattttattttattatttgttttttgagacggagcctcgctctgtcgcccaggctggagtgcagtggcgtgatctcagcgcactgcaacctccacatcctgggttcaagagattctcctgcctcagcctcccgagtagctgggattacaggcgtgtgccaccatgcccggctaatttttgtatttttagtagagacagggtttcgccatgttggccaggctggtctcgaactcctgacctcaggtgatctgcccaccttatcctctcaaagtgctgcgattagaggcgtgagccactgcacccaatccaagatcagaatttttatctaacagaaaaacaaaaaacaaaaattcagacttgcactaaaatggtagcaggtttgccttactaatggccactgaagcttggtttaataacttagtaacgttaagtgctagataaactggatgttgggttgttgtttagcacttatcagcacagcgttagacactgatattagcaggcctggcgcggtggctcacgtctataatcccaacactttgggaggccgaggcgggtggatcacctgagatcaggagttctagaccagcctgatcaacatggtgaaaccgggtctctactaaaaatacaaaaataattagccgggcatggtggcgggcacctctaatcccagttactctggaggctgaggcaggagaattgcttgaaccggggaggcggaggttgcagtgggccgagatggcgccgttgcacttcagcctgggcaacaagagcaaagttccatctcaaaagaaaaaaaaaaaaaggaagaaagtccataaaccccacccatgttcaaggggaggggcatctcacattggccgggcacggtggctcacgcctgtaatcccagcactttgggaggccgaggcgggcggattacctgaggtcaggagttcgagaccagcctgactaacatggagaaaccccatctctactaaaaatacaaaattagccgggtgtggtggtgcatgcctgcaatcccagctactcgggaggctgaagcagga

SEQ ID NO: 9920 - DNA, 20183 bp, Homo sapiens
tgaggaagagcactgctggcaaacataaagagagaaacatggtgtcccctcaaggtacaaaaaggtcagaatggctgcagtgtgtgtggaaagctgggagaggcaggtaggggctagagtgtgtgggctgtgatgcttaggytgtggctatggggtcatgtcaaagaaagtgggtcttgtgctaaggaccacaggcagccaaggaaggaggctggaagagaaaaaacataaaccaggtacgcctgtcccagctactggagaggctgaggcaggaggatcgcttgaggccaggagttggagaaacatcctttgtgctgcattcctcaatttgtcctcccctagcttctcagagtccttgggaggctggctaggtgagaatagtgataatgctctttgcagatttagaaactgagacccagtgagatcatgacttgccygaggtcacacagctgttgtatacayatggcaagactggaacccaagtctcactccagagcccctaaaactagggaggtagatagattctctccttcactcactcatttgttcattcattcaatatactgtacctgtctacaaccataccaccctgaatgcacccgatcttgtcaatatactataccttattctccgccagaaactcttcttaaaaaggatttcagcaacaaattagaccaaggaaatagatgagaccaggctatacagtctgggctttcttctgtcarcaacagggagaggatggcttctgagaaggcagattgcccctccccactgaggtaccccctgtsccccagggcagggagggtcattgttctcatttcagggagcattctgccacaggcagcagtttcttagaagcaaattggtgttgagtaaacctctaccttctgccatcatttgttctctccagcccacagtatctggaactcttggggaacaaggaagcagatttcctagtggcagaaagaacactccacccactgtagctgcaatccccctgcactgtgagctaagtgagagcagggagctctcctgttcaccctggatcctcactgagcctagcacagtgcctggccataggaggtgctcaattaagattggtagaatgaatgaatatttaaagagagagaaagggaaatatgaggaaacttatgtccaagatctgaaggccactctgtgacctcaatgaagaggagttggccatatacttgaatcctttcctacttattcagggtctcaaagggccttggcttactcaaatatcccggggaaaagaactggaaggaggaaaggagaaaggagttactattccttcaatattagtgcacggtaggctttccatttgttatctcttttaatygtcctaacaaccctgagaagttgatggccttcctctatttgggagaaaacaagactcagaagggggaaagggagcttgttctaggtctctagctagtaaatgcaggcctggagtttagaatcagggctctttccaaagacactgcatctgaagatgtcagaggcattctaaccagagtgactccatcttgaatagaggctggataaaatgaagctgagacctggctgggatgcattcccacaaggtgaaacattcttagtcacaaaatgtttacagttaagagttaagggaacaggttaataatttactaaacagacatttctttacttctctaataaacttgcttttactttattctgcggatttgccccgaattctttcttgtgtgagatgcaagaactctctcttggggtctggattgggacccctttctggtaacaaagaccccatggaccaagggcataaaaagaagggatgtctaagacttgctggttctatggcaggcagaggcagaaagagccccaccatcattcccagcaaatgggaaaagttcccagttgcagatattaggggtgggatggggcgggggtagtcagcawccatagacttagaccctgaagaggcaaaaaaggagggccatgttcttgggtcagcagagcttctactcagcttcttcagcctctagctctttcctggtgctagtagcacattctctagtggaggcatccagatggcagggagggtccaggaaacagctgaacatgctgagcaggcctcccttgtccccgctccccatggccccatggatcatccggtgctgcagctcatctcattggctggcttctggttactcatctctcctcttctccatcttcccagcctgtggttgccgtggaaacatagaacagtgacctcaccataggatgagggctggggagatgctgttcttggcaggcgctggtcttgctgcctgccagatgttatatccacatctggatctgccaagggcaagacagaggagtacaaaaagggacagggctcacattcttccccaaatgtagtcagcataacagaggaagaggatgcaggtagatcagagggatgaggagagaactgtacatacttagaagggagaagggtgtaaaccaggaggaaaggagatggggtgtggcttatgggttaacctcggtgacccaggtctgagcaccatggcgaggtgagggaagggcagtgagggtagttggtctgaggtttgtcgagtagagctcctcaaagccccgtgctgctcaatttggacaggcccaagagagggagcaaatggattttctggcagtgaccccaccccaacccattytgaaaaacctctatagcccctttttcagttgaagccctttctaatcctgtcccagaaataataaaactgaggattaaagaagcaaagcaatctscctcaggtaactaactcagtaggtagtggcagagctcagactaggtcttaggtgtctgcactatccctggagacaataacaatagcagcaggaggagcagcagcagtgaactttcgtaagtcaaccatgcttagcatttaaatgtattatctcgggccaggtgtcgtggctcacacctgtagtctcagcactttggaagccgaggcaagcagattgcttgaggccaggagtccaacaccagcctgggcaacacggcaaaaccctgtctctaccaaaaaaatgcacaaaaaattagccaggcgtggtgccatgcgcctgtagtcctaactactcaggaggctgaggtgggaggatcccttgagtctgggaggtcaagaatgccatgagctgagatcatgccactgcactccagcctgagtgacagagtgagactctctccaaataaataaataggccaggcgtggtggctcatgcctgtaatcccagcactttgggaggccraggcaggcggatcacttgaggtcaggagttcaaggccagcctggccaatatggtgaaaccccgtctctactaaaaatataaaaattagcctggcgcggtggcccgcgcctatagtcccagctacttgggaggctgaggcaggagaatcacttgaacctgggaggctgaggcaggagaatcacttgaacctgggaggcagaggttgcagtgagctgagataacaccattgcactccagcctgggtgacagagtgcaagactccatctccaaaaaaaaatcccttcattttaaagatgaaactgaagctggcgtggtggctcatgcctgtaatcccagaactttaggaggtccaggtgggcagatcacctgaggtcaggagtttaagaccagcctggccaacatggcgaaaccccgtctctactaaaaatacaaaaattatccagatgtggtggcagttgcctgtaatcccagctacttgggaggctgaggcaggagaattgcttgaacccaggaggtggaggttgcagtgagccaagatcacaccactgcacttcagcctgggcaacgagactccttctcaaaaaaaaaaaaaaaaaaatggagactcagaatggcttaagtgaattgcccaaggccacacagctagtacccaacaaaattcagatcagaacgcagatctgccagcagccattagcccagccccagctctccatcattgcattacaagggccacataaggagtcagttctagttcctggccacacagtcctygagaggaggccctatgtgtgagggctgcgaccttgagtcagaaatcatcttttccccctcctcctctcctggcacctgttccaacagtgagatcaccaaggctccatgcccagccctgaagcctgtccctatagctttggcagaaatgagcctctgagtcttctggcaactggaccgtccaaaggaatcaagatcttagggtggggagagggctcttcytccctggccttgttctcagaacagtccagggaagggaggcagggtttgcacatggagaaacagagtcccaggaaggagggcctgccatactctacgcacgtggcaggcctctgggctcctgtgttggctcctgcaggcccaccctggacaggctgctgctggctgaaattcagttcggcactactccttggtgtgcagggcctcctgccatccctcagaaattcatttatacctcacttcctttgagaagtctacattgggccctcaggtcaggacaggacaggactccctttagaggmaccacgctagttttatgtctggctgcccagaggtgaatgtgtgtcttgttccctgttgtctctctccaaagcagggcctggcacaaagtaggtgctttattaactgctgaattaatgagtgagctcctcagagcttcaacttgttcacctttttaaaaagagaaaataatacagtaacacctacttcatggattttgctttaaaagtccaatgaggccaggtgtggtggcgtgtgcctatagtcccagctgctggggaggctaaggtaggaggatcccctgagccccggagtttgaggctgcagtgagctatgatggcgtcacagtactccagcctgggagacacagcgagagactttgtctctaaaaaataataataaaataaaaagttcaatgaaacaatacacccaaagccctcagcatgcaataaatagcaagacaaggcaggtcttatttttactgaaagtgcttagtaaactatacagtgacaaaccaccgcacaacaggctctcgaaaggaggcagcaaattacccaaaagtgcaggcggcttgctagtgtgcacaggccaaagaaagggcggcaggtggggaaggcagccatgggccttgaagagctgaccgaattggcagaatttctgcaggaggggagctgggaacgacctgagctaaagctcggagctgtgcgaagaaaccggaaaagcccagagcacttgcaggggcgggtggggagctagatggtggggtggggtggggacggaggagggccagcaggagacattccgcagggaggggcaagcacgtgtgaggcgggcggggcgcgaagggtcaggcttttgctcaaaacaggcagaggacaaggtcagctcagccgcagaccgagccgctggtgactgtctccgccaccaggcagtgagagtgaagggagagcgcgagctctgaagcccgctagactaagcttgcaatctgagctccattcaccccctcctatttcttgagaccttgtcagttcccctgtgagcctcggactcctcacttgtaaaacgaggacagatgcccgtgccagaagtcaaccagagctttccccggcgtgggcaccagcccaagggcgttttgcttttctagtctcatctctgctctgacgctaagctcaaagagggactgggggacgggaagatatccaccatggcatgcgccctagctctcgggctggtgtyggctgcttccttctcagattccagagtgcctagaggccaggaaagggagaaggtcctaccagcctggggtagggactcgggggccaggcactggcgctgacgcaggctagcagggcgccactggctggtccccacccacctcggtgggttgggggatgggcgcaccagcccctcctgggtgagccctagcctggggcttcctatttcgggagccgggggcgtgggccacgtctcctcatgtgatgcgagggctatttaaagcggcagcccgggcagggagccgccgtcggagcccttgcacgcctgctctcttgtagcttctctcagcctagcccagcatcrctatggtggacgctttcctgggcacctggaagctagtggacagcaagaatttcgatgactacatgaagtcactcggtgagcaagccgcggggctcaggatgttggcttggggactggctggtggcgtgcctakccccacgcagcactcctgccgcatccctcctggttaagactgggsaataggggagcgcggagatggcagcctggcctagagcaggtggggcctgttcagagggggctttggtggtccaaatctggttagagaccacggtagggaggtggtggaaggaggcagctgtgtgggaggctctttccaggaagagggatatgtgatttggaggtaggaggagggtttggataaagaacactgatcacaggaaagggagtgtagccaggggagaaaaagaacaggggcatgggtagtttagaaattggaggagactgaacccagaaagggaatggggcagccagggagtgtacaatgatgtaaacaagtaggaaatacctaggaggaaaaagattagtggggaaaaaactgtggatcagtgaatcagatatgagaaggacgtaagacaggaacctgcagtaagcagcaatccccatctctgcttggttagggaagagaattcttgctggagaatgccctttctcaccagccagtctgaccttgtcctgcagtctatgtatccaggccttcatcactgtctgtgagcctcgtggtagggtggggcaagaggcccatgatcagctgggcctttcctgcaacccaaggctcacctatctgtgcgaggggtaggcagagaaagccattggacttctgatgtgcagtagagggtcccaaggcaaggtcaagacctgggagggaggatcactggtttaggaggatgtggagaactgctgtggtgttgggatggagaagaatcaggattcaaagaatctcacaggtgaggaacttggagattcccataccatctagttcaacagggaaactgaaaccaggagagtagaaatgtattataacaattccacagcagagccaatatgaaaatctaaggtttctagatctgtaacccagagctcttcccactaccctacaggccctgcgagtgggaagaaaagtagaaactgcttagctaatgattgacctcagcccttcttctactgctttgggcttagatggagaggtcaaagctctcaayggcctctaccctatcttgggcgctatgcccagtaattctaggcaggcagtcattcttagaggagcagcccccagcccccacgaacacagcccagcagctattgggaagttggaatgcccagatttagttcctccttccaaagctgggccagagctgagtcttgaattgagctgcaacaactttaccattcttgttcccttattctgccccgagttgggtcagcgggctggtctccctgaagtcctgttatctttcagcagcttatgttaaggcagccagcattctcatcgtaggaatggaaagcctgggaaaataccctcctcagctctcagtaagtagtgctggcttcatttctaagtagaacccagatctccctgagtctcctaaattctgtcagctcaatattcttagtttctcttggttcagaccctcactcatcccgcagtggtttccttttcaaacactccatacctctgggtagatcctaagtgaacagagctcccagtgccgtgacaaggtcctgctctgtgcaagggagtgtgattggcctgactcatcctgataccaaggggcaatgccaagttcctcactggccaagcaagggtgggctgacagcataacagcagaggcagcccctgcccctcctgctgtagacctagggctctcaaggggcaaagaggtcccgtctagtaccagtgaccacaggcacaactgctggcctggattgagtatgtgctggacagaatcgcccagtgaaaatagtcawcagttttggagccgaggttcaaatctatgtcagtagtttattctctttgaatttcgacaagacacttcgcactcttcattgtaaactggggataatctacgcttcgaggctgttacaagcattaagtaaaacaacccatgtagggcatgtgcagagtacctagcttccagcaagcactatgtagccaggtacatttggagactttacacacaccacctcactacactgggctgcctcctgcctcacctttgccttggaagacagttcaatgttaagctgctggggggagagggggcagtcatgattagttctttgttctttacttggttgcaggacacttaggactttgcccagtacccaaggaagccatgcttgggtcaggaagagagtctctgtaaagccttagactgggagtcaggagacgggtttgagtctaactcattgttgctaccgctttaggctcctcctgaatctgcacaataggacaaatacttcctttgtacctaactcctagatcatagataacaggctttgaaaatgatgggttgccatgtataagggacaagagcactaacacttcttagtttcagggtaaaaacttccaaagttggaaaactcctatgcctaaggctttggaagggaaagtctatgtttctcttctttcctcagccttattcctaaggctttgagagcttttcaggtgccctggaaggcagccttatgctccagccttgggaggtagtatagctgagcacttaagcaagctctggactcagacaattctgggcttcaatctcagatttgtgacccygggctttacctctgtttttgtatctgtaacgtggaaacagtcttcagaagaacaggaagaactaaatgagataacatgtacagttcttactacacaaaaagctcatagtacttaatagtagctttttttttttttttttgagrtggaatctcactctgttggctaggctggagtgcagtggcacaatctcgactcactgcaacctccacctcctaggttcaagmaattctcagcctcagcctcctgagtagctgggattacaggcacataccaccacatctggctaattttttgtakttttagtagagacgggtttcaccatattggccaggctggtcttaaactcctggcctcatgtgatccgcctgccttggcctcccaaagtgtgattacaggcgtgagccaccacacttggcccaatagtagcttattctaatcccwgctctgccactgacttgctatggcactgctgttccttaagtatctctcatctaatgggatcagttatctgtgttcaccaaacagaactaagcgcaagactgaattttaaaattcccatgcaaaggctttgaaagatacagtcctccacttccccatacccaggcctgagagttattcattgagtttcttgtacactgcttctctaccccagctcatatactcataaccttccccctaccctcaggtgtgggttttgctaccaggcaggtggccagcatgaccaagcctaccacaatcatcgaaaagaatggggacattctcaccctaaraacacacagcaccttcaagaacacagagatcagctttaagttgggggtggagttcgatgagacaacagcagatgacaggaaggtcaaggtaagtcagggaaacaggggtggggaatggagagtgctgagactctaaaagagaataggctggtagtcttggctccctrgtattgcaccctgaggggcagactatcatggggaatttaaatgaaacaagattcataaagcctgtgtagtgctggaatgccactgatgctaaatacatgtcagttctgtcctcttgttttcttccctcccttcttgggattcatctattgtctgcctcggaatgggcagcacagagccaggatgttcttctgacctcagtatctactccagctccagctgggtgaccctgtgcaaggtatgcagtagctctaggtttctttccccttccatagatggcagagttatgtggccatggctgtgacctgaagtgctttaggaatgatgcccagaagtcagggccctccactgagtgaggtcattgtgacctccagcagcaaaaaaggcagccaggaactagaagcacctactcagatgccgcttcaacttctaactcccagacatggccaatgaccctgacaaactatttccagtgttgccagctgacaggcaggaagagctatgttccgtgatagggcattcaccttgtcatgaaygtgtttgcagtgtcttcccaccaagccttagcccctcctcccagggttctatcaccctgcagtggctgtcttggcagcttgcctcagccttccaggccaggcatgggagcgagagaacttaagggctttgacctctatagggtgtccctatagcagtgttctatcatgacactatcattcagccccatcagctgtttcctcttcctcatagctgtccccagaaagaacaggatcacacaggtggctggcagcagagctggggatggtgcccaaagatggcagtctaccttggataaaggtggctgccccaccacctgctcatacctccttggacttgcctactttctcaaggggcaagaaccccaattaaacacaatagccctgtggaatgcctagggcaaaaatatctactctgagtaggcaaaaaaaactaggggaatgagaacaaggagtaaggtaaggataaaaaagagcacactaagagacaggcctcataccccttatcacctaaacaatacacagaaccttctcagattctcctactgaaccaccttgctcatcaggatcccttagcctggccttgtggcccccaaactcctaggaaagagagctggaagagctgccaaatgagaaccagctgatgtatgtatgctggcagcacccagagctgaggaaccacttcaagggcatccagtcacaggactttgtggttgctgccctcttgttggctaaagaggtcacatgatgtggaccaagaaaaggtgtaggaatacagggcaggaagtctaattatccaatacttcctatcactaagggtcttttagacattatgtggactaaccacaaggctggataaagattctcaggactactcctcctcctcagtcagtctttcccagggatagactagtaaatcccacctgtatctgaggggaccaggctacgggaatcacctagagtacagataagtgtctgtcttgaaggcttgtggtacttctcagagccaggctctctggctccaccatactgcctgcctctccctccttgcctaatatctgaaggcctcttccccagaaaggcagtagtggagcagaggctggaggtgaactagatgtcttgcagggatagctgggaggcggattgcctgagctcttgtcctcacaccatcactagtttgggtcaaaggctgtgtsctctgtggcccagtgtccagaccccaccctgcccctcaattcctgactaagatcacagctcaggcctctaccctctttccacagtccattgtgacactggatggagggaaacttgttcacctgcagaaatgggacgggcaagagaccacacttgtgcgggagctaattgatggaaaactcatcctggtaagatgggcaactttggagctatatctgattggttattactactgctctttcagccaagcctgttctaaaaagccaagtcctcccctgagagctgtagaagctgggacaagagagtggttgtgggtcagggtggtatcaggtgggaattttctgtgtagtggctttggactcacacaggccggaactcaaatcttaccttataggctacatgactgtgggcaaatcaccttttccaagtgcaactgtaaaacgggtattaataataccaaccttgtagggctgctgggaagcctgtaagagacagtgtatgcacagcacaaagcatcactgattgaggaacacagcaggtgctccatgtcctttgtttgctcttcctgtgtttctaccttgcctcmcctcaggaagaagtagaaaacagggccaaatctgatcccaggccctctaggaggggctcccattgcctatctcagcattccctttcctctcctccctaggactgcattgtcacttgcagggacaggctcgtgactggtggggacactgaatgacagtacagtcctttcttccccattctagtcctaccccattttcatgctttctatgtctggcctactgaaactacttgactactgcttgggtaggaagtaccacagccaggctggcagatctgttcaagcttggggacttcacttggagaatctagccttgactgaattccccccagacccagggagagcagccaactgtggattctgcctaaccacagggcctcaggttttcacctaggcatcttcactgcacaccttcttgggtcagcataacctgttaactgcattcttgtactcatgtgggacaggggtccccttgaagtttggaatgaggtgcctagctttggtggggatgtgatatgcaggaccaaattctcagtggcagctgaactatggtgaggccatgggtctggctctatgatgccagaccggatagtgggaggtacagggctctggccctggcactactctaagttagggaaggattggagttagtasccaaacacagtcctttcctgagtctctggatatttttcctatttgtcaactataygccaggcaccatcttagacactaaggatgaaggaagccaaatggtataagggaaggaaaaacactcaggatcttgaccaaattacttcctctctaaaggctcgttttttccaaatctctaaaataagaattacaatgcctrtcttaaggatttgctgtgcatatcagaaaaaaaaaattatgtatgtatacacacacacacacacacacacacacatacatacatatagccggcacatagtaggtactcaagtgacaattatcaggaggaagggagggtagaatgctcgcaatggtgttcctggctccaccccccatctcactctgtctttccttccagacactcacccacggcactgcagtttgcactcgcacttaygagaaagaggcatgacctgactgcactgttgctgactactactctgccaatcggctacccctcgactcagcaccacattgcctcatttcttcctctgcattttgtacaaatccacgaattcttctggggtcaggtgccactgaccgggatccagttccagttcccatggtgtatgtggtttttttttttttttttttaactgcactcatagggtgctctgaggtcaataaagcaragccaaggccacccagttgcctttttgcctttggtaacataactctgggagtcttggtttatcctgtgtgtcaragagtgggcagaaataacggcctgaaggttactgaggaagaagcactggatgggagactgaaatggacagtctcggagcctgttaatcagctgatcaccttacacatttaataataaaagagctgtacctacacgttgcctttacactgccccccctccatggtcaaatgacctagttcagtcagtgatggggcttccccaggtttggctattgaactgtcacttcaggcccatcctacactgaaagctcttgggtctggctgttctctgtgaaatgctgtagtctctccctttccagaattcaggttcagggcacagaacccaggcttgtaccatggtggtgggagaaaatgaccactggccaagaggactgctgacctgtgcaccaggctagtacttatgactacaaattcttactgcttctctaatcaactctgagggaagagggcatctgatcattacaaaagggagggcttataagtgatctcccaagaaggcagtgatctgctagtgcctttggctctgtacctctgctgggcatctctccaaggtctaaggtaacatattaaatgtttttgtcagctaatgcaggctcagtgactttaagtctrtaagttacccaggaagaaggattataggaaaaataactcagtaagtttaaaaccaaacacatttccatttagtgacaggaatttaagcaaggacctgaagtagaatcaactgattcacacagtagtaaatacaaagtagaacaatgatcttggcttcgctgtctggttcagtggtctgctggaatgcaatacacaagttaagtcacactgcagactgttttctagctgtggccgctggatgccacttctagcatagtagaactatgttaggaggaatgggaaaagtgagcaccacttctcaccatgttcccccctcctgctgccagtctctgctcccatgttggatgcagcagagatcacccaccagttggcccaggacagaccaataggaagggtccaatcactctaactacagccgaactcacctccacaacagtctctgtggctctagcctggactcctttacaggaatccagctctggcagtggcagctggagagggtaataggrcctcctgctgaatgaaggaagttgggtgaatgaatgggtgagctgcagggttcacttgcaaagggaccaggagtgataaggaaacaacaactcattcaggcagctgcttttgacctctaactcmcaaacctgcctgttgcatgagsggaagccatctcccatgggagcgaagttaatggggtgggaggctatattctcactattgagtctttccaggagtctcaaggcacraggctcctggtttcttactctcaaccaccccctacactctttatactctcactccttgtgcttcttcttgkgcttcttcttctttttcttcttctttgctgccttgctgtcttttgatgtgtgccttgccctcttgcctgtatcactctcagagtctgagctgtcagagtcagatgacttcctatctctatgtttctttttcttcttctcctgaaaagaaaattttaaaaatcaacactgtatgtgtatatttgcttttaacaatcatagcacataattggccaggtgcagtggctcacacctgtaatcctagtactttgggaagccgaggtgggaggaatgcttgaggccaggagttcaagatcaacctggctaacatagcaagatctcatctctaaaaagagaaaaaaagaaaaattatagcacacaatcaataggggaccacttaattttcttttagacagtctcgctctgttgcccaggctagagtgcagtgcagtggcacgatcacagctcactgcaacctcaacctcttgggctcaagcaatcctcccacctcagcctcccaagtagctgggaccacaggtatgcaccaccacaccctgctaatttttatggagttgggtttctccatgttgcccaggctggcctcaaactcctaagctcaagcaatctgcccaccttggcctcccgaagtgctgtgattacaggtgtgagacaccatgtccagccaacacttaataaagtataagacattgtggccaggtgcggtggctcacgcctgtaatcccagcactttgggaggccgaggcaggtggatcacgaggtcaggagatcgagaccatcctggctaacatggtgaaaccccgtctctwctaaaaatacaaaatattagccaggcgtggtggcaggtgcttgtagtcccagctactcgggaggctgagacaggagaatggtgtgaacccaggaggcggagcttgcagtgagctaagattgtgccactgcactccagccttggcgacagagcgagactccgtctcaaaaaaaaaaaaaaaaaaagtataagacattgcaaacaataaagtaaatctttaagtgccaacaagaaaaaaatagctaaaacatgttaagtaaaagaaccaagacataatatgtattgtaggttccagtgcgtataacatatacatktgtatttatatatatatgcacatgatataaactgtgtatgttacacayacttgtgtatatttagtatacacagagaacactgaaaaggatacatcaaactggtaataagtgttacacattgggaatgaactgaatgggggaaaggatatgggtctttcactttttccttcaaatacttctgtctaatttgattttttttaaacaagtatcttattactttcattttttaaagtgcaggacattaaagctgaaaggcgcccctaaagactagccagtctatctagaaacagtgactcacatatycaaggtcaaagaataggagtaaaagatttagaactcctgactgctattctggtttctattagatcctggtrccaggggaaataactgccatcaaataataagcctgtacttgctacccttgaatattcatcatctctaactttacagccacctcacaagattatactcataaagaaaagagctgagaaagaacattcccaaaactatacccaccacatcatgctaccaaagtaacagtacaaacccatacaaaagacgagaggcagattcccaggtgtctaatggggcagtatgagcagattttaagcacggcataaatctcttctttgaatttcaaatacctatattgcctctgtaaggtttctaagaagagggagaaagtatgggaggagaaagagagcagaaaaggatgccagcttccaaccagcagcctcagagctataaatctagctgaatgatacaccaggtcttagaagctggctgtgaaaaatggtggaaagaacactgaagcaggtgttagatagacctggacctgagttctggctctgccatttactattctgcatccgtgggcaagtcatctgaactcactgaggcctgttcccttcaaatgtaaactggrgataagaataacatctactggctgggcgcggtggctcatgcctgtaatcccagcactctgggaggccaaggcaggtggatcatgaggtcaggagatcgagaccatcctggccaacatggtgaaaccctgtctctactaaaaatacaaaaattggccgggtgtggttacgcgggcctgtagtcccagctactcaggaagctgaggtgggaggatcgcttgagcccaagagctggaagttgcagtgagccataatcctgccactgcactccaggctgggcaactgagcaagaccctgtctcaaaataaataaatraataaataaataaataaataaataaataatctccccctctccccaaaaaaaacacctatggtgacaagttaatgagatagtatctaaggcttggacaagttgaaagccacttgtcccagatcgcataggcgcagttgggatcttcatgtagatcatatgaatggaaatctcctgagttttcctatgtagcacatggcccctctttctgtatggtaacaggaggcctcatggtatggtcattagaacaacaaattttggaataagatagaattaagttcaaattctagctctgcaacttaactcactatgtgacttagaacaagggatttaacttttttgaacctcagttttcttttcagtaaactggaaataataagtacctatttcaaaggatgctatgaggtttaaacaagataagcactaactatagtgcctgacacattataggcacttagtgggagctatatgtatttttctctcattaactccyaggatgttctgacagcctggccaagcatctacaggagacaagtcaaagttttaagrgaagatgaaataacaattcttccttggcatctccaatggagtagagagaaggcaacaaagcttctcagacccacattaccgagctataacaaccatggctgggaggagctgagagttggcaaatcaatagtttagctatgttgctgaaccttcctggatggcaagaccatggaagtccatcacaagatattatggggtcaggagcctcactgggttctgccccttatataggtgaatatcctgggaaagtaaaaatgaaaatacagagtctggcaccagttccctgcaagcctggtccagcctggataaagaagtgaggagagtaataatactgccttacacctaaacagtgctttagtttatcaagctttttgcatccttatcttacaataatagtctgtagagtcaaamttcatgagttattattcccattttacagatggaaaaactgcaactcagaaatgtaaagtgagtcgaccaaggctaaagcggcaaaaccactatactttataacacagagtttggcactatttccactttgttctctctcaaagatgaaggctcaggaggagggaagataaaaacaaatcactggagagtcctggcatgcyggaacatggactctagctagcaagaagggctcaaggaggtggccttctcctagacctcaactttgatgcaaaagctgttttgcagcctgaacaaagacaatccaatcctccagcaaatggcgtcattttccctacgtgtctagccttgagctacagaacaaaagaacaatcacatccgaagttgtagttcgcctggttgcggtggctcacgcctgtgatcccagcactttgggaggccaaggtgggtggatcacctgaggtcaggaggtcgagactagcctgaccaacatgaagaaaccccatctctactaaaaatacaaaattagctgggcgtggtggcacatgcctgtaatcccagctactcgggaggctgaggcaggagaatcgcttgagcgtgggaggcggaggttttggtgagccaagatcgcgccactgcactccagcctgggcaacaagagcraaactctgtctcaaaacaaaacaaaacaaaacacgcacacacaaaaacaaaattagccgggcgtggtggcacatgcctgtaatcccagctactcgggaggctgaggcaggagaattgcttgaacccggaggcagaggttggggtcagccaagattgtgccattgcactccagcctgggcaacaagatggaaactccgtctcaaaaaaaaaaaaaaggttgtagttcaaaagcaaagttgggagttggggtgggggaagactgagagccagaagatgaaccaagcttctgctctctcaacttcattcaagtgagaagggaaacagaagataatgggttaaaaaaaaatgacatggattcaagtatcagatggaaatagaaaattaaacataaaacagtttttaaatggcataggagtgtgagcccatggcgcaggtcaagggggcactggaaggaagccactggtcaaacatctcaaagactgctctctaggaaaagcacatatcccttgttagagcagctagtstacccattttcactatagttctgaaacaggatagcagcagcccagtgtgacagaaaaacaaaaataaaagcaaaaactgaaaaaagagaatatagcagtgaacatttattgagtacttaattttctattttatttatttacttatttttaggatggagtcttgctttgtcactcaggctggagtgcagtggtgtgatctcggctcactrgagcatctggctcctgggttcaggcaattctccttgaatcgcttgtagtcccaagtagctgggactacaggcgcatgccaccacacccagctaagttttgtatttttttttaactagagtcggggtttcaccatattagccaggctggtctcaaactcctgacctcaagtgatccacctgcctcatcctcccaaagtgctgggattacaggcatgagccaccacacccagccagtacttaattttctaaaggcaggtggatctcttgagcctaggagttcaagaccagcctggaaaacatagtgagaccctgtctctacaaaaacaaacaaacaaaattaccagtaacctccacgtggccaaatctagtggtcaattattgggtcttatttacttggtcagtcaagatggatacagaccatcttacctagaacacattcatggtatttctaccacattttacattctcttacttttctacaaactt

SEQ ID NO: 9921 - DNA, 34251 bp, Homo sapiens
aggacatttgcagtttttatgtgatgatctagttaaatccatttgatttcttccccctgttctgccttctcttactgtccattcctcttctggtagaaagagttgactgcctgtgtacaggtggcagagttgttttctgttcatcagagtcagtagtagtaaaattcagttgctggattagccaagtgtgctctgaattctgacctcttcaatacaataacattttgcatgactaagtctgtacagtttgttccaaaacattaccctgcaaagcagtctgcaaagcagcttgatccatgcttggacagccatccccagcttggtcctccaggtttgtggacaaggatctgggacactgagggcttgtagagagtagatatggattggattaagcacaaatggcaaccctagactacacaggaaagtcgtagtcggccacaccttgggcttcctatgacagcagcatatcagtgctaacgagccagggcttgcaagccaaggcacaccaatgcatttgcaaactccagagtcaccataagaaagtcatttattccaacgcttgtagagagaggctgcttgtctctaacagtatatgtgcagtgttgaaagtaaatctttagataagttaaatttaaccaaatttaattgagcgaagaatgacttgtcaatagggcagctctcagaaccagcagaagttgagagaactctgctccccgatatgggctgacagcaaatgaacagaaaatggaagtgaggtacagagacagcttggttggttacagctaggtgtttgctttatttgagcatggtctgatcagttggtaacctataaytgattggaggtttgctgctgtgttttactgctgaggctcagctattagctacaaaaatatattaaattagctttcagtcagttcataccaagttaggttgcatgcagttcattacatagggactcaaggtatggagtcagcctcagatcaagtttagattaattaaacagtggagagagggcagatgtcagtttcagaatcatggctgattggaaaatgttttccctttctggactttttgggtagggagacctttccttctcagatcctccaaaaggccttcctatctccaccaacaacaactccaagaaatgtctttttatttttaaatacatgctcagagaatacagagaatccaaaagaaggaattaaaaaaaagtaacaaactaagacatagtcattgtcactactttggtatatgttaatgctatctaacagaagtagaaggtgaatgacaaatatgagtcatatatttaattaaaaaatttaatgtagccaggtgcagtgctcttgcccataatcccagcactttgggaggccaagacgggaggactrcttgagcctaggaggtcaagaccaacctgagcaacatagtgagaamccccagctctacaaaacaaaaatactgtactcccattaaaaaaggtttaaaaaggtgaaattaatgttaataatactttaaacttgatatatattattttatcatacaatcaacttaaaaattattattattattattatttytgagacggagtcttgctgttgttggcccgggctagagtgcaatggcatgatcttggctcatggcaacctctgcctcccgggttccagcaattctcctgcctcrgcctcccgagtagctgagtttacaggcacctgccaccatgccyggctaatttttgtattttttattagagacagggtttcaccatgttggctaggctggtctcgaactcctgacctcaggtgatccacccacctcggcctcccaaagtgctgggattacagctgtgagccaccgtgcccagcaacttaaaaattattaataggatattttacattctttcatactatctttgttttttattattttattttattttagagacagggtcacccaggtcggagtatactggtgtgatgatagctcactgcagctcggacctctcaggcttaagcaatcctccagcctcggcctcccaagtagctaggacaacagatgtgcaccaccatgctgggctaattgttttgttttttgtagagacagggtctatatgttgtccggcctctttcatattgtctttgagacccagagtgtattttgcatgtacagcacatcccgccatgtttccaactgaggtgctcaatagctgtggctggcgcctattgtactgaccagcacagatggatattgttgtgaatctttaccccaaatttggttcagatgctataccaaaggagggcacacccaggctttctgagcagcttgcccaggtgtgggtgtggtgcagagaggtaagagagagaggcaaggcttaaaagctgtccacagttacacatcaaaaaaaaggagtcagactctatatatacattatattaatatttatatctatctatctatccatccctatatcagacctcaaggaaatatattcaaaactacatgttgaaaaaattaagcagagagaagtagatgggaaggtactaaaaatgcaagacttagcaaaagaaggctgtatatatayagcaaaaggggacacacaacaacccctcccactagcaaatgcagcccaatcattgcccctaaaacagaaccttgcacttgcttctcctttcctgaaatgcgcctcctgccccaaggcacacagcttctccctcacttctttctgttctctgttcaaatctcaccacacctacctcttctgaggggctttccttgttcatgctatctaaattagaggttcctctgcccctgtgattcttaatgttactgcaaagcagctaccacttaaagaatttgtagtctatctcccctgaataaactggaagctcaaaacgggggagttcaggtctgttttgtctgctggtttggccccagaatttagaaaagaggccggcacacagtagattctcagtaaaatagtgttgagtgaatggttgcttaggagaaggaaacagggagggtacttggaaaaaaggagcaagaaggccaccattggtgagaataagtgttttataaaacacaggttatggttttccttctttaagaaaagtagttttgttttcaagtgccaagaataacattaggctactaaggatttctggactgctttggggtttgttttaatgaatagatggaaattacatctatttagcattaatttttatgtgtaagtgggtacacccgaattgaataaaagcagttctcttgaataattaaaacatcctcttcaccctgcaaagcatttagcacactcctctcccaaaaattctattaatggcaactaaaatcataaggtttaaatgcaaaataaagaaggcatttttctttatggtggcacagaagtgaatacctcaaaaccgggcagacccgagagtcagataccaagggttctgtggagtcaacatgatggtctctgataacatcaaaagttaggaatgttttactaaaaagaatataggaagaataaagaattcttgtttacagtagaattcaaactaataaacatagaaagaaggatagaaatagaaaatcaccattaggcgaaattactgttgcttgcaagcaagtatcatctacgtatgacaaaatctgttggtagaagtatgatgagaaaaagggtactaacatagtcttaaagggtctctccacaagatatattaattccaaaagaaaaaaagagtactacaggggagaacactggtggacagacacaacctaaacaaagtgatcaaagttaatttcaccagtactgagagacattgatttcatgcccctcctgaygagattcactgagaagggcacagtattactgctgtaggatgcttgacaaaaatgtagaacccaaatttaatcatgaagaaacatgagacaaatgtcacttgagggacattttacaaaataactgctcctagctcttcaaatgtgtcaaggtaatgcrtggttaaggaagaccaaggaaccttcccagacttgaggtgattatagggcatgaaactaaattcagtgttgtgtcttagattgtatcctggacgaggaaaagcacattggtggaaaaattagcaaaatttgaataaggtctatctattaggtagtagtattgatcaatgttaattttactgttttggataactataccaagtttatgttaacattagagaaacccggtgatagtaatatgggacttctgtgaactattttggccatatttttctaattctgaaattaattcagaatgaaaagttgaaaagaaagtatctttagttggcaatcttctgggaatttgaacaggaactgccaaaatgggagtcaggagacccaggctcaagtttgagccctggcattaatcctggtgtttgggcacggcaccaaactctgtccttctgttttgtcatctataaaactgtgttctgcagaatttaggagtgttgagaagaggccttagggctctcagtggtgaataggggacagggaatgagtgggtgtgaggctccagccagagcagctctgcttttgcctactttatatataggacttcataaaaaactaacttttaattatgcaaaaaatatatattttccttgtaagaaattagaacgttgcagatgcaactaaagcccctttggccaccatactccccaattcctgtgtatcttggaattgcatttaagatttccatttgaacaaagggaccctggctcaaacaagttgggggaccattgggctggttaacccttaaacaccccaaacactcaataaagaggagtttcagggaaatggacaagccatggctggaggatgttctacaaggttgagcagaaacccatgcaataatttgctgaaatagggcattgctctgagtgctgtgattccagggagatgtcactgctgtgtgctggctgtatgcccagcaaagggctggtggctggaaggacatagctttctgagttaggactggaaggcttctgtacatgtccaaagtcaaccttcatattcatgrggagggaaaaagaagtgggctttaggattgcctctccttgttggcctgctctgagaaaaacaatcgcgggagggtgaggcgggagaatcgcttgagcccaggagtttgaggctgcaggttagaagctgccgtgagctttgattgtgccactgcactccagcctgggcgatggagcactgggtcctgtgagccttgactcatttaacccccacagcacccagtagatggtggcactattagcatacttgttttagaggtgaggacacacacacaaagagataaggaattgcctaagagcaaaaagctggtaagtggtgagcccaggtgtgagccttgcttcaggatcaagtgcgcacccctgtgctctggactccttccaggtgttgtttctcttgctggcattttaacttcattacacctatctgtatgttggtcgtgggaaggaggaagctcaccgaacactgtggcttacccaagatttgtccctcgactttccctcttcaccaaaccccagagccactggmggaatgttcagttccttggaatcccacatgcccgggttagctccttttgcaagcagcctgatggatagaagtgaagggatggtgctccttatgaaaggagacgggggagcttagtgagcagcggcagggccctgcagcccgtcacacgctagcatccaccgggttgagtggctgcgcacgaccgcggcgggcgggcgggcgcgctgccggaacgctctaggcctcctgcggaacccaggcctgcgtgaaggtaaatgcaaatcagctccgcccagcgcttcccgcagaaggagggttttctgtgtgcgcgtctggtttcctccgccttcagccagaatgctggctttatttttgcggtttatgagcttgagacagggaattcatttccttggtataatatgaccctctggagaaagtcttgtccagatatattttgctcccaaacgccgccctagaagaaggactacactgaaatgaaacggagatgattaaagtctgatttataggtaaggtgaattggtaggattatgccaaattcattacatccagagaaggtgaaagggaatgaaagggctcctcccgggagatggaaacctttgtaaaaataaatatttatggtgcacatacctttaactcagctagtagccaggttatattttattatattcaccaccatttcccttttctgtttctcaccaggctgtacaagccctgaaagcaagaacggggttcacggcatcttgatacccccatgtggggacgttttggcgattttatttacaagaaagggattttacaccggagaggcttttaaatatgctaacagactggaccagctttctcatccccactggctgattaatgattcctccatgccaacccggttctcagagacaccaaggccaggtaaaaaccaccccttcatcccctaaaccttgcaagaagcacagggtccagaattatgcttctttcaggttctaaatagcacaataaaaytaataacaataagcttttagttattagatcaggtacattttactttacagtaagcttttacttattggatcaggtacattttaaagcaatttttgaacattrtttcatttgatcctcacaaccacactatgaggtaggtactatcattccatttgaaggatgagaaaactgaggctcgaagatgttaaataacttgttcaagatcacagctagtcagtggacatagctgccattcactgagtgcttcctgtgagccaggcacggtgaccatcacattaaaccaattatttatttcatgcaatagtgcccttgatccttaggaagtggcctccagtgcttagaattccaagcatttggtcctctggagatgagaaaccatgggaaggcaggggctcactcacccctgtatccaaaaagttgaggatggtgccaaggacagagacggtaccagggactccaaaaatactgaatgaaaggacagtagaggtgctttcctgtgggatccccaatctctccccgccttcaggtgagtcctgctgatgctcaggctgcccttggaacagggaccttggccayagtttccttatctgtaataatgggatgagaattcctcctgcacagggttgttagggacctcgtgaggcagcttctatggctgcctttggtgcttagttttctcactttcttcttgaacatgggagtggggagacggactcctaagggtatgacacttgaagatttcaggagggggcctgcaggtttatgtcctcacttgttttacacctcacagaggtcagcgaagcagggtatcaccaaagccccacctgatgtctctggaaatcgagtactccgtgtcttcaccaggcccatgccagctgtgaggggcagaaccaggttttctgacaccaaaccccaggtttcttcctgtgctggcatgggtcctttttctgacttggccagcagcctctcatagatgggggtctgattaaatagytctggtgatgggtggagtgatggttgcacaacaatatgaatgtatttaatgccactgaactgtacacctgaaaatggttaaaatgttacattttatgttatgaatatttcaccacaataaaaaaaagaaacaaatatggatctgtctctctcacatgtcaagaaatctggggtaggtagatacagtggttggttcagctgctccatgatgccatgaggatctggagtctggcttttttcttttcttttctttttctttttctttcttttttttttttttgagacaaagtctcactctgttgcccaggctggagtgcaattgtgtgatctctgcttactgcaaactctgcctcctaagttcaagtgattctcctgcctcagcctcccaagtagctgggattataggagtgtaccaccatgcccagctaatgtttgtacttttttggtagagacggggtttcaccatgttgaccaggctggtcttgaactcctgaccttaggtgatctgcccacctcagtctcccaaagtgctgggattacaggcatgagccacagcgcctagcctgaagtctctagcttgagtttttgcatgatggctttcatactgggcacaaggtgtcctctgaagcttctcgagatttttttctgctcaagagaggaggatggaaggaaagggtgatgctagacatggctctgtctttcatcagaaaagccaaagcttctcagcaaccctcccagcagaattttcttatatctcattggccagaactcagtgttttggctttgctgggcaacaaaggtggctgaaaaagtggtcgctaaacttaccaacatttagagctgaagagggcatcggggagaaaacagttgggaatgagtattgattggaaaaccagcaggctgtttccaacaccctgctcaaggtcacaagtctgttatgtaaccatagttgggactggagtctgctcctctgattcccagtcctaagatctttggcttagacatttagtacattttgtagtggstagatttacaataaaaaggacagtcctggagactatctttaaagaagaaaaactctgcattgcatgcactgaaattaatcgaatgctaagagrtcatgtcgcaaaagcactgggcatggtgggagccagaacatctcacctctgccccaggctggccagaaatytggggaaaggtcccagttctcagtgcttatgaaatgtgattagttatttattttttaaaaatctggttagtgttgttcattaaatgtccgttaagtactttggtaactgcagatgaaagaccctgtagggggacaaacacttgttattaacaaccrtatgctgtcaagtgtgggcttataacacgggaccatatgctccaaaggttggcaaagaatgacrgaagccacccaccattcctccaggccaggagcagagtggcatagggctccaggggacactgaaaatcaggaatgtaaacaaacacccctattataattaccctgccattgcaaggaagcctgaatgtgcacacttggatttttgggatagcaggaaattggactgcattccctctgatcccaccatctcctccttccatgggaagcaccaaggggaatttgcaggccctgcccattctttagcccaaagttggcaccctctcttctctgatgagtcttcctggatggtgctgggttacacagatccttctttttcattctcaccccaggctaccatatatcctgaacattttagcgtgtaatgatagtgaagttaacttttcatcctgccttataagcagtgttaggagtgggcactgtttgggagacacaatgcaaggctttttgaaacttcccaaccctgagggctagcacatgtccatatatacggcaaactctcaataaatactagagctggacctaagagctgagatgtccatggctgtaccaggttagagttttatttcatgattcttgggataccagtagagtcgattccaggatagagggtggaataagtgagagcttcyacccctaaaaaaggcacaatgcagttcagtgcccttgcaaaggatccttccttgtcagattacagggacatcccctgagctcaggaagacactgactttggaaatactataaggggaaagagcaactctgcaaaatttggaatgggatcacttcaagaaagggcaatgcttaaatgataggggaaaaaatgcacccctggtagacttgcaagcagagtactcaaatcagctgagaatgcccaaaatatgattacaaagaagagtttttattagttcagcctcagaatgcaaaaataaataaataaataaacaaacaggaaacaaatgtaatcactttacagagcgcacatacattacttaaaagtagcaccttcatggagccatattttctggtcataattgtgtatcaggttcattcatgctaatgagaaagggattccagattttctttgcatctgtctgcttctcacakggctgttaagaagccacctgccattctgacaatttcatgtccttagccataactacttgtcctctctcttgaatcttaagatctttttgccttccagacacttacggtgtttctgtgtcatcctcctgtgtcttttagagaggtgggggtgaggactgccatggaagctaaagctgaattttaatttcaatcatttttttttttgagacagggtctcattctgtcacctaggctggtatgcagtggcacaatcacggctcaccatagccttgacctcctgggctcaagagatcctcctgcctcatcctcctgaacagctgggaccacaagcatgagccaccacgcctggctaattttaaattttttttgtagagacggggtcttgttatgtttcccaggctggtcaatcatttttttctagcccttttaaaattcaggcatccaaagattaaacttgcttagaagtgtaagtggccctaaattgctttatcaacaccatctccaggaagtcttcacagacatgggaactagcatcttgttctcctggatcttctcaacaggtttgcattgtcagrtttccatgtaagtatctcttgcgttcccatccatcacaagtgtatgatggcactggtatcagaacactgcattcttcctgattgtcataaaactgatgtacttgcagccttgcttgaaaagttgtcagtacaaataaaattaaattcacattttgcataatagggactgatcctgatggatcaggtcataagagtatgaaacattccatacatcctggcagacaaacgttaaataacagtaatatactaataaatacataaattacttaaatatttaaatagcatgaaggcccakggcaacttgagagctggaaaatctatacataaattakctgattgtttcaatgagcatttagcatckaactatacaaatacagcaaagatatcattgtgatcctaaaaaaacgttttaaagcaaatcagatagaaattatctttttgggtctattccgttgtgtctttaaacattttgcttaatatcttccacttttcctccaaattttcatcctggatcagaayctggaagagaatgccaaaagttgatgtggggtgacattgtaacagcaatgtctcttcttatttctcacaacatatgatcctgggcaactgggtttcagggatttcatgccagaaggcccaggccttccttatgtggcctggaatttggctggcaccatgcttgccagaggctttcttgagggttttcttaaaataatatctgattgtgttacttccttgctgaaaacccttcagtgggtttcagggcccggggcccccagaacaagattctgagtcctgcaagcttgcaagtcckccatgctctgcctcctggctacctctctcttttctttgcctttctctttaggaggccagaaccccggtctgttttctttcctgcaatatccctgtggccagcacagtgtcctacataacaaaggcaccaaataaatatctgttagtgaataaatgtatgtttctgattctggcaactgggtgctggccactccatccccctttcctctccaacacagcccccaatcatatccctgcatccaggtgcactgagagtgcaggcctgggstggcctttgagggcctgctcacctaactgcagggcacagatgcccattcgctccaagatgagctatagtagcggtcctgggcccgcacgctaatgctggcatttttgcggcagatgamcgtggctgaggtcttgtccgtgaagactctatctttctgcaaaagagaaggaaagctrtgaagaccccttggcaacatagtcacagggtaagctgagcctgtttytgcaatgcatactctcccaaaacaagcccatcttggtcttagggcactgtgcttgcaattcacaggggtgtgcatagaacttgcaccacctactggcagacactccacatgtaggtgcagcttttgtactttgtaagcccttgagggagaaatcgtttggcccagctttcatctttctagcacaattgccttgcctcaagaccccatggccactcacccagtcctgagctgatggtgagagagagacagatttgctctagccatccctgagatwttgagaaataccatatcctgatcatttcatcagaaaacttgccttcaaattctrgcactgctacttaatagctgtgtaacttcaggaaaatgtcttaggttctctgtgtctgtttcctcacttataaatagggataacaataatgcctacttcatagaattatagttcaaggtaaaaatcacgtyaaactcttagcaagtctttagcmcawaggaagyactcaatatcacctattagtcatacagatcttaaatagggaaagtacttgccaagatgtaaaataatatttaggtaaatatctattccaggatagcctccctacctaattattttcccagagagtaactagctcactgaatttctaccacatgctaaatgctatgctgaattagggctttgtccagtgattttaaaagtggggtgaaaggagtctggggcggtacaaaagggcctctggaaccttgcaacaggcaaaggaattctgctgtaaggygaggaagctgggaagccaatatcttagcctctataagtgtagacattctgtttagtaaaataattttataatatctggaacagccaggagctatccattttgggggcgatatctcttgcctgttctatcattcattacatgcactcagttgaaacaacaattttaggcttctggagcccaggtctcctctatcaggactaattctgagtgccaagatcaatgaccaacatcagaggtagtggagtggttaggtgcatggcctttctgtctggcagattgagtttatgtcttsgttatgtcatttcctagctgggtgaccttggtaaagtcacttaacctctctgagtcttcaatcacttgtgaaatgatgataatactactggctaccarccatccttttcttggggttgggctactgtccaatgagcacgtagtgagggcagtgctgctaacacctacacaaaattcctgcatcagctacagctttactttaccttgccacagtttctggaaaaaaggaaagcctcttttccacaaaaaagggggtaaaaaaacaagaataacatcagctacctttgttgcgttaattttgtagattaagtgaaataaacatggaaaacccttggcacagctctagacacatagaaaagtgctaagaaaagtaattatgcatcacataataacatttcagtcaaagaaggatcacatatatgaccagtggtcctatattgttataatattgtatttttgctatatcttttctgtttagatatacaaaccattgtgttgtaattgcctacagtattcagtacaggaacatgctgtacaggtttgcagcctaggagcaataggctataccataaagcctagaagcgtagtaggctataccatctaggtttgtgtgggtacaccatatatgtttgcacaatgatatagctgcctaaagatgaatttctcagaatgtatccctgttgttaagtgatacatggatgtcattgttattatcatcattcatcttctcactttatggtgggcctcygtaaaactgaccaaggaatatactgcacctgaatcacttcttaccttttctctcttgctcttgccctggacctgaacgcagaatgtcagggagaagtaggaatgtggagtactccaggtgtcagggtactcccagctgacctccacctgccgagaattctttaatggcttcagctgcaagttcttgggtgggtcaggtttgactgtggaagaggataaacatgctttattttcctaataaggctttggagttcagtggttttggcttatgatctcacttgcacctttgatcagctgtgagtccactggatagttacttaasttctgtgagcacctggctggcaaatgtgaggcacctctgccgcaggtgctcacgctggtgcctcgggaaggcagtcattatcaatggccacatctcagatccacatgtattgcaggatctgagagatgctcagaatcctcatcactgaacaatcagatgggaccgcacagtgagaagacctctgctttaatggytatgggccatgcattgaaggaccaccctgtctgtgctaatccctcactttgcactgaacatggaactaagctgagcctctscctggggatgaratgatagattttctatttactgccctttcttttgtcttttcatagcttttggtgcggacatgtcttggagcagttacagtcaattgtctctatgctcaatttgcttgtttattccatgaatactgagcrcccattatgttccagccactggactgtgcatgaaggatacagcagtgagtttcacaaagactccttcctcaattaggtcttctagataagaggaggcagagacatgctagggtgtgtggttgggctctgtaggcctggcactgctccacacaaagatcayggctcctagcaggtgcttcgcacatatgcttccctctgctcttaacacaactgacatctttccttttggtgtcagctaaatgtcacctcctcagagaggccttccttggccaccctatgtgaactagaccccacccaccaagtacaaaccctccataagttttgaagcaagttctctggttctattacactttatcatgctgcctggtcaatgmataaatagtaaaggaaatgacttatggtgaaatccctatctgccaattaaaaaaaaagatgtccattttggaagggtttatattctaagaaagaagtcccttttcaaatgctaaggaaggattggttgggaataattgccattagtaaggaagccctggttctgaatatgaatattatgcttgattaggctctgggattcatcatggaaactatctggcagctgaatcaaagtgcagtaaagagcagctgtagtggagtggatctggatttgaacggctagctgtaagatctgagatctggggcaagttgcttaacttttctaagactcaatttcctcttccttaaartgcagataacagtatctacatcgtattttgtttttggatgcagaataaaagagatgatgcttgtcaaccacctaccccacagtgcatggggcattgtgaacacgtgacaaatagtatctttccttatggagcacatataatcatccaaaactcactgatgtccctgatgaagaagctgctggtgtagttttcatacttgagcttgtgaacggcatccaccatgacctcaatgggcagactctcctcagcagctgggcaggcactgtcctcctggcactccactgagtactcatactccttgttgtcccytctgactctctctgcagagagtgtagcagctccgcacgtcaccccttgggggtcagaagagctgaagtsaaagacagaaattagcctgtgttacacmttggggagagagttcctagtgattgtagccagtaaggcaggtaaggcctcaactgttgtctgaggacacagtttctccaactgggctgatttctacccagagggtaagaaactgccctccccaggagaaaaagcttaaattcaagagcacttacatgtctctggactaaatgaatatggaagtttttgtttgttttagatctagaatctctgattattaaacccccttgttaaaaacttaaattcattttttcccattttaattataaaatcaatacacaaatcagtacacactaattataaaagtaaagatgataaagatccatataaaggaaagaagtgtatgtctccttcatccttaactgctctccacaggtttaagtactaataatagcttgttgtatccttccagaccttcctttttctttttctttctctctctctctctctttttttttttaagagacagggttttgctctgccacccaggctggagtgaagtggtggaatcagaccccactgtagcctcaaactcctaggctcaagtgatcccctccctctgcctcccaagtagctgggactacaggtgtgtgccaccacacccacctaatttttttatttttaatattttctgagatggggtctcactgtgttgcctaggctggtcttgaactcctggcctcaagcaatcattctgtctcagcctcccaaagagttaggatttcaggtgtgagccactgtgcctggccagaactttttcaatgaatattcaagataattgtatacacattttatatatatatatatatatayacacacacacacacacacatatgtatacacacattatatatataatccatgttatatacatctctacattatatatatccactatatatattttacttatacatatagattttatttttatgaactaggatcaaattgtatacatatgattatgtaaccatccttttcccctctgaacatattatggggagctctccatgacaaaacatatgggttgggttatccacttcaatgactgcacattaagcaagagtatagtgtaccatgttttatttaaccattcctctgctgattatgtctttwtgcacttggagaaacatttctttagtaagcattttccttttaaagatgaaaaagtgagaccccaatgcttaatttactcagtgaaataatggtaaagtcaggatgatcacctggggtttgcttcggtgatgattaaagtaagccacatgggggttaacacataggtcttgtatttatggaagttgctttcttacggaaagtccaggtgcattggaccaacagcgaacttcagattagtggtgtcagcagaagtaaaaggagttgaggtggccctgggaaaatttcgggaggcctcatcgagttttggagtctgcttcagggcccctaagatctacgccctggagctcttgtttttatttttgactcaaggtgcaatttcagcaagtcatttgtagctttgaattctccktttatccctttctttggtgctatgaggcttcaggaagcatggccaggcaatttggatgagtgggttcaaacacagcagagactattctcagttcccaataatatcctgccccaacacatacatttattcaagcaatcggctaaaatctccatgttctttcttcaatgtagacaaggaagggcggttgaaaaaacacgggtttgactttgcttttcccattatcattaactgataggtcactgagaggttgcccttaatttcttaatgaaatagttctagaaaaatgctgagaaaccagagcagtttcactcaccctctgctgcttttgacactgaatgtcaaatcagtactgattgtcgtcagccaccagcaggtgaaacgtccagaataattcttggcctcgcatcttagaaaggtcttatttttgggttctggatttgaaaaaaacaaaaattcaatatttaggagttttttgcagaaaggttttgattgtgatgaatcacagatcaccagatggtacagggtgaagttcttccatgcgttgcctcttgggtagctccataaggattgggagtatcccagtggggtgttgattctgcagagtacactacacacctaacatgcctggcagaggcattcattttttgaaggctatcaccccagtgcagagtgatacactatcggttaatttccattagccattaaataatatcaccattatttaaagaaaacatgaggctaagcattcagactgatcatgaaactcccttaatatgagattttgatggttgataacccaaagggtccaggaaagcaaaggaaaatggaggttaacatcaattaacatcaataagagacttgatgttaattcattacactcaccatgacttggcttttcaatttgttgttgttgttgtttttaacycttatgagcgaaagagaaaattgatactatccaagggtatagaattacctttctggtcctttaaaatatcagtggaccaaattccatcttcctttttgtgaagcagcaggagcgaatggcttagaacctcgcctcctttgtgacaggtgtactggccagcatctccaaactctttgacttggatggtcagggttttgccagagcctaagacctcactgctctggtccaaggtccaggtgataccatcttcttcaggggtgtcacaggtgaggaccaccatttctccaggggcatccggataccaatccaattctaygacataaactggaatgcacataaagtggagaaccaggctgtaagctccaggaactctgggactgtgttttattaacccttcgggcatccccattgcctaaacacaaccttgtttacaacaagtatttggcaaatgcttgctgagatgatctcaaggcatgagaccctgcttgggctcaaggtcatggaaaagagaaacaaagagttttatagcwgccatcgactcattgactggaaggctgcctttaayagtaacctttgattatttagcagattggaaacaccttaatataccaaaaactgcaaacagcmcaagactctttgccaaaggtctgggggagagaaacttccagcacaatttcagtttcatagagaatacggcagggcacaatattcagcagagtaacatagtggttaaaagctcagggtgtcgagaacaaygaaccaagactgkcatcctgkctccactaaccagctgggggatttggaacaaggtatttcattatcatgagcctcagtttcctcatctgtaaaatgataataataacagtatctgccttacatttgactgaggattaaatgaaaaaaaaaaaaagcacgtaaagtacttagcacagtgtctgccacacagtaaattcggtgttagttatygttacttrtagacygaggagtcagccaactgtacagagaaactctcttaacaattttccatggatatttaaggatttcgttccctctgttttaaatcaccagtggagattttcattctctctgcattattattattattattattwtttttagctatcttacactcttatgaagcagtccagtagagcttagtcttcccatttaatgaagaagcgtactgaggccaacgatctaagcatggtcacagcaagtcagaagtayaagggctayagctcagaccttttgtctcttgggctttgcaagggatgcctaatgctagtgtctaaactggcctttgaggaatggcttagtatagtatttcagagtgtgtcatagcaaagcttcattcatttttttaatccatgcataaattattaattgaatagaattgtttaatgtagtagttcccaaagcatgatcgatgaaacaccatcagcagcatcaccttggaatagatmagaaatgcaaattctcagctgctgaatcagaaaccttgggatggatttagttatatggttcttaagctctccagatggtgctgatgcctgctcaagtttatgagtcacagtggttgagagcctgcattttggagtggcagaggcctggatttagaagcagctctagcccttgctccagtcttgtggcctttggcaagacattcaactactgtaagcctcagtgtcatcatctttaaaatgagaaaaatattagcccttgctttagaaggtggatatgtggattatataagctcatacacagtgcccttacatgctttataaatggtggttctcgttattggcctctggatgtaaagcattgtagaatataaagttttcactttacatcaattggattataaggactgaatggataacaaaaataagaggtcaaaagcatttggggtccaactctggggaaatgattagctgtgctgatgtaaaaccatgtggcacttttggctttttcttggttttttttttgtccccctgacacctgaagagcatggttactttcctgtcccaactgaggctcggaagccctagaagatgtttgctcaacagcagggaaaacagctgcaggaggaaagctgaagaggagcatcaagaacctggcacttagcytcactgyatcgtctgccctcctaagtcacacctcrgagagtttctcacactgattttctggaatttctgtggtttaccaaatcagaagtcactaaggggtcaaatatgccaggaccaaggttcctgagctygctaacaatcccagggttggaagggatctgccatatacccctggctcaggcctttgcctttacttaagagagtgtctaaatctctcaaattctcatggagaaggggtggctggattctgtcttcctaaaattcttgagaagagaggagtggtcccagatttctttcaggtacccatttcaagatggtactttctagaatatcaaaagattatttctgatcatcagctgaaatattttcatccttaatttatgtccatttcctcttattcagctctccaaagacctgggaaaaaattacttcatgtccttgtaaaaacgttttcacaaatttaagtgcaccagctttgaagcaagacagaattgggatcaagtccctgttccacccttaccaggtatgtgacattgggcaagttacttaatctctctggcctcagtttccaacatctgtaaaatgggatacagacagtctctacttcatatggctcttgtgagaattaagtgagacagtgcactcaataaacattaactattattattatacaattaaagatagtaatcgccaacattatgatgttggcttcagtgataaaaatctgagggtctttcaggtacagccaacggtcagaatgcacatttactgagtgtgagatactagaaggatgggcagaactccttattttaccattaactattctattagtctactawtaatttttactgatcattgggataataaaaagtatctcttgaatcatgaaagatattttaaacaaccaaaatagtaatactagctgacatttactttcactttactatctgtcgagttgtattctgcattcattaacccactaaataacccacgtggtaggcatccactttgtaacatccagtttacagttgaggaaattcaggattagaggtgacccagcttaaagtcacataaccagtcattgacagacctaggacttgaacccaagtcaatgtgagtctgaatcctrtgcttcctccaaagtgcttkgtcagaggtaagtcatcacagtgccaactgagggggcagtatcatgtggtggaatgagaaacgaacacagttgttatactttgcaaatcctctactttggaattttaattgtgtgaaacagtttttagtaatattggaaaatatcatatgtcatatgtctttccccaccatatcatatatcatatgtctttccccaccatagtgtaccaatgtcatccaatgtgaaaaccaaacaatatagataccatcaaagtagaaaagagagatatggcattgcattttcccagagtgatggctttctctagaggacccagtgcatggttgcccatttcagtttgatttcccaccagtggctgcccaagagtcctggcttagaagtggggcctccacagagaataatgagaggctggttaccatctttcttcagttcccatatggccacgaggggagatgccagaaaaaccagggaaaaccaagagatgaccaactgctggtgacacatctataagaagggagagaagcagggggaagagaaggaggaaaagagaaggaagaggaagaaaaaagagaagaaagaatgtcaataattcttgttacctttgtgaaccatatacacattctagctactttttttttaaataaaatcttgattctcccctttcttctccatactgtcaagcaaatactaagtaaattacaggagttctatggcagtctgtggggaagaacatctctaaatagagaaccatagggtatttggggctctggagctgaaagagacctaaggcaagccatctgatacaatcctcttatttttaagatgagaaacttaaagcttagagaaggaatgtgactttctggatcaacatctagcagttgtttatttagtgcttactacataaagagmactgggctagaagcagttgagagagaaaaaaagggcttacctggatcccgcttcctaggagcaaatacttttactcaataaatatttattaagtcagtgtgttaaatgcctccccgccagctggggagatgagccatacatttgtatcactgcagcacaaagcagtgtgtgctggagcacccagaactgaaggacttgggttagggacaggaacggtaatacagaggcgaactttcaggttctggcaacgacctggtcaccagccmttgctgyaggggtttagcttctcttgttttccaagttcaaagactactctctcccatatagagaacctagtggttctaaaatttgagtgactgtcaggataacctggaagcactgctacaacagacggctgagtmccacccccagagtgtctgattcagcaggcatgagggcctgagaatatgcatttctagaaagtttccaggggaagcagatgctgctggcgctaagaccacaccttgagaaccactggtttaacccatgttcagggyccagaacccctgaaaatcaaagtgttcattgggaaaagaccacaacatattgatatatccaccatgaaatagtaaaatgcataattttatgttaaataagccaccatctgatatagaaaccagtctaggttagtatccagggtttatgaaaatcttccgattgcaaaaattacatgccacttacgaatgaggtagggatgattattgaaacattctgaaacaactccattcaccttgcagagcacccatggtctggaggaaagtggttctgaaaccactgttttaaactatatgaagggcaatgctcaactgtttcagtcaaataccttaaaaatgagcattcctgggttgggtgayggaatattgacaaattacagctttgtcagaactgctactaastctaggcggaccttgctatgtactttattcccttataaagtttgtgagtggcagagacaggcctagaagtcaagccttcttggacactgctcagtgctgtcaccacagcatggagttttaggggcatggctatcacttcagtctaggttatgactgtagcaaagtactagctggcacagggcaccggttagtacattcacaggcttgaagttaaacagacacaggcttgaattttggtcccaccgctcatttgctgttgagcagtgggagcaacttgttggccaagttactcgctgagcctcagtctctttgtctataaaatggacctaatacttatctcaaagrcttgttgggaaaggcaatgagataacatattatagaaggcaaccaataacatattaacttgaacctagaggaagaggtaagggaacaattyggtatctgtgttttatatatcatggatagtcaagaaagtcattctaggcagtagggaaatgtgcacagaggtactgcaattacatgcgcctgtaaaacccagaggctggcacactggaagggaaatagtggagattcctggcatctcctggccacttacgctgaggtattcccactagctgtgtgcccagcacttcctctgcatgcctcagatgcatttgacaatctcaggtgaactgcacttcagggtcaagggaaccccggccatggttctaagaarcaactcccattttagtatcacctacatttgaaaccacagagcactgtccaggagaggtgatggtggtgggtctcctcctttggctctctggcccatcagctgatactagggagcrctatccctcagcccacatttctcagcatggtaagtctgagagtcttgatgattaaaacacatttttgtgtgtgcaatttcataggttttctaaactcttgaaacccttgcatgaaggacaaagggaccccacgttacacactcctacttcctggagtatgctaagggcttcccaacactggtgccaacatcagcatgccaatgacrcttgggtgggcatctcttttttaagttttgtttgttacctttaattagaaaagggagttaytattaaagaataaaaagatatagtcacagatggcatgggtggcacatgcaaagatccctagtttgagggccaggcagacttctagaactgtgtgactctgggtgagtcacttggcccctttaagccccacactcctgatctataaaatgggcatgctaytgtggtaaggagttagtgacataattcacgtgaagtgtcatggtgcctagatgaagtcaggacccactatttgctcccctccttccacagcatttactacaatggcaacaatacagtctcttctttactgtttgtcttctctgccacactgagtgaactctcttatgccatggatcatgtctatcttgttttgcactttacccccagagtccagcacagagggattccatgacttattagtagcatgaaggaatgtacggaaatcatacaatttcagattccagtaaactaaactctaagaggttacccacattccatctagtatcttgcaattcyttgtttgaaaaagtgggtcatcacctggggtttagtaatccctttgttaaaatgacattgttgttgcayacaattttacctgggcaagtaaaaaaacctttttttcccccttctcacagatttaaaaactctttaggaagcaataatagcttttcattttttaactggggccaaagttagttaatccacaagaatggggatcccagctgtcattttggttgatatcacaactgacgaccaagaccatcacaaatatgggagcaagtctgatttgtaacattattataattatgaatccaattactttaaggaatgcacgaaaggctttttaaaaatttcaatagtaaggcaggcaccactcactttagctctatacaatcctttaactgatgggcattaacatttaggaatatacttttatacatcaatacacaccacttcaaaataagataaaacaaacatttccacaaactatgcatacacacagatcttgctatacagttattattaggtggcttttaaaatggacactgtacatcggtccctagagtactaagttttcactaatgttccagcagatgactcaccagggatgcttccaggaatccaccaactccctcctgccagctgctggggtagcacactaacggtttctacacctggacagctgcaggcccacagggaggggagggaggtaggggcttgggaagtgcttaccttgctctgggcaggacggagagtccaatggccctgaaacagatgttgtttcttctgctgctgttgctggtactggaacttatatactctactcctttctgatggaaacttaaactagaaactgacttgttgcaacattgaaaacaactctcaaaaccttctgggggaatttcaagaagttccttttttgtttgtctctctctgtgtgtgtatcaataacgaggagggaacatagacatcaaaatcccaggtaatgaactaagaggaaatgacttttgggtggggaataaggaaggagatggagatgctaatttctctgggtttacatcatggccaaggtgcttggagacagcactaggcagattccctgggttccacagatcgaggaagaaggaaggccaaggggcggtcagacgggaggctgagttcatgtcgggatggaacaactgtatgcccaagggcttaaaaacaaaatcctggttcttcccaagtcagagaggatgagatgaagggcaaagggtttagtacatctggggcgccttcctccacattagtcctttaatttcagaaacatactatttaccacccatcttggctccatgcacctctccccacattccccgagtgggaacacacgcgtgcacacacacacccatgcacatttcatacagacacagacctggggagatgataaaactgcgtgtaccactaataagactcaaatatgtgcacatcctgtgctcataggtactcgctcataggggcggatgggagcagaaagtgaaataccctcagggaggcatacagacaaccacactcaaggcacccccccttgggcacccagactacatcctcatttcatttgcacacaaatctatggccctaggggctccgtgcagatgcacaggaatagcggaataaagatatctctcgtggtggaatttcaagttgctaagaggtatgcaaaggtgtacaccggtgtggacccccccatcccccgcccagtctgcacgtgaacaggaacatgtacctgcacgtataccaggtacacgcagacagatgcgggccatccccagagccgccgacagaggtcgctgcgagacggtacccgcgccccacagtccacccgctcctcggagtccccccgcgccccggagtccacccgcgccccggagtccacccgcgcaggtccacttctccatccctgctctcgacctccgcccctgcggtgggggaagttcctggggcggtggctgggaccaggccgggttttaggcgggcgcagatttccgggctaactttcctcgccgtctcagcgcgggaagggggaaatgggaaacccgggccagagcagcggagcttcccagccgcacacttcctccctccagccgtttgtctcggcaggggagggcccaggcagccaagccggcaggcccactggttatccgaccttgtgctctggccgtgggtggagaccttacatccagctcagagcgcctcctcccatcccctgtgtcctctaggcctccccagactttgccttttagccttccagtgaaacaagttctgtatccaagatatacaattaagtggacaaagcagattgcaggtatgttttttcgtatgataccatttgtggggtgtgtgtgcgtatgtgtgtaagtgcacctgcacttttcacaactggtatctctgaggcatatgtaacaactgggggaggggctttttgtaaacatgtattaatttcctccgatccatcactaaagtgtactgaacagaaattgacgtgaagtagtttcactaatttatttacagtggctgcaccaccacagatgagtccttgtgcccccccataaataaatacatgcataaaataagacaagtaaggttcaaaatgacacaaatattttattcatgtgttcgtaaaagcaccttgaaaattaaaaaaaaaaaactgtaacgtaaagtctcagtaaaaatccagcgccagttatgcaaaagaagcttcgaagtatgccctcatcctcccttttccgctcagattgcagcccgagggctagtcctatatgaaagggcccccagtgttcacctccaccagggacaagtaatagggttttaagagcatgggctctggagttagagagctggatacccgcacctgcaagttacttaccttcgttaagcctcagttcctcacatctgtaaaatcgggttaataatagtacctgatctcaggactggtgtgaagattaatgagatatgatgggatgcagttaaagcagcatcctggctaaacgtttaatgaatggctgcttgcacttatttatttttttatcctgtcgtgtcccagaaagtcttttcgtagctcacaaggggacatcaaagatgacaaagaggagtggaagaagacagagagaatcaatgtgaggagcctggaacagggctctgaattgtcttcccrcagtgaaatcacttgtctattgctgagccaagaatttgactctgagcatctaggatgagaaagaagaactggcacctacgccatctctgcccctcgggactgactattttggtaagttcagttcacccatggaggaagtggttctcgtactttatctgcatgtaacaacaaaattcaggttcttggggctgatgcttggagattgtgattcagatctgggatggggctcaggaacctgcattttaacaatggaggttctaatgtggtcattggcaggttgttctaatgtgggggccacattagagcctctctcggagacaggctgtacatggccagccagcattctggtaatatgagccaaatgcccattgacctaattttggagaagaggtttatcaacatgtcccacttcacaatccagaccctgatcccaggcaaaataaactgatacctataagctttctattgcttaccctatgggcgaggaaggtctgctgacaaacagagggcgtgctgagctgcaaggttaatgtgtctgatgattaagctgtgacatggaggcaaccccctaaaaacsaaaaataacttaaagaatttttttggccacaaaaacttattttctcctagaagaatgctttgatcatctagtacacatttcaaataaaggagaagccatgtgtacttataaaaattaaaatcttagaaaattacataagcaatacatgcatgcatgctattgtaaaaacttcaaacaatacaaatatacatagaatacaatgttgaggccctgattcctgtggcttccagaggttaccagtgccagcattcctgcagagcttctgaatgcttctctatgtatttatatctatctggctatataaatggaatcatactatacatattgttctgcaagttgctcttttcttgcaacagtctattttgtattcagtcacttgcagtgacttgctagaggtcacttgaacagatttcacgtctgcatcaattaggttgccctgggcttagttttctaaggagctctgcagttccaggcatcaatccactaaggactgataacacctgggataagaaaagactatcttgtcctgttgatgtctcttaggagcaaataatttgccctacaagctccatagccttttcatgaagtctcacttatcacctgtataccactccctgacaaggagaatgggcttattacaaggaaagtgatagacaaggcaggtttgccctactagatggaaagtggtaggccattgagagtcatgaaaccaccctcacagggttgacaagaattgcatgctgggttctggacaggaatatagttataattaagcattgattaggttgcacgttggcccacttccttgttgctcaaagtcaygtagcactagatcctgaccatttgcatctgcattattcctgtagataggatttctgacattagggtcataagattgtgtaggaattgatttgtatccctattgttcctttagatgggatctctgacattacaatcagaacgcttttgtttaagaatcacttaagttgtttttcaggtccccaattctaccatatttcagtttgaaaacccccacaaagaaaggggatcaggttgaaaatacagcttcaccctgtcccatgacttcaccatgcactcttcaaccagtcaaccatctccaacacatcagcccactcccaaactcttaaaaaccctagccccaaatgccacaaggagatagatttaaggtttcttcctgtctcctcatttggtgaccctacgattaaacctctttctctgctgcaacctggcctctcggcgtattgacttgctgtgtgcaatgggcaatgaacctattatggatacagtcacatgtgtctgttacatgagtccaagtgatttgtgcggccagtgaagtgcagaaatagggcaattgtgtggataatgaaaactaaggcttcttcccccaaatggtcagttgcttttgaagggatacttctagcctaggagtatgggaagtagcttctacctcctgcctcatacatacatgctcttaccaaaagaagagtggaagtgtcacggcagatagctagtcagacatgagcagggcagaagagggttcccccgccactccccgcccaccaccactaggaatgtcaggcaaccatcaggtgagggtcagatggttattaaactgtttctctaaaataataattggtcacagctggtaccagggaaaggcagtctcccaatagatagaacacctgaagctggtgattagcagcttccggataagatcttaggagctgggcgaatgggcttaagcatgagcactaggagggaaaatggtcgaatttaactggtgtatgagcttcttctaagaacactcaactagtaagggaagaatgcctcaagtgaacatgcgtacaatttcagtaaacatactgtgtatgtggcccctcccaagtgctggcaggccaccccaagagaagaatcaggggagaagggaggcaaccccccagaagcatgccagcatatgcaaccccaaatcaaaggttaaaccatacacttgaatctctcaagtcaccctccctcttccaagtgtacttccttttgttcctgctctaaaactttctctttttttttaactttttttttgagatggaatcgtgctctgtctcccaggctggagtgcagtggcgcaatctcggctcactgcaacctccacctcctgggttcaagccattctcgtgcctcagcctcctgagtagctgagattacagctaccacgcccggctaatttttgtatttttagtagagatggggtctcaccaggttggccaggatgttctcgaactcctgacctcaagtgattcacccgcctcggcctcccaaagtgctgggattacaggcatgagccactgtgtctggcctcctgctctaaaactttttaaataaactttccctcctgctctaaaacttgcctgggtctctcactctgtcttaagccctttggtcaaattctttcttctgagtaatagggacaggagacagagaaattctaggcagaaaagagtgggggtttttggcaaagacccaccctcaagcctggtgctgtggcccaaagtgagaacatgtagtcctgttttcccactccaatgttgccgtttcccaaaccacccatggcccaccctgcccccacattctgcacccataaaaaccccaggctccactggcagagagcagagaaggggaggagagaagaagcagctgaatgctggagagaagcagtttgacttcagagggatgacttgacagcaggacttcaggggaagaataccttcccggtccctcccctttccacctccccttcctgtggagagccacttccactggcaataaaatcctccacattcaccgcccttcaattcgttcatgcaacctgatttttcctggacaccaaacgagatctcaggtgccatgggtgaggatgctaaaggctgtcacactgaccctctgcccttgcaaaaaggcagagggttcactgagttgttaaacacttaatccaaccatggatagcaaagctaaaaaagtgcactgtaacatatgtcctgtggggctgcaggggtcatgggtactccaccctagatgctgctgtggggcctgcacagagttttggtcctgccggtgcccaaaagcatttgctctggctcttgcacctgctcacctgtgtgctgcccccccgcccatgaggggttgagagctgtggactgagtaagtgaggcattcctgtcaggaggactctgaaggggtcaaggaaaacctcatgtttcatgaggaggcaagaactgaggttagttcaccaccactaacatactttggtgccacgtgattttggtgccacgtgacttagatacattccctagtggtaacagaaggttctagagcacaaaatttaacagtgtatatatgagtggtatgagggcgaattatttttgttttctttttaatgatctcttaaattttccagaatgtctacaatsaccttgtattacttttctaatcagaaaaaaagaaaaaagttaccgaagaagagataagtgaagcacacacaaaaggcagaatatatagtgcatcaagaatgtgtgttttataatctgacagacctagttagaccatagtccatatttcaaatataattacatgtgctcatagctgagaaccttctcctgggatggatgcatttcaccaggtcactgcygaaatgttgtacttttatggatggtgatgaggaagcatctgttttaggtgtggtatttcctggaggcagaaaactgcttgagttagctcattcagtttttcagtggcctttctaatgcatgttttgytttgttttaatgctttgcaaaagattcctagagtggaaattgcctttgcaaaaattataacagtgagaaaattatgacagtgaaagggatctgccctaactgtccccatcttgctyctgggtatctttgctcattcctgggtgtgggccaagctaactttgggagaaatttagytaaattataatggcccttcccagatactaaattgcccttgtaaaactaatgaaaggccaccaagttaggaggatgagaggggcctgaattctgttaggaagtatgcctagccagccattacttaggaggaataaagatttgcaacttccccaattactccagcagataacatcactattttagaatctaagactggcctttggagatgtcttttcaggtttttgcatttctgacaaccggatgggccccacccaggaactgactcaacacaagaagacagtttccactccctatgatttcatctccaacccaaccaaccagcattccttactccctggctccctactcaccaagctatctttgaaaaaccactaacctctgagccttcagtgagactgatttgagtgataataaaactccagcctcctgtacagccagctctgcatgaattaaactttttctctgttgcaactcccctgtctggataattcagctctgtctgagcagtggttcaaggagaacccgctgggtggttagaatcagcttcactttcaaagggcctrcaatgtcctcattaatttcttccccttcaaagatgactgtgatcacatgttttcaatatcgtccttccacccttggcccatgataagggcagagggtggtagatgcagtcactactgaatttcattatcccagtgggcatttttggcctgctcaactggactgactgcagagcaagtgttccaccttgaccttgattttgccatttgcrtatggaaaccttttttttttttttcctttctaaattcaactctttggtaatcccagtgaaagaaatgggtgtgtgggcaactggaaggaagtgggtgtgtcctaggttgtaggattgctgagatgtagaaatgcttatgctagaaaggtatgagaacagttggtctggtcttgctgttagtagagacagatagaacaagacaaggtgggaacaacatggagtgggcagatgtttgtggtgaagtcctggcatctattgtctgagggtcccctatcaacatcacctccaaccaacaattattgaatattaaccagcatcccctgcatttataggatgaattgttaaagcaccatccaataaagtacattactgctgctactcaccctagagcacatagaattctcctggagagaaatagattgaccaaaaatcggggcctgcaatttggagcatcttcctttgtgacagttgatttgggactcacatttaaggcgcatttgtttctccattcacagaaaatttatattaatattcatcaggcttttattgtatcttgttctggaaatctgctctggaaaataactatgacccctggtcttctgccctgtcattttctctctaatttttggctttgaaaatttatctgtctatctgtcbatctatctatctatctatctatctatctatctatctatctatctayctttattcttgatggtactttaaaaaagtaactcatgcctctagtttaaaataaactatgctgggcatggtggctcacacctgtaatcccagagctttgggaggctgaggagggaggattgtttgaggccaggagtttgagatcagcctgggcaacatggcgaaagtccacctctacaaaaaaatttaaaaaattagccaggtgtggtggcacatgcctgtggtcccagctgcttag

SEQ ID NO: 9922 - DNA, 238318 bp, Homo sapiens
  misc_feature (204855)..(204855): n is a, c, g, or t
attgggtctttttttgattcacttagtcagtttttttttctctttctttttcttttcttttctttctttcttttttttttttgagacagggttttgctctgtcactcaggctagagtgcagtgatatggtgttggctcactgcagccttgatctctcaggctcaagtgatcctcccacctcaccctcctaagtaactgagagtacaggtgcatgccaccatgtccagctaattttgtttattttttgtagagacaaggtcttactatgttgcctaggttggtcttgaacccctgggctcaagaaatcctcccactttggccttccaaaatgttggaattacaggcacaagcctctacacctagcctaagattttttctttttcatttattttcaaaagtttgcctgttatatgccttggtgtggagtctttggagttcactcacctctctatattgtttatcaaatttgggaactttttagccattttttgagttatttttagccttgtctyctttgccttttctttcagtactccactgacatgaatgttggagcttttgttaagttcccacatgtccccaaggtactgttcttttttattcttttagtctattttgttgctgtttttcaaattgcgtaatttttatttatttacttatttgttatgtttttagagatggggtcatgctctgttgccctggctggagtgcagtggcatgatcatactgcaccataacctcaaactcctgggcttaagcaatcctcccaccttcacctcccaaagtgctgtgattacaggtgtgagccactgtgccctgcccagattcagtattttctatttttcttttagtttccttattctcttttttgaccactccattcttctatttgggtttttattttggttattgtacttttttycaaaattttcatttggttcttttcatcatctatttatttgctgagactttctgtttcattgctgagggtttctatttttttattygtttcaagcatatttgcaattgctcattgaagcattttcatggtgactgctttaaaatttttatcacagaattctaacagctctttcatctcattgttggcattggtatgttattttttaaatttaatttatcttcttggttattggaataatgagtaatttcttcatattgaaacttgaacatttttatatcatgttttgagactctagagcttacttattctattttagctagtttctcctgacactgttctgtcagagagagcattggcactacctcattactgtcacttgaagataaagcccaagtttcccataggcctacattgacaaatgcatggacatgtcctctatacttctaggtggggtggaagttttggccccaccatgtgttctccatagacactaaggtagagatgcccttgttatcacatggtgaaaggtcttggctctccactaaaacctcctctgacatcacctgatatggtttggatatttgtcctcttcaaatctcatgttgaattgtgatgcctaatgttggagttgaggctatcaggaggtgtttgggtcataagagtgcatccctcatgaatgacttggtgctattcttggggtagtgagtgagctcccactctgtgagttcacacaagatctagttgcttaaaagagtgtggtatctccttccttttcctcttgctctctctctaatcatgtgatatgctggttttcccttcgtgttcagccatgattggcagcttcctgaggccttcaccagaagcagatgccaacaccctgcttcctgtacagcatgcaggaccatgaggcaaataaacctcctttctttatagattacccagtctcagatattacttcatagcaacacaaaatgaactaatacagaaaattggtaccaaagactggggtgttcctataaagatatctgaagatgtggaagcagctttggagctgggtaacgggctgmgattggaagaatctggaggtctcagaaaagacaggaagatgagggaaagtttggaacttcttagagacttgttaagtggttgtgacaaaaatgctgatagaactatggatagcaaaggccaagctgatgagttctcagatggaaattaggaatttattgggaactggagcaaaggtcactcttgttatgccttagcaaagaacttggctgcattgtgtcaatgtcctggggatttatggagggttgaacttaagtatgattacctaggatatccagtggaagaaatttctttcttcttttttttttttttttttttttgaggcggagtctygctctctagcaggctggagtgcagtggcacaatctcggctcactgcaagctccatctcccgggttcatgacattcttctgtctcagcctcccgagtagctgggactacaggtgcctgccaccacggctggctaattttttttttttgtatttttttagtagagacagagtttcaccgtgttagccaggatggtctcgatctcctgacctcgtgatccacccacctyggcttcccaaagtgctgggattacaggcataagccactgcgcccagccaggtggaagaaatttctaagcagtgaagcattcaagatgtgtcatggctgcttctaacaacctatgattagatatgggagcaaataaatgacttaaagttggaacttatatttaaaagtgaagtggagtgtaaaaatttggacaagtcacaacctggccacgtagtaacagaaggaaaaagcattttcaggaaatagattcaagagggctacagagaaaccacttgccatggagattagcatgactaaaagggaggcaagtgctaatacctaagataatggggaaaaggcctctaagccatttcagaaatcttccaggtagtccctcccatcacagatccagagacctaggaggagagaatgagtttgaggaccaggcccaaggccctgctggcatgtgaarccttgggacactgctcccaggatcctgactgccttggctccagctggtacaggtacaggccacaggtacagctctggccactgcgctggagagtgcaggccaccataaaccttgatggtttccacatggtgttaagcctgtaggcgcacagaatgcaagtgtgaaggaggcttggcagcttccacctagatttcagaggatgtatcagaaagcctggatgcctaggcagaagcctgccatagggtggagctcctgtaaagaacttctactagagcaattcccaggagaaatgtggagctggagctctcccaccgagttttcaccagcatactttctaatggagctgtgggaagggggccgctatcctctagatccgagaataatatgagaatgccaccagcagcttgcaccctgagcctggagaagctgcaggcattcaattccaagccatgatatcagccatgggtgttgcaccctacaaaggcatggaggtggggctgctcaatgccttaggagtctgctctgtgcaccagtatgccctggatgcaggacatggggtcaataattattttggagctttaagatttaatgtctgccctgtgtggtttcagatttgtgtggggcctgttcctttcttttggctgttttctcccttttagaatggaaatgtttacccaatgcaatgcctgtaccaccattgtatctttttttttttttwaaatcttacaggctcttaggtagaaggaacttgccttgagtctcagatgggacttgggacttttgattgagttggtgctggaacaagttaagactttgggagaactattggtaaggaatgattggattatgcaatgtgagaaggacatgagatttggagggctggggtggaatgatatggtttggatatttggctcctccgaatctcttgttgaaaagtgatctccaatgttggaggtgaacctagttgtgggtgtttgtgtcatgggggcggattcctcatgaatggcttggtgcttggtaatgagtgagttaccactctatgagttcacatgatatatattttttaagagtgtggcacctcctccctctctctcttgttttctctctctcttaccatgagctatgctggctccccctttgctatcagttgtgattggaagcttccagaggccctcaccaaaggcagatgctggcactatgcttcttacgtagcctggagaaccgtgagccaaataaacctcttttctttatagattacccgcctcaggtattcctttatagcaatgcaaaatggactaatgcaccaccccagcagagagggggaggtggcaccgtgttattttctgcacagtccaggctgtccacatggtctcctctgataccacaactgtggagcttgctagcagttgggggaatgaaagtctcagtttcattttttggcctgatctgataccaccagaagtattgggattcctcattaacagctttgcaagagcgttaatctagattccccactcaacttttgctggtgtggggccacagtttttttctgtggtgattacctggagtaaatgattatctaggagctttttgtcttgctaggctgcctatttcctggtcctttgtctagagaaagcatgcttttttttttgagctttttgcatcagtacccaataatgtttctggttgttggcttcttctggtccaagtctggaatagataaggcaaaaacccasagatttcaccactgtgtcagtcttcaaaatttataacactttaaagtattttgcacttccaaatgttgacaatgttctctaaatctgctaacctttagaatgtttccaagtttaaagtttgcttcacttttagactaagagaatattcatgtatcttatgttgctctatcttttgtaataaagtaattactacattgaactgttaaaatayataaactgcttgttaaaaataaaatagctccatgttttgtctatatcttaattatcaagtaaacaaggatttaggctttctgattatgaagacatactggattaaataatccttattcacattaatgtccttaactattcttagtacttaaaatataaacattatggccattcctttaaaaaaaaactagtgatagcttattctgatcacatttcttagtcaaactaagatgtagctatgggattctgattatgaattggactgaaattgaaagagaggtttattaataggtaggttattctcaaattattttttaaatatatctttgcatwagatttacatttttcttttgactatggaytatataaagattctcagtacgtgtctctgatattgcgattcaatatccatatgatttttgttgtaatatgacaatgtttggtcttgataagaaaaaagcatggatgaaaatttaacataggaataaaagatctagtggacaccgattcaattaggaatactgagttttggaagtcagagttataagttcaatacttaggtcattatgttatataacaacaagggaaaatgtcacaaatatctttattctaacagttaaagtatcagaaaatgatgaagttgttcataccacattaaaggaattttacatgtgytcagaaattttccaaaaatgtcatctgtaagtacctgataactatatatacatgtgcatatgtacgtgtgtgtgtataatatcatttaaaaaaaaacacccaagctatcctagaataaggtgaatcatatcagtcaaactaccttattttaaaactttgacattcagttgcaaatatttaataataaaaatatataagctgataaatcgttttaaataaaatgatgtaaggagaggttaagtagatcttaaagtttctaattcaattgtaatatgtttgtaatcattactaaaagaaaatactggattacacactctccaatgagatttgaaatgtyctgggtcttaaaaggacrtaaaattgaaaatgattgcatttaacaaattrcagacrgatatagattgcatttygaaaatcaacgaatggatctaaartttacattggccacatgatgtcgctgtacaccacaaagtcttgtcaatagaagggagctactgatcactaaaagtgaaggaggaagctccattttgtcaccgcctgagagaagacagaaacggtaaagagataaatgattggaaatattagataaaatggcatgattttgaagtaagaggagagcataagaaaggtgtagtcyttttgcaatggtgttttctaggagagggggcctgggagcccgggatctgcttctttggcttctgctcctcgcagcctgggaggtggggagcggccagctccactactcgatcccggaggaagccaaacacggcaccttcgttggccgcgttgctcaggacctgggactggagctggcggagctggtgcctcgcctgttccgggtggcgtccaaaacacacagggaccttctggaggtaaatctgcagaatggcattttgtttgtgaattctcggatcgatcgcgaggagctgtgccagtggagcgcggagtgcagcatccacctggagttgatcgccgacaggccgctgcaggttttccatgtggaggtgaaggtgaaagacattaacgataatccacccgtcttcaggggcagagaacaaataatatttattcctgaatctagactcctgaattcgcgttttccgatagaaggagctgctgatgcagacattggtgctaacgctcttctaacgtacacgctcagcccgagtgattatttctctttggatgtagaggcaagtgatgaactgagtaaatctctttggcttgaattgagaaaatatttggatagagaagaaacaccagaacttcacttattactgactgccactgatgggggcaaaccggagctgcaaggtacagttgagctgctgatcaccgtcctcgacgttaatgataacgccccactgtttgaccaggccgtatacagagtccacttgttagagactacagcaaatggaacattagtgaccacattaaatgcctctgatgctgacgaaggtgtaaatggtgaagtcgtcttttcctttgacagtggtatttctcgtgacattcaagaaaaattcaaagttgattccagctcaggagaaattaggttaattgataaactggattatgaagaaacaaaatcctacgaaattcaagtaaaggcagttgataaaggaagtcctccgatgtcaaatcactgtaaggttttggtgaaagtgctggatgtaaatgataatgctccagaactggcggtcacttcattgtatttgcctatcrgagaggacgctccactcagcaccgtcatcgccctcatcaccgtgtctgaccgtgactcaggtgccaacgggcaggtgacttgctccttaatgccccacgtccccttcaagctggtgtccaccttcaagaattactactcgttggtgttggacagcgccctggatcgcgagagcctgtcggtctatgagctggtggtgaccgcgcgggacgggggctcgcctycgctgtgggccacggccagggtgtccgtggaggtggccgacgtgmatgacaacgcgcctgcgttcgcgcagcccgagtacacagtattcgtgaaggagaacaacccgccgggctgccacatcttcacggtgtctgcgcgggacgcggacgcgcaggagaacgcsctggtgtcctattcgctggtggaacggcgggtgggcgagcgcgcgctgtcgaactacgtgtcagtgcacgcggagarcggcaaggtgtacgcactgcagcccctggaccacgaggagctggagytgctgcagttccaggtgagcgcgcgggatgcgggcgtgccgcctctgggcagcaacrtgacgctgcaggtgttcgtgctggacgagaacgacaacgcgcsggcgctgctggcgcctcgagtgggtggcactattggtgcagtcagtgagctggtgccgcgattggtgggtgcgggtcatgtggtggcgaaggtgcgcgcagtggacgccgactcgggctacaacgcgtggctgtcctatgaactgcagccggcagcaggcggcgcgcgcatcccgttccgcgtggggctgtacacgggcgagatcagcacgactcgtgtcctggacgaggctgacttgtcgcgctaccgccttctggtgctagtgaaggatcacggtgagccggcgctgacagccacggccactgtgcttgtatctctggtggagagcggccaggcgccaaaggcgtcttcgcgggcgtcggtgggtgtcgcgggcccagaggcggcgctggtggatgtcaacgtgtacctgatcatcgccatctgcgcggtgtccagcctgctggtgctcacactgctgctgtacacggcgctgcggtgctcagtgccgcccactgagggtgcrtrtgtgccgggcaagcccaytctggtgtgctccagcgcgttggggagctggtcgaactcacagcagaggcggcagagggtgtkctctagcgagggcccacccaagaccgacctcatggccttcagcccaggcctatctccaagtcttaacacgtcagaaagaaatgaacaaccagaagcaaatttggatctttctggtaatgtaagtccaactttcgagtttyggctttaaatatttttcatatttaacttgtctaatcatcttttcaaatatcactttaaaaaatgtcttcaaggtgttcactaacgttgaaataaatcataccattgaatgtagatatcctattaatggcagttttgtcttgaatggaactagaaagcaaagaaaaatgtagggacaaattgtcgtatttcttgatttaaatggcaggttaaaaaagctacaatacaaggtacaataaaaggtaatgttggtcatatttaacacaatatctcaatgtagtaaaataacagtgacatattcggggtaacttattatgttatcttttctggtgaaatgtcaagccccggacaaacaattcttgacaaagttacagaaatcatctgccttccctttacgtggctaagtttcaaagtgaacaataaactgaagttttaagcaaacgtaatttaaaatacatttattggctgggggcggtggcttatgcctgtaatcccaaaactttgggaggccgaggagggcgkatcacctgagatcaggagtttgagactagcctggacaacatggtgaaaccccgtctcaactaaaaatacaaaaacattggccaggcctggtggtgggcgcctgtaatcccagctaatggggaggctgaggcaggagaatcgcttgaacccgggaggcagaggttgtagtgaaccgaagtcgcaccattgcactctaacctgggcgacagagtgagactctgtcaaaacaaaaacaaaaacaaaccaaaaccgaccaaccaaacaaacaaaaaacaccatttattgggcgatttgtttaatttctttatgaaaacatacaaccacgacttcattgtcattgtgaacaatttcctgatgccattaaccttgaattcccctgggtctagaaggcttagcattgcatgtatttgctatttcggggatccagttaggaaacacttattaagcacctcccattcctcccattcactcacaaatgttctaaaacsctttacttttttagctcattcgatccttccaacgattttatgaagtgaagactttmgtcacattttgtggataaaggtgctgaggctcgcaaaacctaagttcagtattattactaagttttcttcaaatttcccgaggatatccaaaaacttgcttgctgttaatacagttctttacctttcctaaaatgtttaaggtggcttacagtggaagaaatttgtgaaagcaaattattaaaaaatctgcttaaggtcaaagtaaaagatcaagagaaaggtgggagtcattatttcaaaaatcaascctaggctgagtgaaaatcccaatacttaccttcctgtaagtcaatatagaagtatgaaaaaataacaataaaaggaaattctctataccatttcttcaagagagaaaaaatagcctcttcctgctrcaaaatcaaggaagatttgattactgatgattgtgtaaaggttgagaaatatactgggcagcacgttttatagcagttttgcaaaacccacggaaatatccttgatgtagacatcattgtrtttggtagtcattcagtcaagggcataatgttaaattttatttcctatgtttgcttctgaagttacttaaatattaaatgaatatatttttgtttgtcaaactttcaaacatacatgaatgtccccttgtgaagacattctatgagaaattaatataatttgctagttaagtttccagagatttgagttgatacagagttgttgcttagagtattgtaaaaaataggctgtaaacatgttctgtaacttttaatatattatcgtactcagccttttggcaagaatcagaaaaaaataatcttagcatcacgttgccaagaaaatgtcccagttcctcaaaatatgagacaaactttgcaggattataaaattggaaaaaatagatcagaaaatcacaaaataatttctctttccaaytcacattactgtgtccccaaagcttcatttgctaacagtattaatggccaggcttaggattgcctttacatacattcaatatttctttatttagttttctaggttagttgagtgtattaacctgaaggtgaatcacaaataatagtgaattactattaaaccaaaaataaatgggcgtaggagtacaaaatttgaaaagtaatttttatgaaaaggtaattctagaatggaggaaaaaatgattgtggagtggtattgtcacttagtgtttattttaatgtaaatatgaatggatttcccattggtagttaaagttcttgctccattccaaatcttcatatagttaacacaactttcaacaggtttatctttcttcacaagatttcwtccacaaactagtaaggtatcatttgagggaccttagagacttgtggtcagtgaaggatgcaaatagatgaaaatgagaaatagtttatattgctagccactaccgatattcctctgagaatgctggaggatttcacttttctgttattttgaggtagcacgattgtgtaatttcctttggccaatgaaatgtgaatggtgtgtcacttccaagcagaattatgtaactgccagtgaaagactcttctgctatcttttcctgttacagcaattacataagcactggttgatactgagacaccataaagtcaaagcaatccaggatgctgagccaacatgtggagaaaagctgtcataggaagtccccaataactacaaaggactctgcagcagcaagaaataaaattatgtttattttagaggaaaaactgaatgttaactcacaacagcatatgtattgaggtcccactgccattaagctaatatgaaccagataaattttaagaggggggcatttttttttacaacaggaaatacaaytgtaggagaacattattgttgacactttttactaagacatctgaccgttaagcagattagataacttgaattccatggaaaaaatctactgtgttttgatttctttttcttaaatataaaaggtagcagaagaaaaataataaactgaaatttaaaatgtcatagatattccttcttttttcttgcttagcatccactccccttgttgtttttttcttctggggtcttctagtagttttgtgaaagaytaggttgaaggttttgcaagaatgagtgcttggacatgtaaacgttaagggatatacagttccatagataggtgcaaagggtataattttagcaatgggtactatattaatttccttgggctgatgcaacaaattaccacagacttggtggcttgaaataacagaaatttattttcttacagagtctctgtaagaataaatttcttctctcttatggaggccagaagtccaaaatcagcgtgtttcctgggccgcatttcttctgaagactttaggggaaatttttttcttggatcttccagcttctggtagctcttggcattgcttggcttgtggcagcataactcyagttcctgcctctgtcttcacatttccttctttcctgtgttactatatgccttctctttttctgtcttttataaggggcaaccatcattggatttatggccttctgtaatctaggatgatctcatatcaagatcctcatctttgttacatctgcaaagacctttattccaaataaggtcacttatttaaacctcagaaaagtgatgtcttttggggtrtctttgacccaaaacaggtaccaagagatatcaagtgcagtgggaggaaggatatttgctgagcatggcttcttaatctcttttccccgttgtgggggaaatgtacttgcatatctggcaatagtattctatctccgggggaagggggaaatattccatattctcagaaatcctaaataacagcacaaaatgcctcttatacccccacatatgtcattctgaatatccggtataattaattaccttatatgattgcagaaattgtctcaagcaagccatgtttcctgaagctagcatctggattctaggtataattccttctatgtgtcaacagtggtcaatgttggctatagattaaataataattactgggtatcatacatatgcaattgctttgcaactacataatgctgtaacgagcagttctgaagctatctgccatctgtttaagctccaggagaatttgggtacatgccatgacctccacttttcagttcacataaaaaccaacctcccacttttcagttcacataatttaggtggagctgatttcatttcctggcttcaagaatgagcaagtggacccatgtctagccaatgtgagaaaaatcacaattattgactaaaggaaatttacatcatccaaactgggctgtaggaagtaatatccaggatttttgctggactattagaaaagagcactttctggtaagagtcatcaaactggtaatttttagtctagaaagctactttggccattttgccagcagatgggaaaagtctatctgagaagaagttcagcaggggaaaaggaattataaatgtggagattattttccttatggaattatggaagggtgtagacccagctctgtctgaaaccagtaattaattacccatttccatgtaygagtcagtacaggattctctggtttatttttgcttaaatcggttaacttgggatttactgttagagtatgattaacataaatacacatttccatagatggtacaaatgagtatcttaagatactgtacatgagggaaaaaaattgttattggaaaaaaagctagcttttcttaacaagagctttgcttttctcttacggacattgcaaattttgcaattaattttacttctctctttgctctaggaagctgaaaacaaaattggtgacatggttagagtaactgaaggtgaccctttattatggattttgtatgctatcccactccttgattcattttatttcatcctcatcttatctttattctattttcatttttttactgtgaagggatcagctaaaaattaacaaaagaagatattctcaagtaattaacacaaaaaaagagatcgattgtattgttcttgcataaaagtctaaatgtaatggaaaaggaatattctaaagtaatagtacattatccaaatgagaaacaaataaattattaatttcaaaacatttgcaaacaattcaaaaatcaaaattaaatcacaaaacaacagtatatatacacatatattttcaatggactaaaatacctttgattactatgttcttcatttgaagaaatagtgaaaaatrctaatatatccaaaagaattgaaagcagggtctcaaagaaatatatgcacacccatgttcatggcagcactgttcacaacagtcaagaaatggaagcaactcaaatgtccacgaatacttgaatgaataaacaaaacgtggtgtatacatatgttggactattattcagccttaaaaaggaaagaagtcctgtcacatgttacaatatggatgaaccttgaggaaccatccacggatgcttgaatgaataaacaaaacgtggtgtatacatacgatggactagtattcagccttaaaaaggaaataaatcttgtcacatgctacaacatggatgaaccttgaggacattgtgctaagtgaaataggccagtcacaaaaagacaaatactttacgagtccacttacacgaaatatctaaagtagtgaaattcatagaaatagaaaataggactgtggttaccagagactggagtgacggtgaaaagcggagttgttgtctaatgggtatagagtttctgttttccaagatgaaaaatttgtaacaatgtgaatatacttaacattactgaaatgtacatttaatcatagttaatatggtaattttaaatattatgttgtgtgttttttaaccagagtaaaaaagggtaaaaaggtaatatattttagggcttaaaatagttatttttttccaagatgaaagctatgartaaacttaaaccagaaaatcgactagttttaaatctacagaataaacagtagagccttccttttagccacatgatgtcgctgtccaccatagmgtgttctctaggaaggaaaatacccagagcccctttgttacttcagagaagcggaggaataagagaagcagcaggactttaacagagactagaatatttaaatttttgcaaaacatgctcttctaatttgatcaaaacattgaggattggtaatggcgtcttctatcagaaggggccgaggggcctggacacggctgctctcgcttctgctcctcgcagcctggraggtggggagcggccagctccgctactccgtccccgaggaggccaaacacggcaccttcgtgggccgcatcgcgcaggacctggggctggagctggaggagctggtgccgcgcctgttccgggtggcgtccaaaagacacggggaccttctggaggtaaatctgcagaatggcattttgtttgtgaattctcggatcgaccgggaggagctgtgcgggcggagcgcggaatgtagcatccacstggaggtgatcgtggacaggmcgctgcaggttttccatgtggaagtggaggtgaaggacattaacgacaacccgccaatatttccaatgacagtaaagactatscggtttcccgaatcaaggctgcttgattctcggtttcctctagagggagcatctgatgcagatataggagtaaatgctcttctctcctacaagctcagctccagtgagtttttcttcctagatatacaggcaaatgatgaactaagcgaatctttgtctctcgtgctggggaaatcgctggacagagaggaaactgctgaggttaatttgttactggtggctactgatgggggcaaacctgagctcacgggcaccgttcaaatacttattaaggtattagatgtaaatgacaatgaaccaacttttgcccaatcagtttacaaagtaaaattgttagagaatacggcaaatgggaccttagtggttaagttaaacgcttctgatgcagatgaaggaccgaacagcgagattgtgtattcactcggtagtgatgtgtcctccactatacagactaagtttaccatagatcccatctcaggggaaatcagaactaagggaaaattagattatgaagaagcaaagtcctacgagattcaggtcactgcaactgacaaaggaaccccttcaatgtcaggacattgtaaaatttcattaaaacttgtggacatcaatgataacacaccagaagtctcaataacgtctctctcacttcccatctcagagaacgcttccctgggcactgtcattgctctcatcacggtgtcggatcgcgactctggtacgaatggacatgtcacctgctccctgacgccccacgtccctttcaagctggtgtccaccttcaagaattactactcgttggtgctggacagcgccctggaccgcgagagcgtgtcagcctatgagctggtggtgaccgcacgggacgggggctcgccttcactgtgggccaccaccagcgtgtccatcgaggtggccgacgtgaacgacaacgcgccggcgttcgcacagcctgagtacacrgtattcgtgaaggagaacaacccgccgggctgccacatcttcacggtgtcagcgtgggatgcggacgcgcaggagaacgcgctggtgtcctactcgctggtggagcggcgggtgggcgagcgcrcgttgtcgagctacgtttcggtgcacgcggagagcggcaaggtgtacgcgctgcagccgctggaccacgaggaagtggagctgctgcagttccaggtgagcgcgcgggatgcgggcgtgccgcctctgggcagcaacgtgacgctgcaggtgttcgtgctggacgagaacgacaacgcgccggcactgttggcgcctagggctggcaccgctgctggcgcagtgagtgagctggtgccgtggtcggtgggtgcagggcacgtggtggcgaaggtgcgcgcagtggacgctgactcaggctacaacgcgtggctttcgtacgagcttcagctgggtactggcagcgctcgcatcccgttccgcgtggggctatacacgggtgagatcagcacgacacgtgccctagacgaggctgactcccctcgacaccgcctactcgtgctggtgaaggaccacggcgaaccagcgttgacagccacggccaccgtgttagtgtcgttggtggaaagtggccaggcacccaaggcctcgtcgcgrgcgtgggtgggcgccgcgggctcagaggctacgctggtggatgtcaacgtgtacctgatcatcgccatctgcgcggtatccagcctgttggtgctcacggtgctgctgtacactgcgctgcggtgctcggtgccacccaccgagggtgcgcgcgcgccaggaaagcccacgctggtgtgctccagcgccgtggggagctggtcttactcgcagcagaggcggcagagggtgtgctctggggaggaccyccccaagacggacctcatggccttcagccctagcttatctcaaggtccagactccgcagaagagaaacagctctcagaatcagaatacgtaggaaaggtgagtcttttactttttcttgccaattctaaaattgttctttttaaaaaattctatatgatttctactagttatttagattcatagttcttcatttattttatatcatcctaccgtgcgattttgaatatgaattagagatcaatttattgcatttactgaacaatttatttaaacaatctacataactgttttcttatttttacattttggcacttccatcattaagtcataagtaatagaccatgaaacactgaaaaacacctcagcaaaatttgtaaattaaacatttcccataaatattttctctcttaaaaattgaaaatcacaatcggaagaaattaaagaatttgattatataatacgtattttcaactgacactgtctatccaatctgtcggatagtgtttggaataacctatatcctggacatttcttagattgttctttggatcaacaatgcccttgtctatgcaatagttaataarctacattttttktttgtttgtttgtttttgttgagacagtcttgctctgtcacctaggctggagtgcagtggtgtgatctcagctcactataacctctgccacccgggttcaagtgattgtcttgcctcagcctccttagtaactgggattacaggcgcccaccaccacgcccggctattttcttttttaaattttttatttttagtagagacggggttggtctcaactaaatgttggccaggctggtctcaaactcctggcctcaagtgatccaccctcctaggcctcccaaagtgctgggattacaggagtgagccactgcacctggtctttttatttgtatttgaaagcagcctgagtggatattttaacaccagaatttccaaaagtatgtagcacaggttgttacaacaaaatgacagcacttaggaataactgctaatcttaagtatgttttttataagtaaaataacccattatttggtataaagatttcacactgataacatttttgagttatcaggcaaaaatagagagtattgagaaaagagaccctctcaattttgtttaatttgaaaatattaacatttaaaaatcacactggggtttttcaggyggtgggactttttcttcatttaagtggagactacccagtctttatgttaatsgttgataaatcatcctttcagtatcattatcattaggccaatgtgtgcaggcctcccactgcagagattgaytacttttttctggcatctaattctatgcgtgggaatacattttccattaatgtgagctcactcaattttacctggaagcatccatattcctaatgaaattggaatttttccaaaagatgaggcctggtcttggatgactacattttcacttgaaacatttattttgggtaattrtaacacygaactcgacaagtaaatgttacacttggaaagaacttttttagcttttccaaccaaaggcagatgtattgcaataaaataactgtcttaaacggtcctctactatttagttcttagttatttgctgtttattctaaatatatgtgcatattgataaatcatagaaataacttccactagtgatcttacctttagccatttcatagttaggtcagaatatccatttccaagtaatacttgaccactatgtttctaccataggtaaatgataagcttctaaaattatattcacatatatccaaatctccaggagtcacaatctgttgctctataagttttttcaaaacattcttatttacattttttcttggttgtctaagtgacatctaggtggtagtagaaattattcactgatactttatctacaaaatggctcaatcttctaaactcatagttcctttaatattacctttatctcttaataatcagtatggagtctactctgctataaattctcatgtgacattccattttgcaattagtataactcttaaaggtactgaaaagtgcagtattacaataagttgtcaaaggcatctcattactatgaagtccatgaagtttaaaaattttaaatttatctcttattttcaaactagctaccatctttaaaaattcagcaaagtggtaactggaatattaatagctataattatttcttaggtccatgcttttcagaaataatgcttaaatgtttacttacttcttcataatatagcacaatataatcatttagaaattatgtaagtttgatattaacaaatatcattaacttacatttttatttatcttgcttgaaaaagttaattcaaaatattaatttatttattcatgaaaacaacaattgataatttatcctattctaaatatgaatgataaaatctgagtaagttgcagtcctggcttccatttcatgaatacacaggaaacaaaagctgaaatgaaaacttttcccctaaatatttaaatcacatgtttgatttcatttttaaatggtctgggtataagcaaaaatttgtacattattttatttctctaaatttgacctctttccataaattttctttgccccacttccaaatgcggcgagaattcatgcttctcattgaattcacagatatctttagaatgttttattgcttagtgttaaatatgttgagtaaatactggcttatgttcctaggttacttttctcccttcactgtttagttaaataatcaattctttcaagtaacaacttttaaaaaaactggaatctagaaattcatcaggagtggagatcatcaaaaacgtaattactttatattgttaacattttagtatatacaggtaaattcaaatacataaagagtgtggaaaaattaaacctaatatattcttaattgatgtgatgtgagtgtaacaaatatacaaatcacattcccacaataggaaacaaatttcctgtttgaatttctctgtaaaggaccgacttctgaaatctttatgtaagttacagtcaagacagttgatgaggctatagttcttgaaaaaggggcatgggagggaattacagacattctacaaatttaaaaaaccataaatgtacatattttaagaaattaacagttgctgtaataacataaaagtagatatatgtatgttttaatatatacagcacacacacacttttaaatacttcaacatctcaatgttttgatgatcataaatctgaaaggatctgatttttctataaaatgtaacttgggtggtraagaggttaatggtaagttgtcttgaatcagattgaaatcccatcgtaccaagagataatatcgttttacttaacctctatgtgtttataaaaagcgaataatattaaaacttatttcagaggattgtgataatttaacgggataattccattaagacaaatagaaaagtggctgtcacatgggaaatatttccaatagatgtccactgttaaaacaggaatcacaatattttagtgtatgtcatgaattagcacaattgatagtgaattagtataaaagttctaaggaaakatttagataaaatataaggactttgaggagtgaccgaaggatattacaattgaaactagaaattttgggaaagttcaaacgacatrcaaggaaaagaagatacgtttacrtatttaatasttacacgtttagccacatgatgtcgctgtccaccacaaggtctttctccacaaaagaaataacagcgtgcattacgtattcagatactgctttgcttcatcctctctaaaatttaacaccgaggagtttaagaaatgaagataaggaactcgaattatttttaaaytttggatcaatgtaaaggcaatctaatatttggaaaatacttgcaatgttgttctcctggcgagaagatcctggagcccagtgcctgctgctttctcttctgctcctcgcagcctcggaggtggggagcggccagctccactactccgtctctgaggaggccaagcatggcaccttcgtgggccgcatcgcgcaggacctggggctggagctggcggagctggtgcmgcgcctgttccgggtggcgtccaaaagacacggggaccttctggaggtaaatctgcagaatggcattttgtttgtgaattctcggatagaccgcgaggaactgtgcgggcggagcgcggagtgcagcatycacctggaggtgatcgtggacaggccgctgcaggttttccatgtggaggtggaagtgaaggacattaatgacaacgcgccagtttttccaatggctgtraagaatctgtttatttccgaatcccgacagcctggctctcggttttcgctagagggcgcatcagatgcagatatcggaacaaattsgttgttgacttacagtcttgattccactgaatattttaccttggacgttaaaagaaatgatgaggaaattaaatcccttggactcgtgttgaaaaaaaatttaaatcgagaggacactcctaagcattatttactaataacagcaattgatggtgggaaaccagagctcactggcacgactcaactaaagatcactgttttagaygtaaacgacaacgccccagcgtttgagaggacgatctataaagtcagattactcgaaaatgcaccaaatggtaccctagtggtgaccgttaacgccaccgatttggatgaaggagtaaataaggatatcgcgtattctttcaatacggacatgtcagcagataytctgtcaaaattccatttagatccagtcaatggacaaatcagtgtaaagggtaacatagatttcgaggaaagtaagtcatatgaartccaggtagaagccacggataaaggaaatcccccaatgtcagatcactgcacagttctactcgaaattgtggacatcaatgataatgtacctgagttagttattcaatcrctatctttacctgtattagaagactctccacttagcacagtcatcgcyctgatcagcgtgtccgaccgcgactcaggagtcaatggacaggtcacctgctcgctgacgccccacgtccccttcaagctggtgtccaccttcaagaattactactcattggtgctggacagccctctggaccgcgagagcgtgtcggcctatgagctggtggtgactgctcgggacgggggctcgccttcactgtgggccacggccakcgtgtccgtggaggtggccgacgtgaacgacaatgcgccggcattctcgcagtccgagtacacggtgttcgtgaaggagaacaacccgccgggctgccacatcttcacggtgtctgcgcgggacgcggacgcgcaggagaacgccctggtgtcctactcgctggtggaacggcgggtgggggagcgcgcgctgtcgagctacgtgtcggtacacgcggagagcggcaaggtgtacgcgctgcagccgctggaccacgaggagctagagctgctgcagttccaggtgagtgcgcgcgatgcgggcgtgccgcctctgggcagcaacgtgacgctgcaggtgttcgtgctggacgagaacgacaacgcgccggcactgctgatgcctcgggtgggtggcatcggtggcgcagtgagcgagctggtgccgcggtcagtgggtgcgggccacgtggtagcgaaggtgcgcgcagtggatgcagactcaggctacaacgcgtggctttcgtatgagctgcagcctgggaccggcggtgcgcgcatcccgtttcgcgtggggctgtacacgggagagatcagcacgacccgtgccctggacgaggtggacgccccgcgccatcgcctactggtgctggtgaaggaccacggtgaaccctcattgaccgccacggccactgtgctggtgtcgctggtggagagtggccaggcacccaaggcctcktcccaggcgtccgctggcgccacgggcccggaagctgcactggtggatgtcaacgtgtacttgatcgtcgccatctgcgcggtgtccagtctgttggtgctcacactgctgctatatactgctctgcggtgctccgcgccgccaaccgaaggcgactgtgggccgggcaagcccacgctggtgtgctccagcgcggtggggagctggtcatactcgcagcagaggcagcagagggtgtrctctggagaggggttgcccaagaccgacctcatggcttttagccctagccttcctccttgtccaattagccgggatagagaggagaaacaggatgtggacgttgatctctcagccaaagtgagtaatttttatttattctttccaaaatgtctttgtttttcattcctcaatgtttccactcctctggaaatacattaatagttaaktatgaattatgtgattcataattagacttttccagttttgtggttttgtggttaaaacsstaagatttttgttgctaatttttgaaccaaatcagcagtaagttatgatatccacacttgtaattttgttttgttattaggtgcagtagtagaattattttattgctaaatgcctgggtataagacaaatattttttcttagatgaattgcattatttagagaatctgacttcgacttgttttatacttatccctatacaatgcttcttcaatatcttttgccacttttcatttggacttcctactacctgttagtacaratgttacttgctcattttatgagttcacctaatgcttataactccctattgattatgcttttccaccttcagtytcaaaaattagatcattacacctgttgtcttttatggaacctcttttattctcttattcacttgtttggagtctcaatccttattttttacttgaatatgattcattttaggccttgtgctctaatttggcaataccgtttattgtttcttgatttcccagttkggaaaaaaatcgagaataacaattgcatttagaattgcatctttgttcatctttagtttatcactactttatttaatactactttaataatactactgtattatatgttaaaatttattactaataactaaaatatcaatatgaagtgaaaatttaatagttgtatagtatatttatatattcattttaaaagaatgttttaaatcttgttaaaaataattttcaatctgaacaatatcttgaaaataattatggtatctaattttaaaactatccctactagcaaaactttttattcattagtgtcttttgcataccatactaaggatgctaatatgaaataagtttgataagccaatgttataatgttattactggttaacttctctgaatagcatcctgcctattaatgtgtgccatgcaataagtagaaaactccaaataaccagaaccaaatgaaattgaaggtagacttttttctaatcactacccctacatatttggttatctcctctagcaattagttggactcccatttaagtttccctaccactggagagaaatagtaaccaactgaaacctggttaatactcattgacagtgtgggaggtctaacacrtaaaatagatatttttcttgactcctctccttcccctcacttccattttctttatttccttttttggcactatcctttgttgctcccttgtccatgaagtagtagccatagtgtgtccatctcaggtcagtattttaaaaatttagttctgttatcagcttcttgaatataatagagtcagccaaagtacttgtcttcccagatatggaacttcaatcttcaaatccagcttgcctcttgaaactattgtctaacaagactcttggcaaagacattttgaagactttggaattttcacttcacagatgtactgatgctatgccaaataaatattgaatagctaccaaataaacattgttttctattctgctgcattccccatctgtacattaaaatacctggtaaatgaaaatattacaaatgaaatgggtgaaaatggaattcttcctccttttttccaatgtgcttgatgtcaatgatcattttgtaaaaatatagtttgggtccccacatagtgaaagtactctggtttctgtttgattcagaaatttggtgggttttttgttgttgttttggtttttgtgtgtgtgtgtttgtgtgagtgtagttcttcaatagagagggagcgtaaagctattttcactagattgattttttgtttagacaaacaggatgaaaataactttatgratataggaggcaaggaaagtttttaaatggctaccattatgtctttatatattaaatttctttatgtaagaaaatgtattgtggtttatttattgggaagtcttcattccccattaatacccaggatgattcaaagatcrtgattaccaagaattagaataaaaattaagctaaaacccaagttttcaacattgaacttgaaatacatcttaattggggaaatgtctagagactttttttgtatctttagaaaatcatagaggctattgaaacaccacattttcccaactagatatgcgatcaccttaaattaatrcattttattaggcaatggaaggaarcaaacattttctgcagggtaaatatttaggaaatattaggtaagtccctctgagctattaaacaattaagatacaactattccctttaaaatatatattccaaaaaaggacacacatactcaaatgcttataagagataaattaatgtaataaatggcccacgcgattccaccctggtgctgcagtttgtaaaagaagaaaaaatacctgttcaattggtttgatcatgacattcttcatgggtcagggaagttttaagtggttataaaatggggtaaatwggctttagaagagtttagaaatgatgtggattacttatagacaggacaaaatgaacatgcttgtttattaaaaaaagctattggaagcaggaaatattcagtttggctaaaatatataagcactataggagaaaatagaagcttaggcacattacatactggagaacaagcaagtacttataaactgtaagagtcaaaatgagaataccagcgtttctcatgggagcaaatgagttccaatgaataaaattatttggaatgcttttccatgcaagctatttgctataacttcctgcttccttgcactttcagccctgacatgactcaaggaagacatctaattaaatgctgatggtctttgatccttttataaaacatctgcaaatttccctgtcaatagcttgttcttggcaccagaagttccctagagaccagtcccctcaagtcaacaacaccagaaatactagggtgaaagagggtgttatcattaataaaaaaaaaccctggaattcttgggaacacaggaatctgtaatgaatttttctaatcaacagtttacagttacatgtttacaaagtgtatagttaggtctctgtaatacttaaaacctgtgttgaaaaaattatttctactgaagtaaaagttgcccctatggcgaaactaaggaccacactcaatcaatcastggtacaatgtgtaccacagtagtacaaaatgtattcctattctccgaaacgactgaaataataaataaaaccaagtagtttacagtagagtgtgtgggggtttccacaattgctacttacggtttggagccacatgatgtcgctctttaccacaaaatacatgagagaaggaggaagaagggaaaattccttctattcttactggaaggaaccatatrcactctttggagtctgaaatatggaggatgcagctgcacttgactgaccgattaaaagatttcccttgactttgagaaacgatatttaatcagaacaaaatactgtgcactaaagatggagttttcctggggaagcggccaggaatcccggcgtctgctgctcttacttcttctcctcgcagcctgggaggcagggaacggtcagctccactactcggtctccgaggaggccaaacacggcaccttcgtgggccgcatcgcgcaggacctgggactggakctggcggagctggtgccgcgcctgttccgggtggcgtccaaaaggcaccggggccttctggaggtaaatctgcagaatggcattttgtttgtgaattctcggatcgaccgsgaggagctgtgccggcggagcgcggagtgcagcatccacctggaggtgatcgtrgacaggccgctgcaggttttccatgtggacgtggaggtgagggacattaacgataacccgccggtgttcccagcaacacaaaagaacctgtccatcgcggaatccaggccgcttgactctcggtttccactagagggcgcctcggatgcagatatcggggagaacgccctgctcacttacagactgagcccaaatgaatacttttctctggaaaaaccayctgatgacgagctggtaaaaggtcttgggcttatattacggaaatctttagacagagaagaagctccggagatttttttagtgctcacagccactgatggaggcaaacccgagttgactggcaccgttcagttactcatcacagtactggatgccaatgacaatgccccagcttttgacagaaccatttataaggtgagattactagaaaatgttcctaatggaacattggtaattaaacttaacgcctcagatttagacgaaggattgaatggggacattgtttattcattctcaaatgatatttcgccaaatgtgaaatccaagtttcacatagatccaattactggacaaattattgtaaagggatatattgactttgaagaaagcaaatcctatgaaattattgtagagggcattgataagggacagctcccactttctggccattgtagagttattgtggaagtagaagacaacaacgataatgtcccagatttggaattcaagtctttatcacttccaattagagaggacgctccactgggtacagtcatcgccctgatcagcgtgtccgacaaagacatgggtgtcaatgggctggtcacctgctccttgacgtcccacgtccccttcaagctggtgtccaccttcaagaattactactcgttggtgctggacagtgccctggaccgcgagagygtgtcagcctatgagctggtggtgaccgcgcgagacgggggctcgccttcgctgtgggccacggccagtgtttctgtggaggtggctgatgtgaacgacaacgctccggcgttcgcgcagcccgagtacacagtgttcgtgaaggagaacaacccgccgggctgccacatcttcactgtgtctgcgtgggacgcggacgcgcaggagaacgcgctggtgtcctactcgctggtagagcggcgggtaggggagcgcgcgctgtcgagctacgtttcggtgcatgcggagagcggcaaggtgtacgcgctgcagccgctggaccacgaggagctagagctgctgcagtttcaggtgaccgckcgcgatgccggcgtgccrcctctgggcagcaacgtgacgctgcaggtgttcgtgctggacgaaaacgacaacgcgccagcactgctagcgcctygggcgggtggcactggtggcgcagtgagcgagctggtgccatggtcggtgggtgtgggccacgtggtggcaaaggtgcgcgcggtggatgctgactcsggctacaacgcgtggctttcgtacgagctgcagccggggactggtggcgcgcgcatcccgttccgcgtggggctgtacactggcgagatcagcacaacgcgtgccctggacgaaacggacgctccgcgccaccgcctactggtactggtgaaggaccacggcgagcccgcgctgacggccacggccactgtgctggtgtcacttgtggagagtggacaggcgccaaaggcctcctcacgggcgttggtgggcgctgtgggtcccgatgctgcgctggtggatgtcaacgtatacctgatcattgccatctgcgcggtgtccagccttttggtgctcacgctgctgctgtacaccgcgctgcggtgctctgcgctgcccaccgagggcgcgtgcgctccgggcaagcccacgctggtgtgctccagtgcggtggggagctggtcatactcgcagcagaggaggccgagggtgtgctctggtgagggcccacccaagaccgacctcatggccttcagccccagtttacctgactctagggacagagaagatcagctgcagacaactgaggaatcctttgcaaaggttagtgtataacatccttttgtttaattttcgtattgtttttctctatcaacttcttcgtaaatttatttctaagagtcaaatttccctgggttaaaattttacctctttttacatatccattttaactaaagtcttttggaattataggacatcagagcaatatatattgccttccttcattttatgctgcattattcaatgcatattaacagaactgtaatttctagtaaattttcactatattcaccctctttgtttttggtaataatcaacattttagaaaacattttactattatttaacctattacatataaacaaatgtgcacaggctgaaataataaagctccataaattgtatgaaagtgaaaagctccgttgcctccatcgctgaagcccctcgcatgcacctgccaaatcacttcccttatttttcctccagtgtaaccgcacatttgccttttataactgtttgttcggggcctgttttgggaacgttatctaattggacttgcacaacatgtattgtctgtgcatttgtgtgttatttgtatttatcactcattgtttatgaaattatccatgttgttatatgtagttgtagtttatttatttctgtttctagtactatttcataaatatactataccttatttattctactgttcaggaatttgcattgtgcctcaatgtctatttcaaataatgccatcataaatatattgtacatttctttgatgcccatgtacacagatttctctcaggtttttgcctaagagttgtgtttgtgggtcacagaatatgtgtgtatctttgtcttttgtagctaacaccaaccaattttccaagatgtttttacctgtttacattcctagtagtgcataaggctttctgctgggccacatcatctctacatttgtcaggttattttcatgttagccattttactgggtgacttttgtaatctcattttgaaattattttatatttaaatgaagttgagtacctttctattttattttggcaatttttataccttattttgtgcaatagctgctcaaatctcctatttctctagtctgttgtttttcttttcttttttctcttctttttgcttccatagaactttatttatttccttatcttgtttttcttattacttaaacaaatcttgtattctgaacataactcctttttttagtagttttcaacctcatggctagtttttaattcttttttgtcttttggtgaatagaaagtcataattttgattaaactcaatttatcaatttttgcttctgatcctatttcacaaagataattttctgtggtatcttttatttcattgtttacattacatctacaatccatttggaatatacatatttttatcattgttgtgaggtaggggtcaagatttatttttattycttcttattatttttattatactttaagttctaggatacatgtgcacaacgtgcaggtttgttacataggtatacatgtgtgccatgttcgtttgctgcacccatcaactcatcatttacattaggtatttctcctaatgctatccctcccccagtcccccacacctcaacaggccccagtgtgtgatgttccccaccctgtgtccaagtgctctcgttgttcaattcccacctatgagtgagaacatgcagtgtttggttttctgtgcttgtgatagtttgctcagaatgacggtttccagcttcatccatgtctctacaaaggacatgaactcacccttttttacggctgcatagtcttccatggtgtatatgtgtcacattttcttaatccggtctatcattgatggacatttgggttggttccaagtctttgctattgtgaatagtgtcgcaataaacatacatgtgcatgtgtctttatagtagcatgatttataatcctttagatatatacccagtaatgggtcaaatggtatttctagttccagatccttgaggaatcgccacactgtcttccacaatggttgaactagtttacactcccaccaacggtgtaaaagcgttactatttctccacatcctctccagcaygtgttgtttcctgactttttaatgattgccattctaactggtgtgagatggtatctcattgtrgttttgatttgcatttctctgatgaccagtgatgatgggcattttttcatgtgtctgttggctgcataaatgtcttcttttgagaagtgtctgttcatatcctttgcccactttttgatagggttttttgtttttttcttgtaaatgtgtttargttctttgtagattctggatattagccctttgtcagatgggtagattgcaaaaattttctcccattctgtaggttgcctgttcactctgattgtagtttcttttgaagatttattttttactaccattttttttgttggacttttaaaatgagtttggaagtgttccctctccttcawtttttttttttttggaagagtttgaaaacaattatcattgattcttctttaaaagtttggtagaattctccaggaaagatatctggttttgggcttttgttgttgttgttgttgttgttgttgttgttaggaggtttggattactgattcaatctccttactagttacagctttgtttagattttttatgattatgtcttggtagtttgtatgtttctaggaattaatcaatttcttctaggttattgaattttttggtatatgattttaawagcctcttataattgtggcatcaggtgtaatgccacctcttttgtttctgacttccagtctttttgtttttttcttagtctagctaaggggcttgtcagttttgttgttttttcaaaaaatcaactaagtttaaaaacttaatttaaactttttttcatttatttttgctctaatctttattatagtatttcctccctttgctttgggcttcctcatttgtcctttttttctagttccttgagttgttaagttttttatttgagatctttcttctttcttcatttttagtgtaggcatttacaactcccttctttgtttttgttttcatgtttaagagacaagatctcactatgatgtacagaggcacgatcatagctccctgcaagtgatccttgtgccttggattcccaaagcactgggattacaggcgtgagccactgagcttgcccagcttaatattccttcttagtactgcttttgttgtatcctgtaagtttttattgtgttgtgttttcatttttgtttatcttaacatattttctaattcatcttttgatttcccctttcattcaaatgaaattttgaacagaatttcgttcaaaattctgttgtttaatttctacatatttgcagattttccagttttaattccagtattgatttctagttttattccactgtggtcagaaaagatatttagtaggatttcaaccttcttgaatttgttaagacttgttttgtgacctgaygtgtgatttatcctggaaaatgctctgagtgtgcttgagaagactgtatatttgctgctgttgggtggaattttctgtatatgtctgttagttccatttcagctatagtgttgttcaagtcctctgcttccttgctgattttctgtctgaatgttctattccttattgaaagtaggataccaaaatctcctactacagtcattggagatacattctgagaattgtatcattctgagatttcatcactgtgcaaacatgagagtgtacttacatatttacacaaacctagatagtatagcctactacagacctaggttacatgatctattgcttctaggctacaaacctgtacatatgttaactgtactgaatactatagggaattgtaacacaatggtaagtatttgtatacctaaatatatctaaacatctaaaaggtacagtaaaaacattgtacagatttttaaaatggtacacctgaatagggtacttaccctatgaatggagactgcggggctggaaatttatctgcatgagtcaatgagtgaatggtgagtgaatgtgaaggcccaggacattactgtgcactaatgtagactttaaagcactatacatttaggctacactcaatttatcaaaaaattttctttttacaggctggtcatggtggctcatgcctgtaatcccagcactttgggaggctgaggaaggaggatcacttaagcccaggagttcaagaccagcctgggcaatatagtgagaccctgtctctagaaaataatttttaaaaattagctaggtgtggtgacacacacttgtagttccagctactcaggaggctgaagtgggaggatccttgacttgaggaggtcaaggctacagtgagctatggtcgtgccactgcactccagcctgagcaacagagtgagactctgtctcaattttttttctttcttcagtaataaattaaccttagcttactgtaacttttcaactttgtaaacttaaattttttaaccttttgactcttttgtaataacgcttagcttaaaacacaaacacattgtacagctgtacaaaaatattttctctttatatccttattttacaagtttttttgacttttaatttttttatttttttcacttttacttagtgtttttttttgttgttgttgttaaaaatgaagatataaacacccatactagcctaggactgtattgggtcaggatcatcaatatcattgtcttccacctccatatcttgtcccactggaaggtcttctggggcagttacacatgcgatgctatcatctcctatgataacaatatcttctagtggaatacttcccaaaagactttcctgaggctgttttgtggtgaccttttttcttttttttttttgagttaatgtattttttataagtagaaagagtacactgtaaaataccactaaaaagtatagtaaatacataaagcagtaacatttactatctgtatcaagtattatgtactgtaaattactgtacataattgtatgtgctatcttgtacttttatataactggtagtgcaataggtttgtttacaccaacatcaccacaaacatgtgagtaatgtgctacaacattatgactgctacatcatcactaggtgataggaatttttcagctccattataatcttatgggactactcttgtacatgtggtctgttattggttgaaacgttgttatacaacacttgactttattgtattgctatctatttctccatttctgtgaatgtttgcctcatatatttaggtgttttaatgttgggtgcatatgtatttataattgctatgtccttctggtgaattgaccttttatcattatataatgtccttctttgtctcttatgacactttttgacttaaagactattttgtgtgatgtagctgtttccacatttgcactcttttggttacaatttgcatgaaatttttttaatatcctttaactttcaggctatccaggtctttaaatctaaagcaaatctcttgtagttagcatataattgggtctttaaaaaaaatcaattcaaccactttgtatcttttgattgggggagtttatcccatttttatttaaagtaattattgatagggcataacttactgttgcctctttgttaattgttgtttgcagcttgtagactttttgctcctctttcctyctcttactgtcttcctttgtgttttattgagaattgtaatgctatgtttttgttcctttcctgttttcttttgtatatcttccataggtattttctttgtggttaccatggggcttacattttaaaactcttataaaaatgtattttaaactgatarcatctttactacaatcacaaaacaaaactcattatgtttacttctcccctacccaaattttatgttattgatgtcataaatacatctttttatattgtgtatacattaacattattttatagttagtttttctgtacttttgtcttttaatcagattttaaaatatcagattttaaagtgacttttgtaccaccattacagtattatagtattctgtttttatctatatatttatctttactagtgagctttatactttaataaaatacctatgtatttctgtttagcatcccctaattttaactcaaaaggccccctcttaacatttcttgtaaggcaagtctaattgtgatcaccttcagcttttgtttaactgggaaggtctttatctctttttcatttttgaagacaaactttggtggatttggtattcttggctggcagttctttttcttttcagcactttcagtataacatctcacccctttctggatggcaaggtttctactgagaaatctactggtagagttaggggtgttcttttgtacgtgatgaggcatttttcttttgctgctttctaaattcttaacatttcttggatcttgatgtccatttccttcctcatatttgggaagttttcagatgtaattttaaaaaataagctgtctgtccttttctcttatggcttcttcttttgaaactgtcataatgagtagagcagcctgctcgaggatgtcctatcaatttcttaggctttctttactctctttcatttcttgctctttttgctactctgtctggataatttcaaatgatgtgtccttgagttcactgactcattcttctacttgattaagtctgctgttgaacatgtctgtaaaattttcagttcaattattgtattcttcagttccaaaatttctttttagttcttttgaatattttctatctgctgaaattctgattctgcttatgcattattttcctgagctcactgaacatctttatgacaattattttgaatactttgtcaagtaattcacatagctctatttctttaggtttggtttctggaggtgtgtttgtgtgtgtgtgtgtgtgtgtgtgtgtgggcacgcactatttgattgggccatgtttcctgttttctcatattccttattactttgtgttgatatctatacatttcaaaaaaacaaaaaacaacaacacaccagctacctcttccagtctttatggactggatttgtacatggaaagatctttactaatcaggctggctagagattctagggacctctcaaaccttttctgtggatgcatcttctatggacttgtgtgtataattcctaattagagggatctgccagcttttttttttaagatgctctaatctttttccctctgtggtgtctgtgtgctgtactgtgggccctctggagcagcagtattcactcagctcttttaggttctgagaagccctcagttatagattctgctgaatcctatcagtgcctggagtcaagtgagacagaaacttggactgcccactaaaattcaggaactttggatgcattttactctctctttccctcatgagagagagagtgctgagctgagtttctctctgtgtgctgtatcacaggtcctgaggagcatcagcccgccacccagctctttattattctgagctgccctcaggattttagaatatgccaggttccatcagtgctctgagatatgcaagacagctcccctgaaaagtcagaacactgaatgcatgctttactttctctttcccttctcagggagaagacaggagctgggaatttccccctgtttgaatggaactgtgctgctggatgggactatagggaaagtgccccagaaaagtgcccagctagttttacacttgcttggagcccaggaccctcttaactggtttcggcacttatcaccatgggaattggtccttgtattgttgttgagttggtatacctgtggagggtctggggattcctataacagcatcttgctgatgtcactacctctgttatctttttaagctatatatgcttttacaaattattttattgatttcctcttttgttgattataacacacatccttgacttattacctcaattaaatcaataattttaataattccaggcaacgctaagaccttgaatcattataccatttacttgtaccmtactttttgttactgatatgcctttcaattatttatatgttctagacacacagtacattattatcattgttttgttaacacctatatatgtttctttctgggatcattttccttctgaagaaattaacatttcctttagtgtggcctgctggtaaagaaacctttacgtttttatatatctggaaatgtcttaattttactatcacttttgagaaacagttttgggtattgaatgaaagttatttttgccagcacttttaagatgacattccatggtcttcttttgagatgatggctgtcaagtttattgttcaattagtgtgtctttttttctgtctagctactttgtatacttactctgtttttcacttttaacagctttactatcatgtgcccagtgttaatttgctttgtttttaatctcgcttgcagttttcaaagcttcttatatctgtgggttgataatattttatcagtttaagagaagatttagcagtatgccttcaaatacggcttctacttcatattttctcttatattcttctgtgactataagtacatgtatgttaaatcttttcaccatattccttgtcttttatgtgccatttctgtttttaaatcactttttctctttgtttcataatccatgttttattctgacccatcttttactttaggaattttatcttgttattctaggccactgtcaaagtcattgattgaattcttaacttgaatcgtggcatttttccattttagaattttattttcctttttaaaaatatatttctaacttgggtactggctaatgtcaaaagaaactttcctcccacaaagttttcactcacttgatcttggattttaaaatcagatataacctgagagattatcatttttctccrtttaataatgaatcaggccaggcatggtggctcatgcctataatcccaacacctgtgtgggccatgacaggaggattgcttgagcccaggagttcaagatgagcctgagcaatatagggagactccatctttacaaaaaatgaaaaaaattagctagatgtggtggtgcacacctgtggtcccagctacttgggaggctgaagttggaggatggcttgagcctgaggctgcaatgaactttgactgtaccactgcactccagcctcggtcagagtgagactctttgtcacccagttgtatagaatcaactataggtagaggcataaaaaagatgcctgagattgcatctcttgaatttagcttcattgtccctttctattaagtgagattatttgacatgaacattgatattcactatctcagggatatgttagaactattctcatattttctatccacagaggatatataatatggatattttagcacattcccttatagggcagttataccttcctctgtgactcattatacaggcagcgctaagatgtgtattatatgctcatggtatcctttcttactatccttataatagaataaattaatttttatacagaattaatttttgaagaatcaaatgacatatgtgcataaattatttatacatttttatacaattgcttcaacatttcctcttctctgcaatctggtatatctatataatttctatagataagagaagaaaaatatagcttattaaaattttattctgggttttgtaaggaataaaggacatttgtacccttatgaagattaaattttcttgtgttagtatatttctaaaggcttttagtgaattaaatggagacactttaatatactacacagttttaaatctaaatttttttctcaagraagaacttctgtttacacaatgatgcttaaacatgactgaaatatctaaaggagaggttaactggatcagtcaagaaaataatctgtaacatttgattgaagaaaatagcttagaagaagattttttaaaatgttcttttcctgtggagtctcccatgaaattcagattggataatctatagttactgagaaaggaatattcaaaataagagttgatcactgtagcacaaatgcaagtgataatttaaaaagtaaatataatttaacagatatgaaagtgaatcaaaagtcaagagtcttgtttcctcctgaaatatctatataagtacatgagatattttttccagactgagaggagcatgtgaactgatattgttgatgactttttctccattgagtatatcttttaaaatactcagtatttatcataatactctgcagattacaatgtacacattgttaatactacattgttaatttgccttttaaatacttaatatttacttttttcaaaggttatctttgtgtattttgtataaaattctactataatttattccatagctttgtagttttacattatttactgttatataatagaaagtggctaacatcagctaatgctgttttctaaatatttattatcattttcttatgtttttaaccattgtgtattaaaatatttcaaaattatcagtatgaaaactattaggcaaatagtctgggaaattgatttgtgtttcaacgatccaaatattagtgaaaagtcatgataatagagatagtaaaaatcttataagggaactggtaaatatatctttaaagattgtatcagaaacaattctrtgacaatatcttgtttctttacaagtttgaattccagaaatcaagtgaatttcctctgactttgcattttctggtaatttcttttttcttatcaagctatattttaaatgtaaaagtatccaacaatagaattgctaatctcttggtccctcttgtcttcacaggtaagggatattttgtaatatttaaggaattttatggagtatatatacaagcagaatgttagctatttcttcaatagaaaacttggtgatattttcttttgcccatatttattaagtgaagtttactaaattttctaggtcgtgttcaaatcataccatccagtaaacagttgggagattaaaaagtaattaaactaatataaagatagcctggttaataaaatgatattcttttcaacatgattatatttactggaacctaaacattttgtgaaatagtatgtcatatagacaatattaggattttgacttgttatgtaagtacaaaggtatgtattttacaatttttaataattgctttatcagtaatagcaacktgaagaaatgctatctagatgcttctaatttgaaaatagtgcaaagacgatttaccaaagtcgttctattatgcttttgatttctagaaagctgaaatatccccattacagtttttgagtcaatacaaaaagtagataggtgttatagataaagaaataggttttcatcgatttgaaaattagamctccgagaagaaactcaggtaagaatgccattaaaatagttttagttgtttttgaaaataacatcaacaaaatgtcactattaaacagtgaaattggaataaaaatttgttttatgagtaacacggagatagcatacaaacattccattgactaatacagaaaaaactcaaaagttttaattagatatgtttaaatagagatgagraaagtcaaaactttaactcttaaaagttatttttatcagtttggaaatatataaactcctccctatataaaatacaccagcacaaatttctctagtaaggattggggtttcatgactttagatgtatttttctgtaatattttaatgacgcacttatattgacgcattttaagatagagtttaatgatatattttgactagagataagtgatttaaagaataagaatcatgtcattgaaagtgagaatacttgagaaatattgacgaatataagctaaataaagcaaaacaaaataaaacacttaccctttcatccacatgatgtcgctggacaccggaaggtttttctcccttcccagcctcaaaggaatacagtgagtagattttccttagacagaaagraaaagaaccttccatttttggctgtgccaagaagctcagaaaggygataatataaaaaatatatagttaattsggaattgaatttacaaaatacattgtgtggtgatgcaatagaaagytcataattggaacgagattgagatggtatattcccggagaggaagtctgggatcccggctcctgctgctctggcttctcytygcctactggaaggcagggagcggccagctccactactcgatcccggaggaagccaaacacggaaccttcgttggccgcatcgcgcaggacctagggctggagctggcggagctggtgccgcgcctgttccgggtggcgtccaagggccgcggrgaccttctggaggtaaatctgcagaatggcattttgtttgtgaattctcggatcgaccgggaggagctgtgccggcggagggcggagtgcagcatccacctggaggtgatcgtggacaggccgctgcaggttttccatgtggaggtggcagtgaaggacatcaatgacaatccgcccaggttctccagacaagaacaaagattattcattttagagtcaagaatgccagattcgcggtttccgctagagggcgcgtcggatttggatattggagcaaatgcacaattgagatacaggttaaatccaaacgaatattttgacttagatgttaaaacaaatgaagaaraaacgaactttttagagctggttttgaggaaatccttagatagagaagaaacacaagaacaccgtttattagtgattgcaactgatggaggaaaacccgaactaacaggtacagttcagttgttgatcaatgtattggatgctaatgataacgccccagaatttgataaatccatttataatgtcagattgttggaaaatgcaccaagtgggrcattagttattaaactgaacgcctcagatgcagatgagggcatcaataaggaaatagtgtatttctttagtaatcttgttcttgacgatgtaaagtccaaatttataattaattctaatactggtgaaataaaagttaacggggaactggattatgaagactataactcatatgaaattaatattgatgccatggataaaagtacattcccattatcaggacactgtaaagtagtagtgaaactcctggatgtgaatgataataccccagagatggccataaccamccttttcctgcctgtcaaagaggacgctccactcagcacggtcattgctctgatcagcgtgtctgaccgtgactcaggtgccaacgggcaggtgacctgctccctaatgccccacgttcccttcaagctggtgtccaccttcaagaattactactcgttggtgctggacagygccctggaccgcgagagcgtgtcggtctatgagctggtggtgaccgcgcgrgacgggggctcgccttcgctgtgggccaccgccagcgtgtctgtggaagtggccgacgtgaacgacaacgctccggcgttcgcgcagccccagtataccgtgttcgtgaaggagaacaacccgccaggctgccacatcttcacggtgtctgcacgggacgcggacgcgcaggagaacgccctggtgtcctactcgctggtggagcggcgggtgggcgagcgcccgctgtcgagttacgtttcggtgcacgcggagagcggcaaggtgtacgcgctgcagccgctggaccacgaggaagtggagctgctgcagttccaggtgagcgcgcgcgacgcgggcgtgccgcctctgggcagcaacgtgacgctgcaggtgttcgtgctggacgagaacgacaacgcgccggcgctgctggtgcctcgagtgggtggcaccggcggcgcagtgagcgagctggtgccgaggtcagtgggtgcgggccacgtggtggcgaaggtrcgcgcagtggaccctgattcgggctacaacgcttggctttcgtatgagctgcagccagcgcctggcagtgcgcgcatcccgttccgcgtggggctgtacacaggcgagatcagcacaacacgctctctggatgagaccgaagcaccgcgccaccgccttctggtgctggtgaaggaccatggagagcccccgctgacagccacagccacagtgctggtgtcgctggtggaaagtggccaggcgccgaaggcctcatcgcgggcgtcggcgggcgctgtgggtcccgaggctgycctggtggatgtcaacgtgtacctgatcatcgccatctgtgcggtgtccagcctgctggtgctcacgctgctgctgtacaccgcgctgcggtgctcggcgcagcccaccgaggccgtgtgcacacggggcaagcccactctgttgtgctccagcgcggtggggagctggtcgtactcgcagcagaggagacagagggtgtgctctggggaagctccacccaaaacagacctcatggccttcagtccaagccttcctcagggtcccacctctacagacaacgtgagttttytaatattaacatccatctttccctcccaattttcaaatattaaatgtcacattcacccactttttttgtatttaaaaattatgtyttagtacacaaatattgtggtacacaattattgcactaattcatgtattatatgctttttatgaggcttttctgctggggtaatagattcatcagctttytgtgatattaagtgtttttaaaataatattttatattagcatttgaattttgcatctctaaaaatgtaggataataattgtaagacatagtttggagtcattctcaaagtttcagtttatgactacatgaaaatttattttattttattgttattttttagagaccctttgttgcttagtytgcagtgatctgatcatagctcaccgaagcctgaaactcctgggctcaagtgatcctcctatctcagccgcccaagtagctggactacatgcacatgctaattaaagttttttttttttttttttttttwttttctgtagagataggggtcttgctactttgcccaggctggtcttgaactcctggtttgaagccatgctcccgtctcagcctcccgaagtactaagattacaggattgagcaagagtgcctggcctataaaaatgttttaacaccacccttccaattttgcctttttgtttctattgaatttaaattaattattattttattacactaatttagtttgttttcaattgtatttttgcagcatatggtttatttcaactttgcctaagcagttcacctgtatacccatgatgaatttgataattgtaatttaaaaattatatttttcattttattgattttttgaataggaaacacatatacatggtttactgttctaaaggtgcaaaagaatacagttaaattttccctttcacctccttcatgaagccaraacattctctggtatccttctagagatttttttcatatacaaataaacttccctacccccttaaaaaacatatgagtattgattttaatcttgcttttttcatttactaatgtatcttgatgatcatgaattatcattactgaagtagatttgtttttcttttatctggatctatggtgttccattgtgtaggtatgtgattggttatttttcccttaacattaacatttagtggaacaatgatttaattttctggaaatttgcatatttttcaatatatctaatatatattagatatataaatatctaaaatatctaatatatatctaatatattatatattttatataatatatataataaatatataataataatatatatcagatattttgatacagaattttgctcttgttgcccaaacgagtgcaatggtacaatcttggcctcccaggttcaagcgattctcctgccttatcttcccaagtagctgggattacaggcatgtgcccacacctggctaattttttgtatttactagagacggggtttcaccatgttggtcatggtggtctcgaactcctaatctcaggtgatttacccgcctcggcctcccaaagtgctgggattgcaggcatgagccatcgcgcctggcctaaattattatattgatgaggagtaactgtgaatctcctcagttgtgcaaattctactatattttggttgggaaattttactgcttgttgttacttttagattaaaaaaataaatataccatgatacaaactcccctcttgagttgtttacaaagagttgtttattaaagctgtatgtttgagactacgctagacaggtgtcctctccatctgaaataatgagaaccatttgtctactcttttgaggggaaaagtatggatttataggtagtaaatagtccacactttacatgataaaatgtgaattccctatttctgttgctttgcctgtttcttttattctcatatgcattcaattttataagtacccttctatcatgctatttatatattcctaatatcctgagctactttgaggaagtcctagaaattgagaaatagtttttgtcattctataaatctaaagttaacaatggtcacattttaaaaaatcaagttttgtgatataaactatttatatatctctttatatatcaagtctttatgtatattttgtgcagcttgtcttttttataggaacctcttgttttggggattgtttttggttaagaaattgaaccctttgtttgcccaaaataactgcaatagaaagtcagtgataagaactactaaatagatccaggttaattattttaagatagaatttcacatggaagaaaaggctttgtgtcacaatcatctgtgaggcattttactgtatatcagaattttggagtaaggtgaagatgatcatgtcatttgaaaagtcttattggtgactctatttttctcctttgaaggaggggtttaatcacttcaaatggataacattaaggttaaattaagggcgaagttgatatttggccctgacttttatatgaaggtaacatttttgcaagtaaattgtagacgtaattwaaaaaacccagctaaaacaaaggtggtattgagaaagaggaagagcaagtggtctatattgtcagaaaaataagattcatattggagagtaattgaaaataacctgcaaaaagttgattacctaacatgtgattacatattaggttactagaagtttctcaagtgtcttgcaatttctaggtttagtaaaattcaatgaaagctgtactcataaagataaatatgatagcatgtgaaagacagatggacttaggtggatgtggaataaggcaagccagggaaaaggagtaatttaaaaagtaatataggtgacatgggaaatgctcatgtcattaaaaatatgaatttaaaaatttgaatttggggattattaataattgctcatgccttgctatttaacaaactattttctaggagtcagcatgtataggtgaaagtgacaattagaaacatagaaagaagggatgcagatatggatttktaaatacctcaataaaagtcttattcaaaacttggaagtgagtgagaacaattaaaggaaaggatatgggacagggttgaagttgagagagaaaaacgagatcatttaggaacagctgaagaatcaaaaacagcaaagcacaatgggtagaaattccactagaatttgaagtggtgaagtatatgaaaagaaaatattttaagcaagaatcctaatataagctgcagataaattaaatgtgataaagaatatgctctagaattttatcttccatcattacacagaagaaccttaagagcatctgatatttattgaacaaagaaagcatggacttcaataatctataaggctttaaaaattcaaccaaaatttgataattttaagttacattttttccctagagcactatataatagcatgtcctaggaaagacagatgtgggcaagtttcttttctaccaagagtgtagaatagtttacatttctgatttaaaaagcagttccgttaacacttaaatttgctgaactggttgatattaatgttgcaaatattggtagaaaagttgtttagctgtgaataattagatcccttactttaaattaataaaagaagtcgggataacactgaccgtgcaaattacaaacgtgaggagggtttactataaaagtagagaaaagaagatactgttttaaaaatatatggtatagcactgttacgtgaattgatttcttaccttttggagccgcatgatgtcgctgtctaccatgaagttatagctagccaacattcaaatttcttctattactgcatcattccctgactgttgaatgatggcggacgcagaagaaatggattaataaattccggaacatacagtattttatctttatgcggaagatcttctaatggaaataaaaccagaggtatttgacatggtgtttaccccggaggatagattgggaaagcaatgtctgctcctcccgcttctgctcctcgcagcctggaaggtggggagcggccagctccactactccgtacccgaggaggccaaacacggcaccttcgtgggccggatcgcgcaggacctggggctggagctggcggagctggtgccgcgcctgttcaggatggcctccaaagaccgcgaggaccttctggaggtaaatctgcagaatggcattttgtttgtgaattctcggatcgaccgcgaggagctgtgcgggcggagcgcggagtgcagcatccacctggaggtgatcgtggacaggccgctgcaggttttccatgtggacgtggaggtgagggacattaacgacaacccgcccttgttcccggtagaggaacaaagagtgctgatttacgartctaggctgccagattctgtgtttccactggagggcgcgtccgatgcagatgttggctcaaattccatcttaacctataaactcagttctagcgaatacttcgggctagatgtgaaaataaacagtgatgacaataaacaaattgggctcttattaaagaaatccttggacagagaggaagctcctgcacacaacttattcctgacagccacagatgggggcaaacctgagctcacaggcactgttcagctgctggtcacagtgctggatgtgaatgataatgctcccactttcgaacagtctgaatacgaagtaagaatattcgaaaatgcagacaacggaacaacagttatcagactgaatgcttctgatcgggatgaaggagcsaatggggcaatttcatattcttttaatagccttgttgcagccatggttattgaccactttagcatagatcgaaatacgggagaaatagtgattcggggtaatttggattttgaacaagaaaacttatacaaaatcctcattgacgccacggacaaaggccatcctcccatggcgggtcattgcaccgttttagtgagaattttggataaaaatgataacgtccctgagatagcactgacttccttatccttgcctgtacgtgaagacgctcaatttggtactgtcatcgccctaattagcgtgaacgacctcgattcaggtgccaacgggcaggtgamctgctcsctgacgcctcaygtccctttcaagctggtgtccaccttcaagaattactactcgttggtgctggacagygccctggaccgcgagagcgtgtcggcctatgagttggtggtaaccgcgcgggacgggggctcgccttcgctgtgggccaccgccagcttgtctgtggaggtggccgacatgaatgacaatgctccggcgttcgcgcagcccgagtacacagtgttcgtgaaggagaacaacccgccgggctgccacatcttcacggtgtctgcgcgagacgcggacgcgcaggagaacgcgctggtgtcctactcgctggtggagcggcgrgtgggcgagcgcgcgttgtcgagctacatttcggtgcacgcggagagcggcaaggtgtacgcgctgcagccgctggaccacgaggagctagagctgctgcagtttcaggtgagmgcgcgcgacgcgggcgtgccgcctctgggcagcaamgtgacgctgcaggtgttcgtgctggacgagaacgacaacgcgccggcgctgctggcgcctcgggtgggtggtactggtggtgcagtgagcgagctggtgccgcggtcastgggtgcaggccaagtggtggcgaaggtgcgcgcagtkgacgccgactcaggctacaacgcgtggctttcgtatgagctgcagcccccggcaagcagcgctcgcttcccgtttcgcgtggggctgtacacgggcgagatcagcaccactcgtgtcctggacgargcggactctccgcgccaccggctgctggtgctggtgaaagaccacggtgagccggcgctgacagcgacggccacggttctggtgtcgctggtggagagtggccaggctccaaaggcgtcatcacgggcgtcggtgggcgccgcgggcccagaggcggcgctggtggatgtcaacgtgtacctgatcatcgccatctgcgcggtatccagcctgctggtcctcacgctactgctgtacacagcgctgcggtgctcggcgccacccaccgagggcgcgtgcacggcggacaagcccacgctggtgtgctccagcgcagtggggagctggtcgtactcgcagcagaggcggcagagggtgtgctccggggagggcccacccaagatggatctcatggcctttagccccagcctttcaccttgtcctattatgatgggtaaggcggagaatcaggatttaaatgaagatcatgatgccaaagtaagtgaattttcataattaacagttaatttttattttaaatttataattgttttcctcatatttgtcttctatatttctgtttttaatttttaattaattttacaaaattacatattttcattttattgtgtttcttattttaatctctttgcttctttaatattcataatttaastgaaattagaaatcactgtccacaatctgcacctcagaatttttgtcttcaaaccaaaatattcttggatatgtcgttttctgttgcattttaattcagaatcatagtagcatttttttctgattaattatatgggattttcatttgtttgcctttgagctttaggataatttttttacatatactcttttttgatcatatattgaaatttgagcaccagtgtatcacttatgtttttacactttccatttcaatgtttttctgtcgacacttttattaagctaacgctttgattttatccattttgtgtaagaactctgatcatcatagtttttatctgtggttcccttttcagacttgtgattccrggaggcaatagtgttcatttattgtcccccttttaaaccattgaggaataaaggacaaaaacaatagttatcagcctgaatacttctggttgttatggttattgatttatttactaccgatctaaataatggaaaaatagtgaytcaacagaatttagaccttgtgatcaagtaaatttatatgaaaactgcattcctctggcattgcggctctcttatttctgtttgaatttcacttgatggtcttctcttcatggagtctaaatctatttctttgtattagtgttttcattgtttctacmcagtaatttaaactattcactattttgtatgtgtgtgtgtgtgtgtgtgacagggtcttgctctgtcacccatgctggagtacagtggtgcaataatggctcactgcaccctcgaatgcctgggctcaagtgattctctcacctcagcctctggagtagctgggactacacacgagcaccaccatgccccccaccttttttttttttttttttttaagagatggggtttctccatgttgcccaggctggtctcaaactactgggtgcaagtgatctgcccaccttggcctcccaaagtactaagattatagrtgtgagccactatgcttggctagtcattatttctttgaatgaaaagcagcaaaaagtagtgattaagtgtgagttttggtgttatcctcccttgcctaaatttcatcgctaccaattttgttttgtggatggattgtttcacctctatttcagtttcttctgtaaagttggaatgataaacactagtttcaatgatagaattgtcataaagctttagtaagttgatattgtaaggcgcttataactgtgtttgccaaatagcaagtgcttaaaaaatttgctactagttttccgaagaggaaaagaaaaactttatgtcattttatgctaggaaactctcattacggattccatattgttttcattttacgtaaagattgaatttttgttattcatagtgaggccataattaccaatttaatctgagatgtctctaacattttaaatgccatgttctacattaaaagcaatttaaaatgtgtgtttcaaagttgaaaattgaattaagacttggacagtggaaaagttttatgaattcaaaagacatttaacctgctgagtcctcagtgatttcctggagttggttttgactttttgtgttgtccatgttcccaggaaatattagactacattaagcatgaatggtgtatttgcccacatttaaaagttgcttaagggccattagaggactgagttgtggtttgtgtttcctaatgtgagcattttccattcttgaaatggcagaaactggtagtggtattttctgttttctaaaagaagtacatgataatttttaagcgtgtaattaatattgcactaaaatttaaaaaaactaactctacatacttaagagtggcagaattgtctctgattatactgaagatcaccatttgtgtagctaatgatatctaacagcctcaaaacagcatactttcttaggaagtagagaactatagcgttgctagtgagtaaatgttttttaaaaagttcctaggagggtctttaagagtatcacactgtgcctgctgagaatcatcgaattaacaagacctggcttcaaatttaatagataaataaaggtaagtatcctrcataaatacgatgatagtaaaagcaagaatattgtaagaggtgctagaaaggtacatcatagtgttattggaattggaaaaaaatctttgcctttttcccttgttgaaggagaccgtgaagagtcatgatgttttactggttataaaatggaaagagttttccctgggagaatatggagactaacaggtattcatgagaagagagtaacttaagtgagtayacagaaaattccaaatgtacctagaaatgaggaatagtccactttgggtaaagcacatggttcccataagagagagtgtgatataaagcaagaaaagtaatatgagaaaaaccttttgtataactttgagtactagaygagtaattttgacactcttcaaagtcatttgaaagctgtcaaaaagtgtgaagcaatacgaataaaaagtattaacggaagatgactgcaaggattaaatgaaggagaatgaaataggaatggacaggttacacaataagaagctactgcaatacaccaggagagcagcaattataaaaacttatttaggaaagcatctgaatacagacataattattttacatgccattgggaacattggagtgaaacattccagaaaacgaacacagtaaggtagatccaaaaaggatgaaatacctcaagacttgatcaaagggctgctgtatgtgagatggctgagcactgaaatttatctaataaaataaacttacattttaaaagaaataatacaaatcatatttgagattgtaaaaataggcatatattcataacacacaagtgttcgaaaggatagaatgaggaaacaaatataaaatgatgaactcctgaaacagtatatatagattctgctaaagcaaaaaattcagaatacttcctcctcaaaaagttcacatgatacaaattcttccccttcaaagattccccaaaccttctcttattttgttttcccaagagaagtgtctggatagttgctaatgtttcttgcctcctaaaaagaaaacacacacacacacacaccgctttctaagtttctctttcatcaatcagtagattcttgagatcctgggtccctaaaagagtacaggatttttcttaacaagcgatactgaatcaagaatatgaagtttcctgggatctagatcaaaggaatttaaacttgcagttgtttaaattcatgttgtcacttaggtttctatctttatttaaaactgtgtgaaaaaaaagtttttctaaggcatgaggaagctacagttctggtaacactgagtattcaaaagccatcagtcgcctaagaatgcttctaacaatcatgagaaatgctattttaacctttaacaacaatgaagaaaaaaattcagagtttgaaataaaacttttcatctgattaatagtttgtaatggtttgtaattcttacttacatgatggccacatgatgtcgctctttaccgcaaattctttcrtaatcagcmaaaggaagtcattccttttcgcactggaaagacgctccactctctttcactctttggatgcacaacaatggccacacatmgagattgaaatgaagggataaaaacattcctataaattcgaaggcaagttttgctgactagaaaaacaagccaataatttgaaatggtgtgcccgaatggatacgacccagggggccgacatctactgctgtttattataattctagcagcttgggaggcagggagaggccagctccactactcggtccccgaggaggctaaacatggcaacttcgtgggccgcatcgcgcaggacctggggctggagctggcggagctggtgccgcgcctgttccgggcggtgtgcaaattccgtggggatcttctggaggtaaatctgcagaatggcattttgtttgtgaattctcggatcgaccgcgaggagctgtgcgggcggagcgcggagtgcagcatccacctggaggtgatcgtggaaaggccgctgcaggttttccatgtggacgtggaggtgaaggacattaacgacaaccctccggtgttcccagcgacacaaaagaatctgttcatcgcggaatccaggccgcttgactctcggtttccactagagggcgcgtccgatgcagatatcggggagaacgccctgctcacttacagactgagccccaatgagtatttcttcctggacgtgccaaccagcaaccagcaggtaaaacctcttggacttgtattacggaaacttttagacagagaagaaactccggagcttcatttattgctcacggycaccgatggaggcaaacccgagctgactggcaccgttcaattactcatcacggtactggacaacaatgacaatgccccagtgttcgacagaaccctgtatacggtgaaattaccagaaaacgtttctatcggaacgctggtgattcaccccaatgcctcagatttagacgaaggcttgaatggggatattatttactccttctccagtgatgtttctccagatataaaatccaagttccacatggaccccttaagtggggcaatcacagtgataggacatatggattttgaagaaagtagagcacacaagatcccagtcgaggctgtcgataaaggcttcccacccctggctggtcattgtacagttcttgtggaagttgtggatrtaaatgacaatgctccacagttgactctcacttccctgtctctccctattccagaggacgcccaaccaggtaccgtcatcacattgattagcgtgtttgaccgagattttggagtcaacggacaggttacctgctccctgacgccccgcgttcccttcaagttggtgtccaccttcaagaattactattcattggtgctggacagcgctctggaccgcgagagtgtgtccgcctatgagctggtggttaccgcgcgggacgggggctcgccttctctgtgggccactgctagcgtgtccgtggaggtggccgacgtgaacgacaacgccccggcgttcgcgcagcccgagtatacggtgttcgtgaaggagaacaacccgccgggctgccacatcttcactgtgtcggcgggggacgcggacgcgcagaagaacgcgctggtgtcctactcgctggtggagctgcgggtgggcgagcgcgcgctgtcgagctacgtgtcagtgcacgcggagagcggcaaggtgtacgcgctgcagccgytggaccacgaggagctggagctgttgcagttccaggtgagcgcgcgcgatgcgggcgtgccgcctctgggcagcaacgtgacgctgcaggtgttcgtgctggacgagaacgacaacgcgccggcactgctggcgcctcgggtgggtggcactggtggcgcagtgagagagcttgtgccgcggtctgtgggcgcgggccatgtggtggcgaaggtacgtgcagttgacgctgactcaggctacaacgcgtggctttcgtatgagttgcaaccggtggcggccggtgcgagcatcccgttccgcgtggggctgtacactggtgagatcagcacgacacgagccctagatgagacggacgcaccgcgccaccgccttctggtgcttgtgaaggaccacggggagccctcgctgacagccacagscaccgtgctggtgtcgctggtggaaagcggccaggcaccaaaggcgtcgtcgcgggcatcgttgggcattgcaggcccagagaccragctggtggatgtcaacgtgtacctgatcatcgccatctgcgcggtgtccagtctgttggtgcttaccctgctgctgtacacrgcgttgcggtgctcagcgccgtcctctgagggcgcatgtagtttggtaaagcccactctggtgtgctccagcgcggtggggagctggtcattctcccagcagaggcggcagagggtgtgctctggggagggcccacccaagacagacctcatggccttcagtcccagccttcctcagggtccatcctctacagacaatgtgagtcataaataatcttgtttccaacaattttaaaacaattagttcaattggtctccttaaattttctttcataatttcttttttagttgatagctttatgtataattattattttttaatgttatgctgtatttgcactaattatttggaagtacgtttaatatacacttttgttttgggatgcgtaatactatagatcaaaatctatggtttatgttggctactctycatttttggaggaggactttgctaactggagcaatggattcacctttcttctatagtgtatttacaaaatcaaatatttacatttccatattttgataatcaatacctataaatgttatagtaaacaaatttaatatatatgttacctaatattttattctatgtattgtcctcattttataaaatatasctgtgtcaaaatcatctgttcaattttgcctttttatctttagtctagaacttgaattttaagcatttcttttacatctatttatcttctttttatcatatttgtgtagcactgacttctttttaacttactttgttgaratgtatttgccatgttcatgaagaattaatatgaacaatttaaaatagtttaaatggcagtttaatagtattttttattttgttccttgtttgtataagaaatatattcacattcaaaatttcaaagagtgaaatctagtacgtagtaaaaaatctccttgcctcctcaaaccccaaaccatttactttacctttctgaatttctgaagcagtttacgtttttttgtatattcccaagattattattgccaaattatataaatatatttacaatcaccaaattgtaaatcgccaatatatatattttataatttgccccttccttccttccttcctttctttctttctttcttcctttttctttcattctttttcttttttctttcttctttcaagacacgctctcactccatcacccargctgctgaaatgcagtggtgggattatagcccactgcaacctgaaagtcctgggctcacaggatcctcccatctcagcctctggagtagctgggaatacagtttgcatgtcattgtgcctggctaattttattttatttttgtagagacagggtggagtcttgtttcccaggctggtcttgaactcctggcttcaagcgatcctcctaccttggcctcccaaagtattgggattacagacacgaacaaccacacccagcctgcctttcatctttccttttttttaaaaaaagaagtgattacagtagaaacctacctttctgcactttttggttttccactttaagttatattatakwgtgtgtgtgtgtgtgtgtgtgtgtgtgtgtgtgtgtgtgtgtgtgtgtgtgtttgacagagttttactctgtcgccctctctggagtgcagtggtgcaatctcagctcactgcaaaatccgcctctctggtacaagcagttctcatgcctcagtctcccaagtagctgggattaaagacgccaacaaccaagccatgctaattttttttttttttttgtatttttagtagaaacagagtttcaccatgttgccccggctggtctcgaaatctgggactcaagtgatctgactgcctcagcctcccaatgtgctgggattacaggagtgagccaccgcatccggcctaaattatatattgggttttgtggcatattatttcattagcgcttattccttgtttttgattatttgctttcttatttttaaaagtatttgcatcttattttcttttatggatatatcatgatttattcatccagtactgtattagggacattaatgaaacaataaccgaattgtctagacttttaaaaattttttacaaataatttggttggtcaaaaaaatgatagttaacggggcatggtggcacacacctttaaccccaacatttcgggaggccgaggcaggaggattgcttcagtctagtagtttgagaccagcttrtgcatcttttgtagagactttgtaaaattagctatgcatggtgatgcatgtctgtagtttcagctactcaagaaactgaggtgggaggatcacttaagccagggaggtccaagctgcagttatcatgccactgaactccagcctaggtgacagagcaataccttgcctcaaaaataaaataaaaygaaataataaaataaaataaaataaaaacccagaactgacaattttcactgttcctaatattctaatatactttagtaaattattttaggatatgttactgttttcttttcaacgtgaataaggatagaggtatgcaaagtcaaaaacctgtctgataatcaatagaattatttaccattaagccataatatgtcattcacataagcagaccaagtttgctgctcttgttgaaagaatattcagttttgtggaaaaatctataaatatctttgaccttcaaagatggtaactgtaatctgtttttattgctttgyttttatgcttacatgcatgtatatttaaaaccttcctagcatattattaaagttttaaatatcctatttatattgggaaatacctgaagttgataggggatcctccttagccacctaagctgtattcatcaattattatgatgatgatgattattatttttgagacagggtctcactctgtagcccagactgcagtgcagtggcacaatctgggcttactgcaatctctgcctcctgggctcaagtgatcttcctacctcagcctctcaagttgctgggactataggcacacaccaccatgcccaactaatttttgtattttttgtagagatggggtcttaccatgttgcccaggctggtctcaaactcytgagatatcgagaaatactattttctttacaaattgtttgctactatttagagtcaactacagagatttttttgggtaaataatgtgatgacaaatttaaatcatttcacagaaaatacccttattygcctttcctatttaacctacgtttttggtaagaattttgtagaaatttggaggagctcttaattgcctactatgaaggcattcatgatgaatccatggagaatttacttttgaggtggactttgaaagatgaatagaattttgacagaaaaagatgaagtaatagaagaaaaaccttgaacaaagagtgtgccaagaaggagacaacatattttctgtaaaatatgactcctattggaaagtggttagccttagcactgagaagattggctcatggtcacgtagcgtatctcccagatggaagtctaatgtcttgacaattagtcaatagaaagataaacttgttgaagattttagtgaaatcgagtgaaagctgtactaataaggacagaaattatcacacgtgaaaggagagatgggatgtatacaaattttaaatatggtaggcaaaggaaaagaagtcataaaaatacatatgagtaaatgtggagaatcactatgctataaaaattgtgattttttaatgatttgggttttgggtgattattgattagatattcttttaactttggtcgactcattttctaggcaatgttagggtatacaggtaaaaatgtcaggtagaaaatgaaaatagggggttgcagatatggagttaagaatacttcaaataataggctagtttaaagccgtggaaatagaaacgttaaataaaaagttggggaaaaaagtttaaaggcataattctggtaaatactcactttttggagcagaagaaagatgaagaactaacaagccaatgatggcaatactgctagagtttggcatgtcagagaaatcataaaggaaaatgttttaagtgagaggctgaatttaacaagctatagagatatagagaaatagtgtaaagaatatgcacatacatttttattactttagtaaataaaacggttcaggcaatttgacatttattgaataaagaaaagcaaaaatttaacaataagaacacaagaagataaaatgtagaaaagttagaattatatgctcacctcagagtaatatataccagtgtttctggtgaccaaataaatattaatgcatttcttccacacgaaactatggaggacagtttacatttctgatatccatgacatacaggtcatacttaaatttattattaattgatacgatatttgaaatattgggaagaaattcctttccttatgaagaagaaatccctagctgaaactaatgtaaggagccagacagtatgaatgcctctgcaattgataaagttaaggatttactattaaattatgataaagaaatagaaagtgcatagaagaacccagatattgcggaagtaattcatgtaatcattaccttttgaagccacatgatgtcgctgtctaccaagaagttctggttggtcaatgttcaaagtcttttctctgacagcatctgtctctaaaggccgaacaacgggagatgcagcggaattggattaaaagactctgaaagtacagtcgttcatcttyatattaagataatattttctgataggaaacgactatttaacatggattatcactggcgaggagagctgrgatcctggcgactactactcttgcttctgctcctcgcagcctggaaggtggggagcggccagctccactactccgtccccgaggaggccaaacacggcaccttcgtgggccggatcgcgcaggacctggggctggagctggcggagctggtgccgcgcctgttscgggtggcgtccaaaagacaccgggaccttctggaggtaartctgcagaatggcattttgtttgtgaattctcggatcgaccgcgaggagctgtgcgggcggagcgcggagtgcagcatccacctggaggtgatcgtggacaggccgctgcaggttttccatgtggacgtggaggtgaaggatgttaatgacaacccgccagtgttccgggtaaaagaccaaaagctgtttgtttcagaatccagaatgccagactctcggtttccgctagagggcgcgtccgatgcagatgttggakctaactccgtgttaacctacaggcttagctctcatgattacttcatgctagatgtgaattcaaagaacgatgagaataaactggttgagctcktattaagaaaatccttggacagagaggacgctcctgcgcaccacttattcctgacagccacagatgggggcaaacctgagctcacaggcactgttcagctgctggtcacagtgctggatgtgaatgataatgctcccactttcgaacagtctgaatacgaagtaagaatattcgaaaacgcagacaacggaacaacagttatcaractgaatgcttctgatcsggatgaaggagccaatggggcaatttcatattcttttaatagccttgttgaaactatggttattgaccactttagcatagatcgaaatacgggagaaatagtgattcggggtaatttggattttgaacaagaaaacttatacaaaatcctcattgacgccacggacaaaggccatcctcccatggcgggtcattgcaccgttttagtgagaattttggataaaaatgataacgtccctgagatagcactgacttccttatccttgcctgtacgtgaagacgctcaatttggtactgtcatcgccctaattagcgtgaacgacctcgattcaggtgccaacgggcaggtgamctgctcsctgatgccccaygtcccyttcaagctggtgtccaccttcaagaattactactcgttggtgctggacagcgccctggaccgcgagagcgtgtcggcctatgagttggtggtaaccgcgcgggacgggggctcgccttcgctgtgggccaccgccagcttgtctgtggaggtggccgacgtgaacgacaatgctccggcgttcgcgcagcccgagtacacggtgttcgtgaaggagaacaacccgccgggctgccacatcttcacggtgtcwgcgygrgaygcggacgcgcaggagaacgcgctggtgtcctactcgctkgtggagcggcgggtgggcgagcgckcgytgtcgagctacrtktcggtgcacrcggagagcggcaaggtgtackcgctgcagccgctggaccacgaggagctrgagctgctgcagttccaggtgagcgcgcgcgacgcgggcgtgcmgcctctgggcagcaacgtgacgctgcaggtgttcgtgctggacgagaaygacaacgcgccggcactgctggagcctcgggtgggtggcaytggtggcgcagcgagcragctggtgccgcggtctgtgggcgcgggccacgtggtagcgaaggtgcgcgcagtggacgcsgactcgggctacaacgcgtggctttcgtatgagcwgcagccagctgcaagcagccctcgcatcccgttccgcgtggggctgtacacgggmgagatcagcaccactcgtgtcctggacgaagyggactctccgcgccaccgtctgctggtsctggtgaaggatcatggtgaacctgcgctgaccgccacggccacggttctggtgtcgctggtggagagcggccaggctccaaaagcgtcatcgaggcagtcggctggcgttttgggtccggaagcggcrctggtggatgtcaacgtgtacctgatcatcgccatctgcgcggtatccagcctgctggtgctcacgctgctgctgtacactgckctgcggtgctcagcactgcccactgagggcgggtgccgggcgggcaagcccactctggtgtgctccagtgcggtggggagctggtcatactcgcaacaacagccgcagagggtgtgctctggtgaggggccaccgaagacggacctcatggccttcagcccctgccttcctcctgatctgggatcagttgatgtaggcgaagagcaagatttaaatgttgatcatggcctcaaagtaagtccatttaaatttagaactcataaattctatttgtggaaattgtagttactttaaaagtgtttcagatttagtttttcaccgtattttatagtgaaaatttaaacattgtttagtttttagaaaccttttataattaattgaattttctcagtggcataatacagtattaatcattctccacaagttgggtctatcttgaaactcaagttatggttggatgatatccattttttactgaatatttattttggcctgccttacagccgtcttctctgaacaatactctaaggacgttcagggcattttgatctttggtgaaagtattcccccaaagcgtttattcttttgtccttaggcactgaactcttaatcttactccatatgctgtactttgaaatgcatgttttaaatatgttgtctttatatttacttttattcactttaagatctcggtttattcatcttatctgactttttagtgtctggtagtcacaaatatctttggtgtttcactattgccgttttaagcagtgtagtgataaaatacagaatgatagtgtttttcaaaatttgatagttttcatattcttcctaattttattataaactagttaaaaagtaaaatcaagagggaagagatttgtaatccttcttttaattcattatttagaccattttaccatttggagacatgttttttattctacatgatttttacagttgtattgtcgccaacttaacattttttgagcctctatgtttaggaaatgattactttattcttgcaagtatcttctaaactctaatcattcaaccctttgttcatgagttggaatattttcaataatattccacattaaagtgatatttaatatatgacttagaaaaatgttttcatcagaaaaactatacatgataatttcattcttgcaaaccaaacatataatttataaatccttattatacagaatatttgggattatcatggcccattagttcgtgtaaaaatatttagtattatgggataaatctttgaaaaatccaagatactttattttggtatctttcaacattttctttcttttatttcttcttgtctttttacacgtttgcttcttgtgactgttggacctgcctggatattaaatacccattagacttcgtgcatattgctttggagagaatggtagaaattgatggaagggaatgaacgatttctgggactctgaattcttacagtttgttattagtattgttttaaatcttttaatcacttatgaacaaataatgtaatcatttatgggcatattttagcccccttgtccaactgaaggtaacctcaaagcagcattgttttgtagtttattttacagttctcttaatgcctgtccatgtttagcattttatttgactatttgaacacattgtgtaaaagcgaattgttttcattttagtcctttaaaaaatatgattgttttcatttaagtccttttaaaaaatatgattatctttattatcctgtttgaataatatgtgttttcctttgtgaaagtaatatttcctatcctgtctatgtctacctggttctcaggtattactttaattactgaattctcctaaacatttaattgacttttacaaaatatcataaataggaggattctttccaccacctagcattgtatttggcaatttatcatttaagtcattttagttctgtttttcttcaactctctgatatttgaatttggggttgtgctttcacagtgagaaagtctaaacctatttcttgtacattaatacttttcactattctaattatggtgatgcytttagctattaagaatttctgggattgaaatgtgtcagaagttagttattargtattgtggattctgaagctctctaaatcaagtcctccctttaccaatttttgtatgtgtagccattggtaaaggatttgttattcagttccttggcattatatgtatgcatgataaatgtgaattctactttatagatttatttgtatcaagtaagttaatagttataaattattaataataaactctggcaagtgataggtacataataaaatttagttattaccattcttaagagaaaagaagttagtgattgcagaaaggcaacctaaaatgtcagaaagtcgttatggccttccatattaatcttatttttgtgtaaaactatcttctgtaaagtcattttttagattaacctaggatgtttcaatattttgaatgttgtgtggtggaatgaaaaaaatctaaaagttattacgagtttaggaaagtcaagttaacaccacctatgtgggaaaacagttttttggaaaggttaaagtccttccaaggaatgtgtagactatcttactttgatagttgtatgtttcccatatttaaaagttgcctgagatcctgcagaggcctgagtaggcgtttgagttctttgtatgtatgagatctttccattaatagtatttttcttaaaaagaagtatacaataatgttttgatgatgatttaaagtcaatttatgttgtagttctatgaattaagtaaaccatttatgtagagtgttgkaaatagccttttaaagtgctttctcttttttcttttcttttctttctttttttttttttttttttttgagacggagtctcgctctatctcccaggctggaatgcagtggcgcaatctcggctcactgcaacctctgcctcccgggttcaaatgattctccttcctcagcctcccaagtagctgggattacaggtgcatgccaccatgccctgctaattttttgtatttttagtagagtcggggtttcaccatgttagccaggatggtctcgatctcctgacctcctgatccgcccacttcggcctcctaaagtgctgggattacaggcatgagccaccgcgcccagcctaaaatgctttcttagcaagtagagaagattgtaataaccagtcttcattaaacattaaataggacccttacagatctctaacagcatatcatcatgtcaggaattattactgagccccagcccctggctttaaaatttgaggtcaaataaagaatatgagtcacacaatgcaaggcaagataatgtaacaggtacaagaggtaaatcagaatgacgttgaagttgaaagacaatcatttcctatttgaatttttgaagaaatacttgaaggggcatggtgtgtttcagtggttttaaaataagtaagttccccccgggagaatattgagaatgatagacatttcttggaaagagaaaacataaggaaagttgaagacacagaaagcatcaatatgacaagtagaaaagtccactttggttaaaacacacagtctgcagagaatgaaagcaggaaaaccaatgtaagaagatctcttgatttctgagtaataaactaaagggccatgagtgattaaggaatttggccactctttagaattaattgggagctatttaactaccttgagcaaaataaatcacgacttttgaaagaaggttgaacgggaagacaaactcagaagctcctgcagtaatcaaggacagaagcaattgttaaatgcacctcttaggctgttatcagtagaaatacgaaataaaagataaatatgcaaaaacattaatggcacaataaacactcacggttttgcctttagacttgagatacactaaaatctagatttaattaatcgacttggacgttggaataagatagtaaaactcacaacaaaactttgtagaacttagtcaggaaaagaatctcaagcatagctttaaaaacagaaattgccccgagtactaaggatgagcaataatgaaattaaaacatattgtaataacattacacaaactatattggagaytacaaagaagagattattcatagattataaagcttggaaagaatcaaaacaacacatttctggaaacagattgtataaatgctacaaaagagaaaaatatattttctccccacgcaacacaagaccttaaagtcaattctcgcttttcttgcaatattttataccttttcaattcatagaattactcaagaaaactacctcagttggttgctactttttgttgattccttttaccagacatgactaagtttctttttcatcagtagatttctgggctcctatattcactagagattgcaactcctggatttctcttacactagaatcctatttcgagccatatgggagattctgaattccagaacaaaagaattttgtaatttaaaattcgtgattgctcaatggaatcattttaattgttacttcatttctgtcgttatttaaaacttaagtggagagttttctcagggataagaaaaccacaatcaaggtcatacaaaacttttagaggcagtcagtctgctaagaaggctccagcaagagaaacgggatcttctgtttcaacaatcattacttaagaaaaaattaagaaaatgaaataagttttgcagaataactgtgaaatttttattcatgaaatatgtacttacactttggrccacgtgatgtcactctttgscgcgatgttctctctgaatccagacaaatacagcccttttcccatgggaaagaggctcaattctttttcactctstctgtgctgaacgatggckaacacagmagaatgggactgacgaaatcagatgatttcttctaatttggaggcaattttcactaattagaagaagactgagtatttgaaatgttatactcaagtcgaggagatccagagggtcagcctctactgctctcgcttctgatcctcgcaatgtgggtggtggggagmggccagctccactactcsgtcccsgaggargccraacayggcamcttcgtgggccgcatcgcgcaggacctggggctggagctggcggagctggtgccgcgcctgttscagttggattscaaakgccgyggggaycttctggaggtaaatctgcagaatggcattttgtttgtgaattctcggatcgaccgcgaggagctgtgcgggcggagcgcggagtgcagcatccacctggaggtgatcgtrgamaggccgctgcaggttttccatgtggacgtggaggtgaaggacattaacgacaaccctccrgtgttcccagcgacacaaaagaatctgttcatcgcggaatccaggccgcttgactctcggtttccactagagggcgcgtccgatgcagatatcggggagaacgccctgctcacttacagactgagccccaatgagtatttcttcctggacgtgccaaccagcaaccagcaggtaaaacctcttggacttgtattacggaaacttttagacagagaagaaactccggagcttcatttattgctcacggccaccgatggaggcaaacccgagctgactggcaccgttcaattactcatcacggtactggacaacaatgacaatgccccagtgttcgacagaaccctgtatacggtgaaattaccagaaaacgtttctatcggaacgctggtgattcaccccaatgcctcagatttagacgaaggyttgaatggggatattatttactccttctccagtgatgtttctccagatataaaatccaagttccacatggaccccttaagtggggcaatcacagtgataggacatatggattttgaagaaagtagagcacacaagatcccagtcgaggctgtcgataaaggcttcccacccctggctggtcattgtacasttcttgtggaagttgtggatgtaaatgacaatgctccacagttgactatcaaaacgctctcggttcctgtaaaagaggacgcacaactggggacagttattgccctgattagtgtgatcgacctagacgcagatgccaacgggcaggtkacctgctccctgacgccccacgtccccttcaagctggtgtccacctacaagaattactactcgttggtgctggacagagcyctggaccgcgagagtgtgtccgcctaygagctggtggttaccgcgcgggacsggggctcgccttcactgtgggccacggccagggtgtctgtggaggtggccgacgtgaacgacaacgcaccagcgttcgcgcagtccgagtacacggtgttcgtgaaggagaacaacccgccgggctgccacatcttcackgtgtctgcgcgggacgckgacgcgcaggagaacgccctggtgtcctactcgctggtggagcggcggktgggcsagcgctcgctgtcgagctacgtgtcagtgcacgcggagagcggcaaggtgtacgcgctgcagccgttggaccacgaggagctggagctgctacagttccaggtgagcgcgcgcgacgcgggcgtgccgcctctgggcagcaacgtgacgctgcaggtgttcgtgctggacgagaacgacaatgcgccggcgctgctgacacctcggatgaggggcactgacggcgcagtgagcgagatggtgctgcggtcggtgggcgccggcgtagtggtggggaaggtgcgcgcagtggacgccgactcgggctacaacgcgtggctttcatacgagctgcagccagaaacsgccagcgcgagcatcccgttccgcgtggggctgtacacgggcgagatcagcacaacgcgtgccctggacgaaacggacgcaccgcgccagcgcctactggtgctggtgaaagaccacggggagccagcgctgacggccacggccactgtgctggtgtcgctggtggagagcggccaggcgccaaagtcatcgtcgcrggcgtcagtgggtgccacgggccccgaggtgacgctggtggatgtcaaygtgtacctgatcatcgccatctgcgcggtgtctagcctgttggttctcacgctgctgctgtacactgtgctgcggtgctcggcgatgcccaccgagggcgagtgcgcgcctggcaagccgacgctggtgtgttctagcgcggtggggagttggtcgtactcgcagcagaggaggcagagggtgtgctctggcgagggtmmgcagaagaccgacctcatggccttcagcccgggcctttctccttgtgctggatctacagagcgaacgggagaaccctctgcttcctcagattcaactgggaaggtgggtttttctagcattttatttatttatataattttttttcttgaaagatattatcrattactcccaggggccgttcaaatagttttattcatttttctagaaatccagcagattttttttctgataaagtaaaccccttaacattggagccgactttgtcttgacttctagtgagaattataaactgtatattaaatagatattttttgggtgctgaatcaattttatttaaatttgtgattaaagtgacattgaatttctgatgctatgctgccataacacttgaaaaccaatttagttgttagtcattcattaaacattaacatcactatcatttatttattgctaaatgatgcatagtattttagtctacttgtattgtttataagaaacccaagcaaaaatatatagcaattgttaccttgttaagtttgtagttctctacatttctctggatggagactgtgaacatctgattgttcagcaaccttcagtatctattattttaataagaaagaaacttcccctaaactttagaaaacagttgctccactttaggaatcaaattatgtcaataaatgttataaacacagccttcatttcaacttatataaaatatgttttaaaatgcctgacaatgtagataattcaagaaatgttgactgaaattttgtctacacttagaacattttttgaaattcagtttacagaaattggagaaaatgctttttaaacaagtgtttcctttcttcaagaagayattctccttttaatygaaattttctccattcagtgataaaatgatcagccatgtgaagattcgaaacttcgagttcttttgaaattcagagtctgtaacttaaaacattacccttatgaatttagatgagaattcacttgttctgtcagtaatccataagacagaaatctgtttttttaaaaatatctttttctcctctcagctcatacataacacaaggcagaaatctggatatgagatttgcctctttaatgtcactacatgttatgtttcctgaattgtagtatgtgactttcaaaatggtggttttccacactctacctttagtgcaagctatttgtttgttttctaatttatagttttaaaaacttcgcttattgagtttttgttatgtggtttatatttttctttctctttcagctattttatttaatattgtgtcagatattttacaaggtatgacctaattaaaaactcagtagagaaagatcagaatggccttgagaatagagccacaaaaataactatgaaaatgccagtaacgtttatttaaaacaaaatattttaatttttaaattttcccttaaaacacacttttggaatatgctacaatattacatgttttttgtctttttatttttctgagacggagtcgttttctgccacccaggctggagtacagtggcatgatcttggctcactgcaacgtctgcctcctgggttcaagcaattctcctgcctcagcctcctgagtagctgggattataggcacatgccaccgcgcccagctaatttttgtatttttagtagagatggggtttcatcatgttggccaggttggtctcgaactcctgaccttgtgatgctcccacctcggcctcccaaagtgctgggattaaagctgtgagccactgtgccaaggcttttttattttttwtttttgtcattttctttcaaaacttgagtggtctctgagctcctgtcattaaacctatctatatctgtctatcagcacaactcaccttgaatatagtcttatactttcaagtatctttgtctttgcacgtttttcaagtttcatgtgccatttaaacttggacccaggtatctgattatttgatgtgaatagagggatgctacagatgtcatttgtctcccgccctaagtcctccagtctccttagagctagtacttactaagcatttactatgtcatcaataatcataaaacgtatttttttttttgagtcagagtctcgctctgttgcccaggctggagtgcagtggtgccatcttggctcactccaagctccccctcccgtgttcacgccattctcctgcctcagcctcccgagtagctgggactacaggcgcctgccaccatgcccgcctaatttttttgtatttttagtagagatggggtttcaccgtgttagtcaggatggtctcgatctcctgacctcatgatcctcccgcctcagcctcccaaaatgctgggattacaggcgtgagccaccgcgcctggcctaaaatgtgttctttattattgacggctgtattgatgggattggtaatttagtccttcatattaatctctattctctctcagagtacaagctctcatcatatgcaaattctcagaagggctgtgaacaccttagtaataaatttatcttttgaggtcattagcaaacatgaactcacagggatccasagatggtaaaattcaaaacagcctgtcaagttcaaaacagagaggtgaaagcagaagagacactttcctattttgcctaataggtctccttatatgcatctgtagttaacattcctcaattcaagttagaatcatgaaacaataatgaagctcctcctatgtctcttttcaagttgtaattactatataggaaaaactaagttgtcacccaatatcttagacactttgagagcaaagggggtgctgtaaataagtatacaagatcacagacctaaattgagcctgttccagacaaattggggcctatggtcaacctatccttagacctgctaacgcattagcattagcagcacctaagtcctcattgaatgttctggttcaaggctccacctcagaaattctgaaatgggtagtaagagcaaattttcattttaaakcacacctgagatgattctcatacaaccgaaattttagatccatagccctatttgatacttgacagtgcaagtttctgtaatttaaaaagatgtggtggcctgacacctgcaatcccaacattttgggaggccaaggtgggagggtcccttccttgagcccagcagtttgagaccaatgtagtgagactcatctctgccaaaaaaaaaaaattagccgggcatggtggcacacatctctagtcccaattactcaggaggctgaggcgagagaatcgcttgagcctgggacattgaggctgcagtgaactgtgatggcacaactgcatttcagcccgggwgacagcaagattctgtctcaaaaaaaaaaaaaaaaaaaagagtagtttaactactccctactttttattcaatattggacatctacattgggatatttatgttatcacttggtataaaatgtacattagtagaaattgagtttagtttttattattttgtgcgtggagatgattgatcaatggcaaacttattttacgctccagatagctaaaacaaacrttgatattttgatacataactcattacattttamttcagggtttataaaaaagtaatctctaaaatcagaatttgaatgaattttgatgcaagaggcattccagaggagtagagaagtatagaaacagaatttagtaggacacataaactgatggattaagtgacacccatttctgtcagttttcttattcataaatattgttgctctgtcattcagattttaataaaaaaagtttaaagtaattgacacatttaaaaatattctttagaaaagtcaaaacatcattaaataaaataaattaacccttgcataagaccaatatgtctgttgttaagttttcctttcttggaaagacagaaaactcaagtttttttcagcagcacagatatattacattttcattcctgaatatttgatttcaagaactttgagagagaaaaaaatatttttactgcaagtggtgatgaaaaacttcactgacattgataaaattactagatatatttcagaactgtgtcttttgggcatttgaaaagcgtaaatataacagggttgaaagcatttgcctctgaaagcagaaataataaatttcttaattactttattcagaattataattaagattctttttgcccgtgtaagatattataaaatgaaacttcttgtataaaggatttttctgtaatagtacttttctgttttcttaaatacagaaaccaccactctcagcctgtgcagtagcaataattaaggcattctataggtaataattttgcctgatgagccaaatttggtattgagcctcatgaaaacaaatgtggccaaattgaggcctgagaatagtttccatttatgaagcactcattctccttaaggtactattgcaagcacttactatattataattcactcaaccaccrtattactattaggccaaagttataaaattggaacatgagggagggagaggttaaacgattttcccaagtcatgtggctagtgagtaggataataggaatctaaatggagaaatgtctgatgttgaagctaatgatctctaaattctagtgatgactagatcttcggagttataaacacctcacagatagttgatgcttgacattagtgtctarataaaccttattaaatctcaaaataatgagaaagagaagtaagttaagtgtcagaacttaaatggaactaaagttgtcatttaataaaatattagtatactcagtagtatgcaaatattaagggcattttgaaattcggctattgataatcatgtggttagggaagaaatcactactctgagagtctacatttaagaaaacattgcacgtgggatcaacatttattgttattaactataaagagacgtaatgtgaggctttgaaagtccatagacataaaaatacgtaaaaaaagaattaacatatgaatgaaagaaaagttgtgaactcatggaatcgtacttacacctaaagccaccggatgtcgctgtcgtccacaaaatagctttttagaacaaaggcatcagccagtttctcaaggactaggaagtagcgtcattctgagatctcagccatttcgayaaaaaatagatataagaaataggacagaaaatgtcagatcgtatgtgcgttctagaccgctgattcgtcgatttgtaaaacaagagaaggataagatggtttccagatgtagctgcctgggggtccagtgtctgctgctctcgcttcttctcctcgcagcctgggaggtggggagcggccagctccactactcagtctacgaggaggccagacacggcaccytcgtgggccgcatcgcgcaggacctggggctggagctggcggagctggtgcagcgcctgttccgggtggcgtccaaaagacacggggaccttctggaggtaaatctgcagaatggcattttgtttgtgaattctcggattgaccgcgaggagctgtgcgggcggagcgtggagtgcagcatccacctggaggtgatcgtggacaggccgctgcaggttttccatgtggacgtggaagtgaaggacattaacgacaacccgcccaggttctccgtaacagaacaaaagctctcaatacctgaatccagactgcttgactctcgatttccactagaaggcgcatctgatgcggatgttggagagaacgcattgcttacttacaaactcagtccaaatgagtattttgttcttgatattataaacaaaaaagacaaagacaaattcccagtgcttgttctgcggaagctgctggatcgtgaagaaaatyctcagctaaagttgttgttgacagcaactgatggaggcaaacctgaatttaccggatctgtttctctgctgatcctggtgttagatgccaatgataacgcccctatctttgacagaccggtttatgaagttaagatgtatgaaaatcaagtgaaccaaacattagtaatacggctcaacgcttctgattcggatgaaggaataaacaaggaaatgatgtattcatttagctctttggtcccacccacgataagaaggaaattttggataaacgaaaggacgggagaaataaaagtaaatgatgctattgactttgaggacagtaacacttatgaaattcatgtagatgttacagataagggaaacccacctatggttggtcactgcacggtcctagtggaactactggatgaaaatgataattcacctgaggtgattgtcacttctctgtctctcccagtgaaagaagatgctcaagtgggcaccgtcattgccctaatcagcgtttctgaccatgattcaggagccaacggacaggtcacctgctctctgacgcctcacgttccgttcaagctggtgtccacctacaagaattactactcattggtgctggacagcgctctggaccgcgagagggtgtcggcctatgagctggtggtgaccgcgcgggacgggggctcgcctccgctgtgggccacggccagsgtgtctgtggaggtggccgacgtgaacgacaacgcgcctgcgttcgcgcagtccgagtacacggtgttcgtgaaggagaacaacccgccaggctgccacatcttcacggtgtctgcgtgggacgcggacgcgcaggagaacgccctggtgtcctactckctggtggagcggcggttgggcgagcgctcgctgtcgagctacgtgtcrrtgcacgcggagagcggcaaggtgtacgcgctgcagccgctggaccacgaggagctggagctgctacagttccaggtgagcgcgcgcgatgggggcgtgccgcctctgggcagcaacktgacgctgcaggtgttcgtgctggacgagaacgacaacgctcccgcgctgctggcgtctccsgctggcagcgcgggcggtgcagtcagtgagctggtgctgcggtcggtggktgcgggtcacgtggtggctaaggtgcgcgcagtggacgctgactctggatacaacgcgtggctgtcgtatgaattgcagtcggcggcggttggtgcacgcatcccgtttcgcgtggggctgtacacgggcgagatcagtacgacgcgcgctctggatgagrctgactcgccacgccagcgcctactggtgctggtgaaggaccatggcgagccgtcgctgacggccacggccactgtgcttgtgtcgcttgtggagggcagccaggcacccaaggcctcgtcgcgggcttcagtgggcgtggcgcccgaggtggccctggtggatgtcaacgtgtacctgatcatcgccatctgcgcggtgtccagcttgctggtgctcacgctgctgctgtacactgcactgaggtgctcggcggcgcccaccgagggcgcatgtggsccggtgaagcccacgctggtgtgctctagcgcggtggggagctggtcttactcgcagcagaggcggcagagggtgtgttctggggagggcctgcccaaggcggacctcatggccttcagccccagccttccaccatgcccartggtagatgtggacggggaagatcagtctattggaggggaccactctaggaaggtgggttattacgttttcattttccttttgtgcyttatgaataatattttctcttaccgcattttctcaaatatgtatcagaatatttcatttttgtctacawtccatttatgcttgaatatttctagtgatacctttgtaatataatttattccaggagttttraaatttttttatcctacccagtgtgtcagcctttgattggtacttaaatttttttaaataacaatttattctgaatacactaatattttccaatacaaatatgtgatataggttgcagttctgacgatttactttcataatcacttttcgttacaaatatttgtgagattagtacttcatgttatttcatttccaatctaaattttgatttgattgtatttgcattaccaaaaaattccactgatctatatctcttcagtgaaaatgtgttttcctccatgtgtagaatatgtgtagcgtaccacagcttatactgccatagtagatttcaatgttcagtgattacagctttttctcaatagtgcagtaagtaggtgggcagttcattggtaaaaatttcttaatcttagcaattaagttaaatgctttgaactttaaaaacgttttccatttttattttagttgtagtggtacctgtgtcagtgtgtattattcacttagcagaagaaaatgtatgtttcttttatttacataattttatccagtagctcttcattatctgctcctttatcagcattaggcattgcttatgatattcaggtattagctctttcactttaaggaaggagtcatgcttatgtttaataatgaagagaatttgaacactttttacttttgagactgaaaatactttagtatgaattaatattaaaagtttgaggagaaaataaaattaatgttttctactgatctgatatattgtatagtttaatagcttctctagtcatcttaaacagggttgggttagatgatatagactcagaaatgaaagctaacttagttgcagagtgacaaaactacactatcaattgtgttttcctgaaattggttgttacctgatacccatgatttcatttttaaaaaaaatttattaattctagtgttaccaaacaccaatgccatgaatttgtcatcttgcctatggctcttagcaattactttyttctttcctttctctttgastatggagattgaatttgttactcagtacgtgcttcacaaatagcttcaaataaaattaaaattattgttcaagtttaggaacaccaaaaaaaaattgtggcaagaatttaagcatggcattctttcagtgttaatactctccatgccctgtctccagctcttagaaattatagatgctaagttaatgcagagtttagaagtgtatttgttattwtatcaaataggtttatgaaatatatacttccccctctgatattttgaaaaaaaatcttccttaatgtcttatattataagtaatataaaaaacttagtaaaaactcatatcaattgtaaaagtctcaggtatacaagtgcattaatctctccatcaatactaacttaaggccaggcatggtggctcacacctgtaatcccagcattttgagaggccaaggtgggaggatggtttgaggccaggagttcaagaccaacctgggcgacatagggatatcttgtactgtgtgtgtgtgtatatatatgtatatatgtgtatatatatatgtatatatatatgatgggctctccttacatatatatmtatatatgtacttatgtatatataagccaggcatggtggtacatgcctttagtccctactgtagtgctacttgggagggtgaggtgggaggacggcttgagcctgggaagttgaggctgcagtgacccatgattgtgccactgcactccagcctggatgacaaagtgagaccctatttcaaaaattgaaaaaagcaaaagcaatagtaacaccattatcctgcaaatatgatctttttcatattaattcacgtgataatacagktggtgcagtagtactttatttaggatgtctacatacaagataaaactcttcatggaattctgatttgtaagacaaacccacctttgaagaggtactgatcatacacaagaaggtataggaaaggagttggaagctcacaaagagaaacataaacatatgcaggaatcaggaacgaagaagataagtgaaataatatgaaatcaaatgcacttatgttttgagcgacaggatattgttgttctccatgaaaagtttttttggtttttttgttttttattttttatttttttgagacggagtctcgctctgttgcccaggctggagtgcagtggcacgatctcggctcactgcaagctccgcctcccaggttcacgcyattctcctgcctcagcctccggagtagctgggactacaggtgcccgccaacacgccaggctaattttttgtatttttagtagagacgaggtttcaccgtgttagccaggatggtctagatctcctgacctcgtgatccaccggcctcggcytcccaaagtgctggccgagtgccaccgcacccggccgaaaggtattttttttaacagaagaaaatcagattattcctagatcagaaagaagctccattgttcctgtactttaaaaactacaaacacccattaagaccacttggaacctcaggaacaaggaccaaaaggtctcagaggaactaagtctttctagtcatgaaatattgttttactaaccaaaagagaggcataattttagctgctagacaaagtggccaggaatcccggagcctacagcactggcttctgctccttgaattttgtgaagcgggaaaggaccagttccactacaccatcctggaagaggccaaggacggcacatagcgtcttcgcggtccctattgcgcaggacctgggtctggagcttgtggagctgataccgcgcctgtttcagttggattccaaaagcckcagaaaccttctggaggtaaatctgcagaatggcatttttgtgagttctctgatagacctcgaggagctgtgtgggaggatctcggagtgcagcatccacctggaagtgatcgtggacaagctgctacaggttttccatgtggaggtgaaagtgaagaacaataaagacaacctgccagtgttctcagcaacacaaaagaatctgtttctgaaacgagagctcttgattatcgtgtttcactagagggtgtctgtgatgccgacgtcggggccaatgctctgatgacttacatactgtgccgcaatgattatttttccctggaaataccaacaagagcaggtaaaaccacttgaaggtgtattttaaaaattctttcagataggtaagtcacttcagagctactcttggtgctcaaagcaactgatgggggcgaagctgagctgacaggcaccaaagcattatatatcacagcgctggatgtaaatgatgatgcccagtgtttgacaaaggagtctatcatgtgaaattactggaaaatgcaagagaaggtacactggttattagacttaaccccttggattttgacgagggttcaaaccgtcacattgtttctttgcaactgatgtctcccctaacatagaagccctttttcgcatagattcagacagtggataaataaatgtaaagataggttttgaggaaactaaataatgaaagattcaaatacaggcagttgacacaggcaattccccaatgtttgatcactgcacagacttgatagaagtcttggacatcaatgatagtgttccagagttagcagtaagtcactatcattccctgtacaggaggacgctccactgggtaccgtcatagccctaatcagtgtaattgaccctaacttcagtgccaagggacagacgacccgcaccctgactcctcacgtctcttcaagctggtgtctaccttcaaaaggcgctgcccagaaactattcgttggtactccacagcgccctggaccaagagagcaaatctatccattgttggtaatcgctcggaatggggactcgctttcattgttggccacagccatcgggtccgtggaagtggccgaacagtgaaccacaatgccctggcgttccagcagcccgagtacatggtgttcgtgaaaggtaacaacccgcggggctgccacgacttcacagtgyccgcgcgggaccgggacgcgcaggagaacgtgctggtgtcctactcgttgatggaacagcgggtgggcgagtgcgcgctgtctagctatgtgtgggtgcacgcggagagcggcaagaggtacgcgttgcagccactggactacgaggagctggagctgctgcagttctaggtgagagcgcgcgacgcgggcatgccgcctctgagcagcaatgtgacgctgccaggtattagtgctggaacgacaactwtgtctgcgytgctggcgccttgggtgggctggcggcgctgtgagtgagctggtgcggtattcagtggatgcaggccacttggtggcgaaggtgcgcacggtggactccagctatgacgcctggttgtcgcaacagctgcatctgtcagctggcagcacccgttccacgtggggctctgcacgggcgagatcagcacgacgagtaccctggacgaggcgaaagctacgcgccaccgcctgctggtgctggtgaaggaccactgcgagctggcgctgactgccaccgtcaccgtggtggcgtcgctggcggagagcagccaagcgaggaaggtcccatcgcgggctttggcgggcgtcgaggtccgggaggcagcgctggtggatgtcaacgtgtacctgatcatcgccatctgcgtggtgtccagcctgttagtgctcacgttgctgctgtacacgacgctgcggtgcttggcgcagctcaccgagagctcgtgcatgccgggcaagcccacgctggtgtaccgcagcgtagtgggatctggtcttactcgcagcaaaggagattttactctggagagtcgcctcccaaggtcaacattacggcttttagtcctagtgttctcccatggttcagattttggagatggacttcaataggaaatttttgagaatataagtactgtaatcctggaaagtatttcattcctattaatgtccctcatagtgacattgataatgttcaccaagttattaatttgattgctttatttattttgcttttgctttttcttttgagatgctttatttaaagtacactggggccgggtgcggtagctcatgcctatttgtaatcccggcactttgggaagccgaggcgggcggatcactcgaggccaggagtttgagaccagcctggccaacatggtgaaactccatctctactaaagatataaaaaaattagctgggtgtggtggtgcgcacctgtaatcccagctactcaggaggctgaggcacaagaattgcttgaacctaggaggcagaggttgcggtgagcctagattaggccactgcactacagcctgggagacagggtgaaactctgtcttaaaaaaaaaagtacattggaagtctagccatcttaatcactttttactacagtcaccatgaacattctttaggaatattcttcagttgataagtataatgataatagtaataatgaattagactgagtggctgtttcctgtaaatgagaaagttaaatcttaccrgaaggatcatgatgaataatgatccttatgagaaggtcaaatcttctcaattttgaagcaagttctttattcctattcattttcttattctgatttgtgtcctccattccttattgtttttatgtattcaaaaataccatgacaatatttaatatcataattatttgagtttaaaacatgtttaaatgtttatctttctataatcgataagtttatctctcacaaatggtgatgagcagggttgaggcagcttcgtccacaaacaattttgtttcttcatgatcaatatccatcttttttgagatgttgattgcagtgggtggaattttagccttgcctttaaaggtgattttacttcttaatttttgtcttcaatcttcttataatttcattttaggtcattgtcttcacaatcttcaactacttcagatagccaacaactttgttcttttttaaaaagaaaacaaaacaaaacaatgtcagctctacttaattacctgttgacttaattgctgctgtcctccagtttaagttgttgagctcttctactattttgggaagatttctttgagcaccgattatacycatttttctttcatttttggtacctggctgtatgaaaatattttagggtaggaaaattcacacttatttgggctttaagtataagagagtcttcccatacatgatgaagggtgataccattgtctgtgttcattaagctgcatggtcttcagaatggcattgctgagcttggcagggtgtctcaggcctgtaatcccagcattttgggaagccgagggaggaggatcgcttgagaccaggagtttgagaccagcctcggcaacatagtgagacccccatctctaccaaaaaatgtcattgtttttaataacttaagtataagaaccatgggatattaataaaggcacttccacttgacaattgtggtgttaattataccttagaatttaacattgtatacttttgatatatttgatgcaaaatattttttgccttcacaccatattaatgtgaattgctttctttaaagggatcccagagaacacgtatttatagctgtaaggatgtgtatcaaattatatgtaaaattactttgctctttttggctctaattacaaatgagatggcctttaattctgtgtaaagaaatagtatatttacatattgcaggataaccatgttataggtagggtaaagttaatataaatgctgaaaaggaattagtagtgtctacctagaaaaataacttctgagaagatgatttctatgaagataaacattaaggaaatcttcagaaaagggaaaaccctgtcctactttatggtgctggaattctcttcatccatagctataggacaagagccaatattgatcagtaactcatgataataaatcaccattgtttgagcagtttattaatatatttgttagacatcatgaagggacttaaatacattatttcatttaatacttataacaatttctaaagtacatatgactgttccaatttgaaagataaaataagagaagctgagatgtgtatctattttatccagtgccagtacatggtggagatattattcaaatgtgtatctttcaggcttcagactcattcttttatccactataatgtagagctttctttagtaagtcatttctctgctcaaacatggtctcggctaggaaaatcaagcacaaattgtgtacaggcaaatctttctttctgttgtgcttagaagaaacttcatgattgtcttcatcattaattttgtacaatgtgtgattgagatggcactaagtttttttatgttaagtgatttttttcttgtaagagttcgtgatcatcattatcatttgttttaatcaatgccacactgagataggtattttggttatgtaattgttaagtaattaagagttgccttataagaactacgtatctgttgtttggaagtgatataagtaagaatcgtttaacatgtaagaaaagtcagaaaactgtggtttccaatatccttgtggaacacctaaactaaatactatataccaaaaatgacacccttctttctttactgtgaataaagacagtgtttgggacaagtatagatgttgatattattatttcagggaccctgaacttggccaaaggattcaagaaatgtttacaatattgcatacttcaataacaattttaaagacatagattcccatgaaaatcttcaaatgtgtgtaggtctttcagtcttcttcagtcttattgttggctgggaagctcataacaactgacaaatgatttgtgaccaaataactgtttttacttgactaagccatgatagagcagaattagcatcacggrataaatcctataattttgttaatacagtggttggataatgtaattctaatctgttggttttggagaacctcctggggttctgacaacggtgtcaaaatttatttatgtgttttcaagaaataatagcactaggtctgttagaatatcagtggatgaygtgcactagtaagacattaaactatgcactctaatacttatatgactaacaggacatacaggcagattgtatgtcctgactgatatagtaaaagtcaggcacaaagttccttaatcttcaattgattttacaaaatcagttaacaataactgtattgaaatgacttcttggtattagcctatacccagatattaggctgatcctcaaagatgagttcaaagggcgcataatctcttcactaggggctggttgagatggtgacatctgaaatatcacagccaaaatgcaaaagatgggtcattgattcatacactatatcaaactcttttatgacttggcgtttgttcagtactactttatatattcacaaaatactgtattgttggaaattaacacctaaattaacatattgttttaattcaaatatgtgatattatcatttttccagagtaaaccttctaaggttcatttccctacctcgcaagactccacattccatgtaacatcttcatccccaattcccataataaggtgattgaggatctgttgtttccttttgttcaaaataaacctgatgtgcttcaaatatcatgttgaatatactgtcatctggtctaatgttatgttttgattagaggctactatgattgattattttacagatgcgtaatggaattaacggttataaaagttgatatgtctcctttaattttttaatacagaattttgcatttacctgaattagagttctagtgttatgacaacattgggaaaagagtaaatatgaaaaaagtagaacaaaatctcaaattaatagttgaatatatrtataaaatattagcatacacatatgataactttttcatatgcccttgcagtatttttagattggagataaaccatcaaaactatagaacaaaatatttaagctagagtgatatttattctaaatcactttctactctaaaattttgttgcatcttctttttttcctcctaaatcctaagggtatatgaaaagacaaagaaaattcaagcaagttacaacttcaggcaaagaaaactctsataagcaattcctgtattttacttagcattttctatgaaattccatttccacaagcactaaggtaatttaccatttagttgaattgtttgattaattttctatgttttaagcacaatatcaggtacttacagaaggtataattaaaaatcacttcccttgttttccatgaacttctgctcccaaacccaaaattctttcaacaagaaacaaactattttcatgaatataactgaattagattaaggaaaccaatgttggtgacttggaaataccaatatggcacaaagatgttcagggtgattttatttattttataaaatgataataaaatttattttatagttgaaaagcctatttctgtcatatcattgattctgttacataaagtgctaaattttgatayctcatattatgctactatggcttacattagaaataatatatgtcaaataaaawctcatctagatcaatagacttttcctttgtggattcttttttaaaactaccaagtttgagaatatgaatatatttgtttttcatattgttctgcaatgaatataaagtcacttataatcagaaagcaattaaatgtaaataacagtaaagaatgagaactatagaaaatagatatgaaaatgcaagcccacagagatgagaatagatcatgtggaacataaacactaaagagctgcttttataaaacttcaattttttctttgagttccctagcagccaaagtaacaagggagactgaaagtaaaacaattcaaatttgatagtatttttatatgaggaacaacactttcaggaaatgtttaaccctagtttttcatgaggccaccttaacaactgaattctctttctctctcactctgtgtataagtattttagataagtaaaagaacaatgttataatgttaagtcaaacatagacacaataatttaaatttgatgttaatcgagaaatacaatgccatttccatatatatttagtttcaatatgacttataatctgaatattccataaataagcacgttggaaatatttgggggaagaaacccaaaacacgtgaaattctgtggtggtaaatgcagtgcacagtactcacagttttaggcgcaaggtgtcgctctttacttggtggaaagttcatttaaaggttggtctgaacagtgaggcactyccatacaaaggaactccatcataccggatgccaccgtttaaggatcctttgaaacttcttaagaattcaacgagatttttaacctgaractgaagaatctggtactgtaagtgtaaagaagcttattttggaagccaatttcgtatgcgatgtttggttttcagagaaggggattgggcaccccacgactacagctctggcttctcctcctcgaattctgggaggtggggagcggccagctccactactccgtctcggaggaggcyaaacacggcaccttcgtgggccgcatcgcgcaggacctggggctggagctggcggagctggtgcagcgcctgttccgggtggcgtccaaaacacatggggaccttctggaggtaaatctgcagaatggcattttgtttgtgaattctcggatcgaccgcgaggagctgtgcgggcagagcgcggagtgcagcatccacctggaggtgatcgtggacaggccgctgcaggttttccatgtgaacgtggaggtgaaggacattaacgacaacccgccggtgttctcgctcagagaacaaaagctgctgattgcggaatctaagcaatcggactcgcgttttccactagagggagcttctgatgctgacattgaagagaatgctctattgacctacaggctaagtaaaaatgagtatttttctttagattcaccaacaaatggtaagcagattaaaagactgtcacttattttaaagaagtmtctggatagagagaaaactccggaacttaatttgctgctaacagctacagacgggggaaaaccagagcttactggcaccgttcggctgttagtccaagtcttggatgtcaacgacaatgatccagagtttgataaatcagaatataaggtgagccttatggaaaatgctgctaaagaaactcttgtgctcaaactaaacgccacagaccgagacgaaggagtcaatggagaggtaacatactccttaatgtcaattaagcccaatggaagacacttatttacactagatcaaaataatggagaagtgagggtcaatggaactttagattatgaagaaaacaagttttataaaattgaagtacaggctacagataaggggactcccccaatggcaggtcactgtacagtctgggtggaaatcttggacaccaacgataactctcctgaagtcgccgtgacttccttgtccctcccagtacgagaggacgctcagcccagcacsgtcattgccctgatcagcgtgtctgaccgtgactcaggtgtcaacggacaggtgacctgctcgctgacsccccacgttcccttcaagctggtgtccaycttcaagaattactactcgttggtgctggacagcgccctggaccgcgagaacgtgtgggcctatgaactggtggtgactgcgcgggatgggggttcgccttctctgtgggccacggccagggtatccgtggaggtggccgacgtgaacgacaatgcgcctgcgttcgcacagcccgagtacaccgtgttcgtgaaggagaacaacccaccaggctgccacatcttcacagtgtcggcgcgggacgcggacgcgcaggagaacgcgctggtgtcctactcgctggtggagcggcggttgggcgaccgcgcgctgtcgagctacgtgtcggtgcacgcggagagcggcaaggtgtacgcgctgcagccgytggaccacgaggagctggagctgctacagttccaggtgagcgcgcgcgatgcgggcgtgccgcctctgagcagcaacgtgacgctgcaggtgttcgtgctggacgagaacgacaacgcgccggcactgctggcgactcaggctggcagcgcgggaggcgcagttaacaagctagtaccgcggtcggtgggtgcgggccacgtggtggcgaaggtgcgckcagtggatgcggactcaggctacaacgcgtggctttcatatgaattgcagccggcggcgggcggctcgcgcatcccgttccgcgtggggctgtacacgggcgagataagcacaacgcgtgccctggacgaggcagactcgccgcgccaccgacttctagtactggtgaaggatcacggtgagccggcgctgacggccacggccaccgtgctggtgtcrttggtggagagcggacaggcgccaaaggcctcttcccggactttggcgggcgccgcgagcccagaggctgcgctggtggatgtcaacgtgtacctgatmatcgccatctgcgtggtgtccagcctcctggtactcacgctgctgctgtatacggcgctgtggtggtcggcaacgcccactgagggcgcgtgcgcgccggggaagcccacgctggtgtgctcccgcgcggtggggagctggtcatactcgcagcagaggcggcagagggtgtgctctgaggagggcccacctaagasggacctcatggccttcagccccagtcttcctctaggtctgaataaagaggaggaaggggaaagacaggagccagggtcaaatcaccccggacaggtgagttttctacagattccacctatcaggaagtgtatgtgaaattatttaaaatccagttttttttcacggattttttaagggaaagttttatgaataaccagtgttttgaatattgttttagataacaatgtctgttcataaaataccaaatgatacacatcttcagtcttttaatcatatgaataatctggcttctttaaccaataaatgtcctatttctcttaatatttggttagcaaatcctaaaagaaatgagatgcaagagtgactcttctgtagtcacttgagtagaaataattactattttcactaaagtacccatgccccttcatctctaaacttcaattatgaccataataactatggattatttaaatttgctcctctttgtcttttagcagagttttgccttgatatttccacattgttagatcaactggctttgtttttctaaagggaggaggtcttcctatgatgtccaggttggactgcagtggctatttacaggtgacctgtagcctggaactgctaagctcaaagaattctcccacttcagcctccagagtagctgggaatgcagtgccactgcacttagtccattggctttcctaacttcaggcttgtatcaaagctagaatactccattagtatgacatgatttacttttcttttttttttttacagtgttaaacgttcatcataaattcattatatatgaaacaatctttacttttgtctttattcctgtgataatacttgttttcatattgtttgaagaaaaaagttaagccttgcattcttatatgctgctttatggaaataatatgactaaaattctacatgttcttgccaggcaaagtggttcaggcctgtaatcccagctatttgggaggctgaggcaggagaattgcttgagcccaagagttcgaggcctgcctggacaacatagcgagatcctgtctctataaaaaattaaaaaattagccagacctagtggtgcatgcctgtagtcccagtttcttgggaggctgacatgagaggatcccctgaacccaggggttcagggctgcagtgacctatcatcgtgagacccccatctgaaaaaataattttttttgcctgttcttgattttgttccatgaaaaggcaagagatttgtcaactattggatactcaaacaaaatggcatgatttatgattccaaaggaaactaggtaaataaaattattcaaattatctaaacttgctaaagacatgcatatagggctatattatctataatatatgctagttggcattcttccataagtttttcagattcatctagcagagaaaaaattaaatatattaatgtgagtacctactgacaattatcagtttcattcatctcactttgtaactgctctatcttgtaatgccttatctctaatgtttttgaaattttctttccacgtagtatcatcccatctgaagatttgagcaaagatcatttacttctgagtcattcttcatatttagttattcttactacaygtagagtggtggtattacagactttcttgagaatcatatctagctatttcccccccgtatagaggcataacataccatttggcacaatattcaaagagtctatgctgaagcctattcatagactttagatcgagagcttttgtatcataatattcattggctaaaaacattctttaagtattaaagagaaggcaacaatataaaaatataaaatatttcagactcaaaagtgattaaaccatcataccacttatgaaactttataaatataataaaggtgaatattagatagggcatacattactcatctccagatgaartttttggaataactgaagatctttkaaagacttgggaatgttttcagtacaggttaaaattttgtaaattattattttatatcacataaataacaaatttgcattttagataattcaaattacttggactgatttctgcaaagttgtgtcttttatacttaatgccaagattgcattctatggtataaaattataatttcaatttattttctagtttggttgtttaagtattaagctaaacttagatgttcctattggcttaacaatttgtttaggtcaaagagtatgtgagaactacataacacactattattatttgtttctttttgagatagagtcttgctctatcacccaggctggtgtgcagtggcgcaatctcagctcactgcaatctccacctcccatgttcaagcaattctcctgcctcagctttccgagaagctgggactacaggcatgcaccaccactcctggctaatttttgtatttttagtagagatgggttttcaccatgttggccaggctggtcttgaactcctgacctcaggtgatctgcctgcctcagcctcccaaagtgctgggattacaggtgtaagtcactgagcccagcctattttttaaaattaaagttccttagcatgtatggtacattgaccacttttgaaaatgaaaaataggaaagaaacttggtgatgatattagacaatttaaataattagcctgatgacatcaaaattcaaatatgtttttaattrcttaacgttttatagtttatttaagttatcttatacttgtagagccattcttggttactctttcctggtgttgtaaaggtgtcatatttcagttgccyttattattatatgcagtaggaatgaatggcaacaaattattggtttaaagattttgacttgagtattaatagacttacaaaatctatgtgtacttgttcacaatgagttgtaggatcttatctgtttttttctcttaaagctgatcttgaattaatgaataaactcatgaaaggtcttttgatgcccccttgcataacagtcaccattctgattttctgaagagaagcatgtcctaactactaaatgacctgtaggggaagatttagagaaaaagcaaaaggttgatatcaagttcacattctcttgactttagtcaatgagattaggctccaaaaccctttaagagatctttcgcattttagtgctccattgttgctttgggatagtgtgaaatttggaggcttcaactaaacattttacattaaagtgctttacttttgctagagtaaaactttccagaatctattcctgagatttgttttaacatgttatggaaatgagagcagttatgtgaaaagttatcacattcaagcatcaaggaaccaaacaataacgctctccatatttatgatgaattctaactttcatcagatttatgaataagacaatttatataaatgaaatattgtttggtattagacatattttagtttcttatcctttgttaaatacaaattcctaactttctctaaaatcttacgatggagtgcttgtgaaggttaaaagttattgaaacagcggaattgtaagctatataaggggaggggtgctgtatattattctgtatatcattttccatgataaagtgtaggttctggcctactgtatttgaaagatttctactttgaagcagaaaacatttttaagctacagcgtaataaaattgttgatgttttgttactaatatcatgtatattaactaaacccgcatttataaatgatccgtgaaaaataacccaaagtcgaaacattagaattaagagtgacccaggaagtggctaaaccgaaaagaacctcaggatctttcttgtacttacataatcagtcacatgatgtcgctctacactcagaaggtgaaacaggaaaatttttttctccgcacccacattccaatcattcacggaataggatcgactccataatgactgtgatgctggaaaaaatttactaaatatgtacttacagaaaagggtgaytgctcataaaatacctcaggcaagcgatcccttaaaactgattgtcccaactcagaggccctcattttctgcaatggtgattatcggaccaagaggcccgggatcccagcgtctgctgctctcgcttctgctccttgcagcctgggaggtggggagcggccagctccactactccgtctacgaggaggccaaacacggcaccttcgtgggccgcatcgctcaggacctggggctggagctggcggagctggtgccgcgcctgttccgggtggcgtccaaaagacacsgggaccttctggaggtaaatctgcagaatggcattttgtttgtgaattctcggatcgaccgcgagaagctgtgcgggcggagcgcggagtgcagtatccacctggaggtgaycgtggacaggccgctgcaggttttccatgtggacgtggaggtgaaggacattaacgacaacccgccggtgttcagagaaagggaacaaaaggtacctgtttctgaatctgcgcctctggactctcattttcctctagagggcgcttctgatgcggatatcggcgtaaactctcttttgacctatgcgttaagtctaaatgagaattttgagcttaaaataaaaacaaaaaaagataaaagtatattgcctgaattagttcttcggaagttattggacagagagcaaacgccaaaactcaatttattgctgatggtaatcgatggcggtaaaccagaactaacagggtstgtccagattcaaataaccgtcctggatgtgaatgacaatggtccggcgtttgataagccmagctataaagtagtgttgtctgaaaatgtccaaaacgacacaagagtgatccaactaaatgcttccgatccagacgaaggacttaatggagaaatttcctatgggatcaaaatgattttgccagtgagtgagaaatgtatgttttcaataaatccagacacaggtgaaattagaatttatggtgaactggattttgaagagaataatgcctatgaaattcaggttaacgccattgataaagggattccttccatggcaggtcacagcatggtcctggtggaagttctggacgtgaatgacaatgtccctgaagtaatggttacttcactgtcgctccctgtgcaagaggatgctcaggtgggtaccgtcattgccctgattagcgtgtcggatcgtgactctggagccaatggacaggtcatctgctcactgacacctcatgttcccttcaagctggtgtccacctacaagaattactactcgttggtgctggacagcgccctggaccgcgagagcgtgtcggcctatgagctggtggtgactgcgcgggatgggggytcgccttcgctgtgggccacggctagagtgtccgtggaggtggccgacgtgaacgacaatgcgcctgcgttcgcgcagcccgagtacacagtgttcgtgaaggagaacaacccgccgggctgccacatcttcacggtgtcggcatgggacgcggacgcgcagaagaacgcgctggtgtcctactcgctggtggagcggcgggtgggcgagcacgcactgtcgagctacgtgtcggtgcacgcggagagcggcaaggtgtacgcgctgcagccgctagaccacgaggagctggagctgctgcagttccaggtgagcgcgcgcgacgccggcgtgccgcctctgggcagcaacgtgacgctgcaggtgttcgtgctggacgagaacgacaacgcgccggcactgctggcgactccggctggcagcgcaggaggcgcagttagcgagttggtaccgcggtcggtgggtgcgggccacgtggtggcgaaagtgcgcgcggtggacgctgactccggctataacgcttggctgtcctacgagttgcaaccggcggcggtcggcgcgcacatcccgttccacgtggggctgtacactggcgagatcagcacgacacgcatcctggatgaggcggacgctccgcgccaccgcctgctggtgctggtgaaggaccacggtgagcccgcgctgacgtccacggccacggtgctggtgtcgctggtggagaacggccaggccccaaagacgtcgtcgcgggcctcagtgggcgctgtggatcccgaagcggctctggtggatattaacgtgtacctcatcatcgccatctgtgcggtgtccagcctgctggtgctcacgctgctgctgtacactgcgctgcgttgctcagcgccgcccaccgtgagccggtgcgcgccgggcaagcccacgctggtgtgctccagcgcygyggggagttggtcttactcgcagcagaggaggcagagggtgtgctctgcagagagcccgcccaagacggacctcatggccttcagcccaagccttcagctgtctcgagaagattgtttaaatcctcccagtgaagtaagttattaatattatttagatatatttgtttccttgaagaacttccgtttaggttataactacattctctcatttttctttatgattctatcctttaaactatcgaatgtctcatctttcttggtcattcttactcattttgaacttttatgtatttgtctaayattaatgaaggaaatatgtaggtacaatggaggccatggagcaccacacttaatatttttctttttctataatattttatatgactgatgaaccttgaaaaaaacagtatattagattaaaaagtggccagatgtttgataacttaaaaatttaatttgttcataatttcaagattacaggtaagttgcaagaatggtacaaagagttcctagatcccattaatggattctttaactcttcctcacgtgcttaggcttttaaaatagccttcttgatcactattctaatttcagtacaatctagacattttcacattatattccaggtattatcacaataatataaatgatatgtctgacatatgatgaatgattttcttcattgctcacaaaatatcttctttatttcaagtaggaatagatactgtactattcttatttacatgaaatataataaaatcatttctcaatttaaaaatatttaaccatctgtacgatacagtacagttggtaaccaactgtggctcaaaccagtttcagatgatcccaaacttatcatagtataccactgccctgtgcctattaccaagtgaatcttctaatgtgcattttacatattttaactttctatttctacaaaaatatccagaggcttctctttaaccagggaataaagtcttacataccccagcctggtagtaaaggcattaaaatttccagccttatatctactttcttacatatctttagtttaggatctggaatatagtatatgttcaatcactttttaaaaacatatgggggtcttgctatgttgcacaggctggwctwgaacttctgggttcaactgatcctccatttcagcctttcaagtagctgagactacaggcaggctccaccactcccagcttcaatcaataattttaaataaatatatggtattgaaatgtattacctggacattcccctctatcttagaaatgagagtatgccctagaaatcagataatgttttattgaagagtgtcttgaaagatagacaacattttaccaagaaagtgttaagagagataagtaggaacaactgcacagtatatggtgtaattgaaggattagagcaggggagattgtgaaggcaggaaagctatttcttttttaataaattaggtatcaagtaatggagacttaaattatggcagtagaaatgaattgaaaaagacatatacaagaggcactggcaaagtagaagcagccagataatgacagactcaatacaaatgataagagaaaaacaaaagtagaagttgactctcacttttttagtttgttcarctgagaagatgacattgccattaaccaacctgcagaacaaggttggagaaacagtttgtgtgtayttgagcaggtagggaatggagatgaacatttaagaaaatgttactttgaagtcctaagagaataccgttgtgattggaaatatgggtctggatctcagaagagattattgatatagattttgggaacaactcctttagagaaaaaaataatccatgaaagaataaaattgccaagacagacattgaaaagtgaaaaacaatgtgtccaggtacttaggtgggtaagtgtgtcgcttcctgtggctgctataacaaacgaacacaaactgggtgctgtaaaacagcaaaagtttattatttctcagtattggagaccagaagtccaaaatcaaggtgttgtcaaggctatactctctttggaggccccagggaagaatctggtttttgtttcttccagtttctattggctgttggtgttccctggcttgtggctgtaccactcccatctcagccttctcagctttcatggtcacattgcctcctcctctccatgtctctctctatgtgttggttttacaaaggtacatgtgattgtatttagggcccatctggataatccaggataaactcctttcaagatccttaacttaatcatattattcaccatataaagtaaaatccacaagttccagggattaagatgtgggcataactttttggggaccacaattcaacctattatagtaggcttaaaatcatagaaggatagacaacaggaagctgaaataaagctcaaagtgcaatatatcaagtatatgttagaagttaaacatgaagggaaaaagataaacagaagaggttttccaccagaagtagaacatttaaattagtgtatgtgcgtgtgtgtatgtatacatattttagttaaagaagtttgactatcttcatagtgtgagtgaaagaaacaagtaaaaaataagatactaaaaataagacaggcagcaggtgaatttagatgaaaaccatgagagaatagaaaataatttttaagagcatatggttgaccttaaaagcgggaacagtttttccttacaactagtagaaaatgaaaacagataatataaggaaaaatgacacaagaagagagcaattgaatttctgtttggtcacatctctcaatgtgtgaatcatctgaaagtgaactgatggaaatgaggttgagaatttgagaagagaggaaagagaatatggaagaatctctgtaagcaagagggaggagttaattatcaattcacttgagagcccaactgaggtaaaggtgagagtaaatttgaagagaatagtcatggttaagtgacaatgttgagcagcttaataggaagcatagagaaaatggattgtcagtgtaactgcgtgttggaggctaaaaagaatgttagaggagtaatataaataggtgaatgactctagagtrtctggaagggcatattttaaatggttgactatgtagtctaattatgtgaagaggtaaataaagaaatgtagggccagatagaaagaattagaagagaaatactatgttagtaaaagtaatggagcaggagaggatgatgagggtaagagaataccaaatactctgcctaaattttcagaggagagcagagctatggaaataaacccaacagtcatttcctatagagttgtgcacagaacaggccagataattattggagctatgatatatttttcattacaccatttggcctgggattttgtggcttggtagagatagttataacaatagataaaagtaagatcctcttcctcttttccttgctaaagatatgttaacatctttgtctagctgttgtttcttggaaaattaaagtcaatttaaatgacggcaaggttttactcagtgatgatgaagtaagatggagagagaaaatggaaactttaacctcctggttaaattctatttaaccaggacgccgattcgggctacaatgcgtggctttcgtatgaattgcagccggcggcggtaagttaaattctattaaatcaataggatattagttccaggcatattttataaaaacagaatccaaaaccttagagcattgttgtggctaaattattgtgtttatgcacatacacacactcacatacaaaatcccacacatattgactgaacactttcttttgaatataaatatcttatctacatctcaagtcacattgagggaaatttattaatatgatgtgcttattcaaaatctgatatatcagttaccaatatttttcaccytcaccgattttattcttatgtgattgttatgtttccttttggagtcaatggctgttgtgtgaggaggtcttgaaaaatattacaggaagaggacagtaccacaaaaacctacatgactatgcagaactaccgatcaattgtcccaaaacgagtgtcgaatattctttgtcttaaagttctgcatggaattcttacacatggaaaaataaatttgtggcaaaatgaaactcatcaaccaattgtcagctaatataaaatgttgagcagaatgcagtgatttgctgtttctgggaaggtaaacatttaatcttcaattacatatttgcagtgaaaatgtcaggaaatgcaaggggcaaaaaaatactacatcaatrgaaaatatgaagactgagtcatacttacacttacacgttcatgcgcatggtgtcgctcttcactgagmacgtttccgcgaagaaagccgccgtttctttcttcctgcagaaaatatagcagaaagcggaatacctcttgcgaatccttccgcactaggaagccataaaaattgggccttgagagacagtttgaggtaaggcgttgtatatattgcagatagctctgaggtttttggagtgtaccatgctgtcttcctggcarggaggcccaagaccgcggcaactactgctctggcttctgatcctcgcagcctgggagacgggtagtggccagctccactactccgtccccgaggaagcaaaacacggcaccttcgtgggccgcatcgctcaggacctggggctggagctggcggagctggtgccgcgcctgttccgggtggcgtccaaaagacacggggaccttctggaggtaaatctgcagaatggcattttgtttgtgaattctcggatcgaccgcgaggagctgtgtgggcggagcgcggagtgcagcatccacctggaggtgatcgtggacaggcctctgcaggttttccatgtggaggtgaaggtgagggacattaacgacaacccgcccatattccctgaaagcaagaaacgaataatcattgcagaatctagacctccggaaactcgatttccactagatggcgcatccgatgcagatattggagtaaactcggcattgacctaccgactggatcccaacgattatttcactttggacgcacaaaacagtcttgagcaaatgtcttcattatcacttgtactgaggaaaacactggacagagaggaaattcaggaacatagtttattactgacwgccagtgatggaggtaaacccgagctgactggcacagttcagctgctcatcacgattctggacgtgaatgacaacgccccggaattttaccaatccgtttataaagtgacggtgttagagaacgccttcaatggaacattagtgatcaagctaaatgccacagatcctgatgatggtacaaatggagatatagtttactcatttagaaggcctgtatggcctgcagtggtatatgcatttaccataaatccgaacaatggagaaattaggacaaaaggcaaactagatttcgaagaaaagaaattatatgaaatatccgtggaggcagttgacaaaggaaatattccaatggcgggtcattgtacccttttggtggaagtactagatgtaaatgataacgccccagaggttaccatcacttctttgtcactccccatcagagaagacactcagcctagmgccattattgccctaatcagtgtgtccgatcgtgactctggctcaaatggacaggtcacctgcaccttgacgccgcatgtccccttcaagctggtgtccacctacaagaactactactcattagtgctggacagcgccctggaccgcgagagcgtatcagcctatgaactggtggtgaccgcgcgggacgggggctcgccttcgctgtgggccacggccagcgtgtcggtgggggtggccgacgtgaacgacaacgcgccggcgttcgcgcagcccgagtacacggtgttcgtgaaggaaaacaatccgccgggctgccacatcttcacggtgtctgckcaggacgcggacgcacaggagaacgcgctggtctcctactcgctggtggagcggcgggtgggcgagcgtgcgctgtcgagctacgtgtcggtgcacgcggagagcggcaaggtgtacgcgctgcagccgttggaccacgaggagctggagctgttgcagttccaggtgagcgcgcgcgactctggcgtgccgcctctgggcagcaacgtgacgctgcaggtgttcgtgctggacgagaacgacaacgctccggcgctgctgacgcccggggctggcagcgcgggaggcacagtgagcgagctgatgccgcggtckgtgggtgcaggccacgtggtggcgaaggtgcgcgcggtggacgccgattcgggctacaatgcgtggctttcgtatgaattgcagctggcggcggtcggcgcgcgcatcccgttccgcgtggggctgtacactggcgagatcagcacgacgcgccctctggacgaggtggacgcgccgcaccaccgccttctggtgctggtgaaggaccacggtgagcccgcgctgacggccacggcaacggtgctgttgtcgctggtggagagcggccaagcgccacaggcttcgtcgagggcgtcggcaggcgctgtgggtccagaagcggcgctggtggatgtcaatgtttacttgatcattgccatctgcgcggtgtccagcctgttggtgctcacgttgctgctgtatactgcgctgcggtgctcggcaccgcccaccgagggcgcgtgcgcgccgggcaagcccactctagtgtgctccagcgcggcaggsagttggtcgtactcgcagcagaggcggccgagggtgtgctctggggagggcccgcataagacggacctcatggccttcagtcccagccttcctccttgtctgggttctgcagagggaacaggccagagggaggaggactcagaatgcttgaaagaggtaagcttatattttaaaaaattgtcttagtaaacactttagccttccttgcagttgtttgtttaagacatctttcctgccaatttcaaattattctttwctttaattttaattttgctagttgttatcgaatttaacaactctgctgtggacattatgtgttggattatccttcagagtgaaatcttaactcacaaaccataatgaaatgtgcaaaacaagaatattttgtttctgttgtattcttaatagttctaagtatttatcttgcaattgagcatttacaaaaaattcctcacgttgtgagaacttaaacatttagaaaatgtttgttttaatgaggctaatcgtaatcttaaatttaaaaaatttttagtttaatgtatacatayacccacaagatattattttaaagagccccataacttttcacataaatgctttttttaagtgcacttttctttctttctttttttaaactgttttgattgtctctacttttttgtcctctaggcacatcagtgttcccctctcatatatcccatgaaaaatatcttgtgattctgctttcaattttttatttgcattcagataattactcatacatrtatatatacatatatagagagagacctggtaggctttttgytattatttcttttccaaagtttgaagggatttccaaaaggtactggtgactgaaagtaccttttggcagtccctgcaaatctaatggttttaatagctgtgtagtattccacagtgtaagtgtgcaattatatattatttacctaatgatgggcaatcactttgtgtcaagtgttctgttatcttcatgaaccatgctgtgctatcatttcatatatttcccaaaatattggtgttatttctacgaaattgattgtcagatgtggaattgatgcatcaaagatattaataattttaattataaaatatgtcactggattgccttccaagtattttggaaccaaccagttatgagcactctttctatctcaagaagcaatagtggttttactttctgctaatgtgatctctgtgaaatgatatttcactgttactttaattttaaattcctgtatagtattagtgaatttgagcatattgtcatatgtattttgttgatttgtatttgatcttctttgatttatccattaagttatttgcctacttttctattgaaaaaaaatttttagtttcagtttggaaaagttctctgtaccttatagatattaactgtttatctattttttgacatttttaattaaaatttttattttgagataattatagattcgcatgtggttgaaagaaatagtaaagggagatgctatgtattcttcactaagttttccccaatagtaacatcttacaaaagcgtagggccataccacaacctggatattgacattgatacagtaaagaagtaacatagttccgtaacaaccagattcttgatatcacctttttatagccacatctgcttccctgcctaatgctggcaagcagtaatctgttctccatttctctaattttgttacttttacttcagaaataaataaaagtatctctatttatagataaaattttttaaaattatttttatatttatttattttttattacactttaagttctgggatacatgtgcagaacgtgcaggtttgttacataggtgtacatgccatggtgtgcttatctattatctgcatcacaaatatgttttcctcctatattatttctattcatttgtttgtactaattttgtcatatataaatgtttttaaaatgtatgaattaaaatatatctttttccttttatggattttaaggtctgcatattcagttagaaaggtcttcccagctgggcacggtggctcacgcctgtaatcccagcactttgggaggccaaggtgggcggatcaggagatcaggagtccgagaccagcctggccaacatggtgaaaccctgtctctactaaaaatacaaaaattagcgaggcatggtggcacgcgcctgtaatcccagctacttgggaggctgaagcaagagaattgcttgaacccgggaggtggaggttgcagtgagatgagatcatgctactgtactccagctctgggtgacagagcaagacttcgtcttgaaaaaaaaaaaaaraaraaagaaaggtcttcccaactcctatattgaacattcattaattaaatgcatttaataaatacttattgagtgttctctatgtgccaggcatgttctacacattagacatttagcaacgaaatttattattttgtaaatccaaatttccagttggtatcactttcctactgcctgaaaaatttctttaatattttttatagtgcatatgttctggcaacaaattcactcagcttttgtctgagaaatatctttatctctttttttttttttgagacggagtctcactctgtcgcccaggctggagtacagtggcgtgatctcggctcactgcaagctccacctcccgggttcacgccattctcctgcctcagcctcccgagtagctgagactaccggcgcccgccaccacgccctgctaattttttgtatttttagtagagatggggtttcatcttgttagccaggatagtctygaactcctgacctcgtgatccacctggctcggcctcccaaagtgctgggattacaggtgtgagccaccgcgcccggctctttatctcatttttatttttgaaaaagtattttcactgggcatagttgacagttttttaaaagatataattcagttgtcttctggcttgcatagtttctaataagatgtttgcttttttatatatgagtcttcctctccccacccctcatggttactgttaaaacttttctttttatcctgacttttgcagattgattgtgatgtgctttagtatggttttctttatgttagtctgttggggtttgttgatattcttggatctgtggatttatcattttcatcaaattcaggaaaaaatcaaccatacttcttctaatagttttttctttccttccatcctttctgagactccagtaacacatatgttacaatgacacaggtcattgaagcgttctttatttttgtccatttctttctctgtgcctcattttgaatatcttttattgacatattttccaagttcactaatttttccttttgtagtatcatatctgttaatcctaaacagtgtattcttcatttcagagaccatatttatttcttatctgtataagattctttttgtctcttttaaaatttattttacatgtctccaccgaatagtcatctttttatctatatgtttgagcatattagtacatgtataatagatgttttaactttcttgtctgctaatttcaacatttttgtccttagtttgcttcttttaatctatcttcttctatggatatattttcttgctgttttgcatgactggtaatctctaataagatgctagacattgtgaattttacattgtcggatgctggattttgtgtgtgtgtgcatgtgtgtgcgtgttcctttaaagcagtagttcttgataagaaacagttttgtcccctctaccccctacccaggagataatttggcaatgcctggatacatttttggttattacaactagggaattgctactggcatctaataatggagctctgagatgctgctaaacaccatccaattgctgccaaacatcctaccgtgcacaggacagccgcccaacaataaagaattagctcaaaatgtcagtagttccactgttgagaaactctgctttaaagagtcttggacttagttctgacgtgaagttaagttgctcagtaccaatttattcctttcaaggcttcattttaagatttgttagtacacattcagagcagcttttagtgtagcactaattcggccttctattacagcaatactttcctgaggacaccacctaatgccctgtgcattaagaggtctctcttctctgattggtaggaatgtgaaatatttccagccctttgtgagctctaggaattattctacccacttttttttttaattttgaagggatagcctgatctggggaggttgatcagtgatctgtgatctgtgatcacatcactccactgcagcctggtgacagagtgagaccatgtctcaacataaaaattaaaacattagaattgaggtttaatgttatcaaatattttatctgcatcttttgagggaggtataaattttttctttggcaatgttaatgtgttgaatttatgatttatgattttcttatggcaaaccaacctctacttccttggataaccgtaatttgattataatttataatccttttaatatactacttattttgttaaattttcaaaacaattttttcatctttattccaggtgatactgatatgtcctagtttttcttcctaatttcttctttgttaagtattcaagttataaataagaatctagcataacttgaatacttaacaaagaagaatagtctttgaaaacttccagaaaattttctgtttcctgtaaaagtttgtataatctttgaattacttcttatttgattggagaactcactgttgaagttatctgtatcaggattttgattggtgggaatatttctgattactgactcaattttaatagtataaggaccattcagagtttaatttactcgagtcagttacgtagataatattttttcaggtattttcctgtttaatctaaattttcagttatatgctcatactttctacagaatctatagtgatatttccctttccattcttgatattatttttgcttcctgtctaatttacttttcttcagaattctgctttctgatttttgtttttgctttgaaatatttttatattaattatactgattcatttctcttcttttyatttgtgtttgcaggagatgtcctcttcccagccttttattttaaaccttttagtattatgggcatattccacaagttctttgctactgtctcactgagtagcagagtctaatttttctttccttgaactttgactggtcttaatattggaagtaacattctgggatttatgaagtcaggtcataagaagtcttacagtatgctttggtctctgagaatatttgttttgggggaagcctgccaccatgtaagaattctgactaccttgagattgtcatactgtaaagaagctcaagctggacttgtgagaagccaaatggatagaaaaattactatccagtctccagttgtcttagctttccaagcttaggtgccagaaaaatgtagaaggcttcaggtgactgtagtgtgttggagctggctcttttactggcttatgagaactgataatgcaaatttattcccaactctggattcaatgatgtcactttggtagcttgaaattggccatggtaggagtatttctgccacagaaataggcaaatgctacaaaacagagttttttgtttttcttttttcccagagacctagttgttaagcatttaccagtacactactgcacctgattgcaagcaagaaccactcagttgagtcagaaccaggagaggtaatattaagttgttttaagatattaggtagttgggatggtttactatatagcaatggataacctgaacaagtactctttcttagataatctataaattttaacttgaatatttatttagtttatatttacaatacctagtgatatctttaggcacaaatatttcaattttttgtgcgttatttttgtctcaccatttttatgtctctatttccttcctttgttgatcttcttttgaaatgactgagtactttttattgttccatttccttctgtattatttggaagcccttttccgaatagctagtgcttaccctagaaaattaagcwtgtatccttgatatatcaaaatcaaaagttaactgaaacccttcctccttctgggaaatgcagggaccttacatttttaaaatctttttaatcccttttgacttatatactatttctgtcatgctttaaaaatattttaaaaccccataagatattagtattattttatacaatcaacattgttttaaatgtacttacatatttaccagttttgtttctcttccttacttcttgcccctctgacctttcatcagggattattgtctttccatgttagaataatttgagagtttcctttagtccaaagatgctggtgaggaatgatttcaggttttgtttttctgaaaatgtctttatttcatcataattattgaaaagcattttttctgagggtataatcttaggtgtgacccccacagcacatagtaaatattattccagtgtctactggtttccattgttgctgtcaagaatttagctgtcaatctaaatgtcattcctttaaaggtattctgtttattttcctttggctgcttttcagattttctgtgtgtctgatattttgcagttttaccatgctgtgtctttataatcatcctgttctggattcagtaggattttttttaatttttaatttttccgtaagttattgggggtacaggtggtatttgattacatgagtaagttctttggtggtgatttgtgagattttggtgcatccatcacctgagcagtatacrttgcaccatatttgcaatcttttatccctcgccaccccccactcttgcccccaagtccccaaygtccattgtataggatttttgaatttgtgaattaatgcctttacatcactttgagcatatcctcagctayaatgttctccaatgttgcttctgttccattgtatttctatagtattattttagtactctaattaaacatattttaatcttattactctatcccatctatttctaccttttattttaacaccttttgctctttgggctttattgtggatagttcacccaccttaaagtttaataattctctcttcttgytgttgtctgaatttgtacccccaaattcatgtgttgaaaattcaatcccttatacaacagtgttgggaggtggggaatttcaggaaatgtttagattatgagggatctgccctcatgaataaattaacggcactgtaaaaggacttgayggaaggagcctgtccctctcttatgcttttggctctgtcatgtgacgatgcagcaagaagatcttcaccagatgctggtgccttgatcttggacttcccctaggctccagaattgtgagaagtaaatttccgttctcataaattactcagtctgtggcattctgttatagcagcacaaatggtctaagatacttttatttattctttttcaaatttattgttactttgtataatttctagtttcctctcgaaactttcaagcttggcatttatatctggaacacaataagctcatggttttagcgtctatttctgatatgtccagtaactgggatcctcatgggtctattcctgtggtgtgttttaaaattgtatctttatggtgttttgtctccacataaacctggttatctttgattttgtgctgaaagttgtattaaacacttcttcctggaaataatttggggcttataacattttctttctccagaatggattttaattgacttttgccaggcatcttggggcactagcaatcrtgggtaatcttaatctatttcaagcttcaggtattctagataaaacctcattatctaaaatttacatgtattctttaagtacggttattcagtttcctagccaaacatgagagattgtttaagaagttccaccatgactggtagactcaggattctgacttttgtttctctagtccttggagactgtcaaaagtatatctcagtattcattcacctatttttttccttttatttccagttggtacataataattgtacatatttataggatacagagtgacattttgatacatatatacaatgtataataataaaatcagggtaattagcatattcataatctcaaacatttaccatttttgcatggtgaacatttaaaatccactcttctagcttcttgaaaatatgtaagaaattatagttaaccatatttatcctacagtgctacagtgctgcaaaacaccacaacccattcctcctgtgtagctataatttcgtatccattaaccaacctttccccatcctccttttccttcacccttcccagcctctgataagcacaatactacttccatgagctcaataaaattttgtagctgccgtataagtgagaacatgtatttatttttctgtgcctgacttatttcacttaacatatgccctccaggctcagccatactgccatgaataacaggatttcattcttttttatggctggataatattccgttgtgcatatacaccacattttctttatccactcatctgttgatggatattgaggttgattccacatagtagctattgtgaatagtgctgcagtaagtatgggaggtgcaggtatcactttgacatactggtttccttttctttggataaatgcccaatagtggaattgctggatgatatggtagttctatttgtagttttttgagggactcccatactgttttccttagtggcagtgctaatttacatgcccaccaacagcatttatgggacagtggctcatgcctgtaatcccagcacttagggaggcagaggcaggaagatcgcttgaagccaggagttcaagaccagcctgggcaacatagcaagaccctgttcttcacaaaaaagaaaaaaaaagcagttgtagaactcctttaagtatttcttgtaggacttatctagttgtagtgtacttcctcagtttttgcttgttkgggaaatacttyatttctccttcatttctgaagtatagctctgcttggtatagtatttttggctgatagttttaaaaaatttcagcactttggatatatcatctcattctatcctagcctgtaaagcttctgctgagaaatctgctgttagtctgatgggaattttcttataggtgacttgtcacttttcttttaccgtttttagaattccctccttgtcttgagtctggtaccgtagactactcagccatcctgatgccctacctcttgtatagaaacaacccagatccaaagtggccagaaagttactttaccttctgaatttgtggtctttttcagaatctctacctgttaattctscatgactttattagtcattagatacttttataattttaaaatatctccaattgtatggttggttcaaattaccagttctgcatactggtaatgtaagtcctctgttgaattgatttttaaatacatttattttattccagtatcttctagctcctggtgttgcagatgagaagtttcaaataacttgaaataattcccttctatgtaattatccctgattttgactttctttccatagttatatattttttctatgctattatattctcattttaaagatgttgaatgacaatgtaattttcttttctttacaagtggtagcttatttacaagtatttttgaagtttattttcctggaaagttttcttaaattatagattttagtatttcttctgttttattacttcagatttcttcttcaatggctccaattatatttgtattagatattctttgcttttcttttgtagctaacactcctaaatcctacctagctcttttttaaaaaatattttactttttattcttgttttcatcttatagttttctttaggcattatccatagtgtttatatgctgttatgtgccttctggtttagtgtttacttctgaaaaaattattttccttttttttaatattttactgagttttctcatctctcttttcaaagcttttcttctccaatcatatcattactgagtctctctaattctgatttgtgtattcttgcatagcttttcattattttctaaaaatgtttaagttgttttcaaatattacrtagcaatttgtggaattttttttcttgtgtgtatttatttcctttagtgtaattatttgtcctctcctttaaaaataattttatatcagatttgcccataatccttttcttatgctcatttttatatgaaaagtgctcccccataattttagaagaaacagaccaggataattttcctatctttgttgctctatagatttctattcagctattgtcatgaaatgataaaaatataattttttaatgtcttactttgtgacatcctttaccctttttacttggacctttttcctttgtttaattgtcccccacccacaccattctgcttcatatggactcaattcctatcagttcctcctcagtataggggtttttgctacaagaagacatttgttagttgacaagttcatagggctaagacaggtttagcacaatccaatctatttgtagtcccttctgctaagttttgaatttgcttttatttctaatattttactgagttttctcatctctcttttcaaagctttcttttttttcttactcagggataattgaattaggaccttcgatttccccccttccacccatgactattgttctcaaattgttttactatgctttccagtgagtacttattggcactttttggagttcttcaattctcaacaccatcaaaagccccataaccttcttttgcttcctcctgagactcttttcatgtgcttattggtcatttctttatcctcttcggagaaatacctattcagaacttttgcccaatttttaattggtttattcgtttttcaattgttgagttgtaagagttctttatatattctagatgcaattactttattagatatataatttgcaaagattttctcattgagggtgttgtcttttcacattcttttttagctcccacttataagtgagaacatgtagtatttggttttctgtttctatattaattcacttgggataatggcctgcacctccattcaatgggctgcaaagggcatgatctttttctttctttatggctgcatagtattcaatgacgtatatgtacaatactgtattgtattgtattgtatttttttcagacaaagtctcactcttgtaccccaggctggagtgcaatggcgcgatctcggctcactgcaacctccgcgtcccgggctcaacaattatcctgcctcagcctcccgagtagctgggattacaggtgcctgtcaccaggcctagctaatttttgtattttaagtagagacagggtttctccatgttggccaggctggtctcgaactcctgacctcaggtgatccgcctgcctcggcctcccaacatgctgggattacagrcgtgagccactgtgcctggccaawgtactgcattttatttatccagtgcaccattgatgggcatttaggattattctctgtctttgctattgtgaatagtgccatgatgaacatacacatacatgtgtctttatagtagaatgacttatattcctttggttatgtacacagttatgggatttgctggcttgaatggtaagttctttgagaaatcttcaaactgctttccacagtggctaaactaatttatattcccgccagcagtgtataagcattcccttttctctgcaacctcaccagcatctgttatttttgactttttagtaatagccattctgactggtgtgactgcaacctccacctcctgggttcaagcggttctcctgcctcagcctcctgagtagctgggactgtgcaggcacacaccacaaagcccagctatttttcttttttttttttgtattttaagtagagatggggttttgacgtgttggccaggctggtctcgaactcctggtcttaagtgatccacctgccttggcctcccaaagtgctagtattacaggcatgagtcactgtgcccggccctttgcccattttttgatgaggttgtttgttttttgcttgttaatttgtttaagttccttatagattctggatattagacctttgttggatgcatagtttgctgatattttctcccatcctgtaggttgtctgtttactctgttcatagttgtttttattttttaattttatgggtacataataagtgtacatatttatggggtatatgagacattttgatacaagcatgcaatgcacaataatcacatcatggaaaatggaatggccattcccttaaacatttattctttgcacaaacaaaccagttatgctcttttagttatttttaaatatacaactaaattatttagaccatagtcaccctattctgctgtcaaatactatgtcttattcattttttctattttttatcctcattaaaartctccactttctgtccacaccccactaaactttctagcctttgttaaccattcttctactgtctatctccatgggttcaaaaaatatatttttttattatactttaagttttagggtacatgtgcacaatgtgcaggttagttacatatgtatacatgtgccatgctggtgtgctgcacccattaactcgtcatttagcattaggtatatctcctaaagctatccctcccccctccccccaccccacaactgtccccagagtgtgatgttcccttccccttcctgtgtccatgtgttctcattgttcaattcccatctatgagtgagaacatgcagtgtttggttttttgtccttgcgatagtttactgagaatgatgatttccaatttcaaccatgtccctacaaaggacatgaactcatcattttttatggctgcatagtcttccatggtgtatatgtgccacattttcttaatccagtctgtcattgttggacatttgggttggttccaagtctttactattgtgtatagtgccacaataaacatacgtgtgcatgtgtctttatagcagcatgatttatagtcctttgggcatatacccagtaatgggatggctgggtcaaatagtatttctagttctagatccctgaggaatcgccacactgacttccacaatggttgaactagtttagagtcccaccaacagtgtaaaagtgttcctatttctccacatcctctccagcacctgttgtttcctgactttttaatgattgccattctaactggtgtgagatggtatctcattgtggttttgatttgcgtttctctgatggccagtgatgattagcattttttcatgtgtcttttggctgcataaatgtcttcttttgagaagtgtctgttcatatcctttgcccacttttkgatggggttgtttgtttttttcttgtaaatttgtttgagttcattgtagattctggatattagccctttgtcagatgagtaggttgcgaaaattttctcccattttgtaggttgcctgttcacgctgatggtggtttcttttgctgtgcagaagctctttagtttaattagatcccatttgtcaattttggcttttgttgccattgcttttggtgttttagacatgaagtccttgcccatgcctawgtyctgaatggtaatgcctaggttttcttctagggtttttatggttttrggtctaamgtttaagtctttaatccatcttgaattrattttkgtataagstrtaaggaagggatccagtttcagctttctacatacggctagccagttttcccagcaccatttattaaatagggaatcctttccccattgcttgtttttctcaggtttgtcaaagatcagatagttgtagatatgcggcgttatttctgagggctctgttctgttccatttatctatgtctctgttttggtaccagtgccatgctgttttggttactgtagccttgtagtatagtttgaagtcaggtagcataatgcctccagctttgttcttttggcttaggattgacttggtgttgcgggctgttttttggttccatatgaactttaaagtagttttttccaattctgtgaagaaagtcattggtagcttgatggggatggcattgaatctgtaaattaccttgggcagtatggccattttcacgatactgattcttcctacccatgagcatggaatgttcttccatttctttgtatcctcttttatttcattgagcagtggtttgtagttctccttgaagaggtccttcacrtcccttgtaagttggattcctaagtattttattctctttgaagcagttgtgaatgggagttcactcatgatttggctctctgtttgtctgttattggtgtataagaatgcttgtgatttttgtacattgattttgtatcctgagactttgctgaagttgcttatcagcttaaggagattttgggctgagataatggggttttctagatatacaatcatgtcttctgcaaacagggacaatttgacttcctcttttcctaattgaataccctttatttccttctcctgcctaattgccctggccagaacttccaacactatgttgaataggagtggtgagagagggcatccctgtcttgtggcagttttcaaagggaatacttccagtttttgcccattcagtatgatattggctgtgggtttgtcatagatagctcttattattttgagatatgtcccatcaatacctaatttattgagagtttttagcatgaagggttgttgaattttgtcaaaggtcttttctgcatctattgagataatcatgtggtttttgtctttggttctgtttatatgctggattacatttattgatttgcatatattsyatcccagggatgaagcccacttgatcatggtggataagctttttgatgtgctgctggattcggtttgccagtattttattgaggacttttgcatcaatgttcatcaaggatattggtctaaaattctcttatttggttgtgtctctgcccggctttggtatcaggatgatgctggcctcataaaatgagttagggaggattccctctttttctattgattggaatagtttcagaaggaatggtaccagttcctccttttacctctggtataattcggctgtgaatccaatattttgttttgtttttcctttttgagacaggtcttgctgtgtcacccaggctggagtgcagtggtattaacagaactcagtgcagccttgacatcctgggctcaagcaatcctcctgcctcagcctcctgaatagctgggaccacaggcatgtgctgccatgcccagctacttttttgattttttttgtagagatgaggtctcactttgttacccagtttggccttgaattcctgggctcaagtgatcctttaacctcagcctccaaaagtgctgcagttacaagcatgcgccaccatacctggccttgttttgatttttaggtaccacaaataagtaagaacataygatatttgtctttctgtgcctggtttatgtcacttataatgacatccagtttcatccaggttgttgcaaatgactggatcttgttttttttatggctgaatagtactccattgtgtatatgtaccacactttcttttctgtttttttagacagtctcacttttgtcgcccaggctggagtacygtggcgcaatcttggctcaccgcaacctctgcctcctgggttcaagcgattctcctgcctcagcctcccaagtagctgggattataggcacgtgccaccacggccggctaattttttatttttagtagacacggagtttctccatgttggtcagactggtctcaaattcccagcctcaggtgatctgcccacctcggctttccaaagtgctgggattacaggcgtgagccacggcaccggcccattttctttacccgttcatctgatgatggacatgtagattgcttccaaatcttggctattgtgaacactgctgcaatgaacaatgggagtgcagttatctcttcaatatactgatttccgttcttttggaaagaaaggaaatcctacctagcagtgggatttctggatcacttggtagctctatttttggctttttgaggaaactccaaactgttctccatagtgcttgtactaatttacattcccaccaacaatgtacaaagkttccctttttttcacctctccagcattttttattgcctgtcatttggataaaagccattttaactgtggtaagatgatatctcattgtagttttgatttgcatttctctgattatcagtgatgttgagtatcttttcctatacctgtttgctattagtatgtcttcttttgagaaacatctattcaactcttttgcccattttaaaattagattattagatttttttttctatagagttgtttgagctccttctacattctggttattcatcacttgttagatgggtagattgtaaatattttctctcaatctgtgggttgtctcttcactttgttgattgtttgcttttctgtgcagaaggtttttaagttgatgtgatcccatatatccatttttttcctttggttccctgtgattgtggggtattactcaagaaatttttgcccagactgatgttccggagagtttccccaatgttttcttgtagtcgttttatagtttgatgtcttagatttaagtctttaatccattttaattcaatatttgtatatggtgagagataggggtctagtttcattcctctgcatatggatatctagtttcccagcacagactgtcttttctcgagtttatgttcttggcaccttcatcgaaaatgagttcattatagatatgtggatttgttttttggttctctattctgttccattcatctatgtgtctgtttttatgccagtgccatgatgttttggttactatatctctatggtataatttgaagtcaggtaatgtgattcttccggttttgttctttttgctcaagatacctttaggtattatgggtattttgtagttctatatacattttcagattgtcttttctatttctgtgaagaatgtccatggtattttgacagggattgcattgaatttgtagattactttgggtagtatgaacatttttacaatattgattcttccagtccataaacatgcaatatctttccatttttttgtgtcctcttcaatttctttcatcagcattttatatttttcattgtggagatctttcacttctttggttaattcctaggtatatttagttttattcgtggctatcgtaaatgggattactttttaatttcattttcagattgttcactgttgggacatatagaaatactactaatttttgtatgttgattttgtatcctgcaactttactgaatttattgttttaatagttttttggagtctttagatttttttaaaactgagattatatcatctgcaaacaaggataatttgatttcttcctttctaatttggatgtcctttatgtcttctctctctctctctttcttttttttttttttttttgagatgaggacttgctttgttgcccaggctggtctcgaactcctgggctcaagcaatcctcctgcctcagcctcccaaagtgctgggattacaggtgtaactcacttcgcctggcctaggaagccctttatttctttctcttgtctaattgctctagctaagagtactatgttgaatactatgttgaataacagtggtgaaagtgggcatccttgtcatattctagatcctagagaaaaggctttgagtttttgcctgctcagtatgatactagctgtgagtctgtcatatatggtttttattatgttgaggtatgttccttctatacccagatttttgagggtttttaagatttcaatagttttgggaaacaggtcgttttcagttacatgggtaagttatttagtggtgatttctgagattttggtgcacctgtcacccaagcagtgtacaccgtacctaatatgtgtagtcttttatctttcactcccctcccacccttccctccaagtcccccaaatccattatatcattcttatgtctttgcattctcatagcttagctctcacttgtatgtgagaatatacaatatttggttttcgatttctgagttacttcacttagraaaatggcgtccaggtccacccaagctgctgcaaaagctattattttatttagtttatggctgagtagtattgcatggtgtatatataccacattttctttatccacttgttggctgatgggcatttaggttggttccatatttttgcaattgtgaattgtgctgctatcaacatggcttgcacatgtgtctttttcatgtaatgacttcttttcctttgggtagatacctgatagtggcattgctggatcaaataatagctctacttctaaatctttaagaaatctccaaactgttttccatagtggttgtgctggtttacattcccaccaatagtataaaagagtgtccttttcaccacattcatgccaacatctattactttttgatttttaaattatagtaattcttgcaggagtgaggtagtgtctcattgtgcattaggaaatttagtatacaataaagacagcatttttattgaggaaaggatgcattttaaaaaacaagtttttcaaaaatatagggaggattgtggttacttctagaaacagtagtgcagtcaggraaaattcagcacaatatgtatcagtggaattcatctgatcaaacttaaaatattattccttgcattatagttctgagcaggtaccatagataatagttctattgtgttgttcactttaaactagagcaagaaacttttctaataagtggaattgggagctgtctagctggtgttggcctgataaatgcttaatacacatgaatgtgcatgcatatgtatgcatataccatatacatatattataaatttaactgatataaaagatgtttggtaaatagtttaaaatagtaataaaatatacaattctccctattatcaattattacagaatgtttcccttgatttttgctgaacttttctatccataaactatctatggttgtaattgacaagtatagttctcacatgaatgtctgttggtattttcatttatcttaacaaataatatagagtaaaatgacaaagacattgaatcttgacctgtttgtcaatgatgtgacttccttgctgcattggataatacctcttaaatactggaaaattatttgttgatttttggtctattcacaatgtaacagctacaaatatgatacactttaaaaaataatggtataatttaactttttaatttttttatttcaatgggtttttggggaacagtatttggttacatgaataactactttagtggtcattgctgagattttggtgcacccatcacccgagcagtatacattgcacccagtttgtagtcttttattcctcacccccttcccaccctttccccctaagtccccaaagtccattgtattatacttatgcctttgcatcctcatagcttagctcccacttatgaatgagaamatgtggtgtttggttttccattcctgagtttcttcacttagaataatggtctccagttccatccaggttgctgagaatgccattatttcattcctttttatggctgagtagtattccatggtgtattatatatataatacatatattttatatatatgtatattacaattyctttatacacttgttgattggtggctatttggtctgattccaaatttttacaattgtgaattgtgctgctataaacttgtgtgttcaagtatctttttcatataatgacttttttttcctctgggtagacacccagtagtgggactgctggatcaaatagtagttttacttttagttctttaaggaatctccacactgttttccatagtggttgtactagtttacattcccaccagcagtgtaaaattgttcccttttcaccacattctggccaacatctattatttttttattatgaccatttttgcaagaataagatggtatcacattattgttttaatttgcattttcctgataattagtgatgttgagcatttttttatatgtttcatatcttcttctgagaattgtctgtttatgtccttagctcactttttgatgggatttgtttttcttactgatttgtttgacttccttgtaggttctggatattagtcctttgtctgatgcagaatttgtgactattttctcccactctgtgggttgtctgtttactttgctaattcttttctatgcagaagctttttagtttaattaggtcccatttatttatttttgttgtagttgcactttcttttgggttctcagtcatgaattgtttgcctaagccaatgtctagaagagtttttctgctgttatattttagaattttcatggtttcaggttttagatttaagtctttgatccatcttgagttgatttttgtgtaaggtgagagatgaggatccagtttcattcttccacatgaggcttggcagttatcccagtaccatttcttgaataaggtgtcctttccacactttgtgtttgtatgctttgttgaagatcagttggctgtaagtatttgactatatttctggttctctgttctgtttcataggtctgtgtgcctatttttataccagtaccatgctggtttgataactacagccttttagtataatttaaagtcaggtaatgtgatgccttcagatttcttctttttgttttgtattgccttggggatgtgggctcttttttggttccatatgaactttaggattgtgtttttctagtcatgtgaagaatgataatgatattttgctgggaattgcattgaatctatagattgcttttgacagtatggtcagtttcacagtattgattcctgtcatccattaacatggaacatattccatttgtttgtgtcatttatgatttccttcagcagtgttttgtagttttccttgtagagatctttcacctccttggttaagtatattccgaagtgtattagtcagggttctctagagggacagaattaataggctagatgtgtatataaaggggagtttattaaggagtattaactcacacamtcacaaggcccaacaataggccatctgcaagctgaggagcaaggaatccaatctgagtcccaaagctgaagaacttggaatccgatgttcaaggggaggaagatccagcatgggagaaagatgtaggctgggaggctaagccagtctaatctctccacgttcttctgtctgcttttattctggctgcactggcagctgattagatcgcacccacccagactgagrgtaagtgtgtctttcccagtccactgacacaaatgttagtctcctttgataacaccctcacagacacacccaggaacaatactttgcatccttcaatccaatcaagttgacactcagtattaaccatcacaagtcctccccttgtcaacttgaacccatacacacctcctgaaattatagataatcttcaaattaagacaataataaggtcataattattcccaacatgatacaactatccttcatacaaccaagaatgcaccaattcccaacccaaatgctattacataaagttaacatttaaattttcatatgaagtcaataaatcttatgtcacatgataaacaagaaaggaaataaaatgaagatattttcttagtacaaatgtataaatgcacaaacatgtttttaacaaagaaggaggaaatactcacgacaattaaartcctcatttctgcaactggttgtgtggttcatagctggtattgatgactaccttcctctactactcattctgtattccctttgccttcagcaagcacctcagcaggtagtggttttttcctggtgtagtgacccaaaccttcattcctgaaggatctgggccatttgtagtcctgcctggattgtgctgttgtagtttcccattgacacagggcatggtaatactaagagacaccctaagggatcttgtgtattccatgcatactcttccttacctccactgtggagtagtagactgatttcatcttgagagtctgggtcagtcaccccagccaacactgtaacttccttcttagattgttggtttaaaggtaggaggagcccaaaaagtgtcccggtgtcaatcttaatttccagtttaatggaatcgtggttgtgtcttctggtggcagcattcctccctctggaactaagamctctaggccagcagaacataatgtcacagggacagtaagcaaaaattttactagtgggtcactaggggtgatggtaagtggtgccacttccacttccacyccttgattcctggacctgtgaattccggctatgggagaaacagtaccatatattggatgctgattcagagcatacacaaccttctggagaattttgccccagccctgcaaagtattgtcacctagttgacattgtaattgtgacttcaaaaggccattccatcattctatcaatccagctgcttcaggatgatggggaacatgtaaagaccagtgaattccatatgcatgagcccgctgctgcacttctttagtcgtaaagtgagtgccttggtcaaaggcaatgctgtgtggaataccacgatggtggataaggcattctgtgagtccacagatggtaatcttggcagaagcaatgtgtgcaggataggcaaacccatatccagagtaagtgtctattccagtgaggacaaatcgctgccctttctatgatggaagaggtccaatataatcaacttgccaccaggtagctggctgatcaccctgaggaatggtgccatatcaagggctcagtgttggtctctgctgctggcaaattgggcactcagcagtggctgtagccaggtcagccttggtgagtggaagtccctgttgctgagcccatgtgtaacctccatccctgccaccatggccactttgttcatgggcccattgggtgatgacaggggtggctggggaaagaggctaagtggtgtccacagaacgagtcatcctatccacttgtttattaaaatcctcctctgctgaggccagccgttggtgagcactcacatgggatacaaatatcttcacagtttttgaccactcagagaggtccattcacataccttttccccaaatttctttgtcaccaattttccaatcatgcttcttccaagtccttaaccatccagccaaaccactggctacagcccattaatcagtatataattgcacatccggccatttctccttcatgaaaagtgcacaaccaggtgcactgattgaagttctgtccactgggaagatttcccttcactgctgtccttcaggtatgtcctaggaaggggctgtagtgctgcagctgtccactttcaggtggtggacatatcatgcagaaccatctgtgaaccagtccttagtcttctcttcctcatcaactgatcatagggaactccccatgaggccattgttgcaagctggggaagagaaggaagggcggcaggagtggagaccatgggaatttgagccactacctcatgtaacttacttgtgccttcaggacctgctcgagcccgatcacatatataccacttccatttgatgatggaatgctgctgtgcgcaccccactttatggctagatggatcagaaagcacccagttcatgataggcagttcaggttgcttggtgacttgatgacccatagtcaaatgttcagtttccaccaaagcccagtaataggccaagagctgtctctcaaaaggagagtagttagctgcagaagatggaagggccttgctccaaaatccttgaggtctccactgtgattcacttatgggggcctgccaaaggctccaaatagcatccctatctgccactgacacctcaagcaccattggatctgctgggtcatatggctcgagaaacagagcaacttgcacacagcctggacgtgttgtagagtcttctcctgttctgtactacattaaaaagtgagagccttttkggttactcgataaatgggctggagtaacatacccaaatgaggaatgtgttgcctccaaaatccaatagtcccaaataagcctctttcgtggttgtaggaggggccaaatgcagcaacttatccttcaccttagaaggaatatcttgataggccccactccactggacccctagaaattttactgaggtagaaggttcctgaattttagtcatttattttccatactctggcatgcaaatgtctcaccaataagcccagtgtgtttgctacttctcactcactgggtccaatcagcaaaatgtcatcaaggtaatgaaccagtgtgatatcttatggaagggaaaatcaatcaagttctctccaaacaagattatgacacaaagccrgagagttgatatacccctgaggtaggatggtaaagatatattgctggccttgctgactgaaggcaaattgcttctggtgggccttatggacaggaatggagaaaaaggcatttgccaaatcaatggttgcataccaggtaccaagagatgtgttaatttgttcaagcaatgaaaccacatctagtacagcagctgcaattgcagttaccatttggttaaacttatgataatccactgtcattctccaagatccatctgtcttcttcacaggctaaataggagagctgaacggggatgtggtgggaatcacaacccctgcacattttgagtccttgatggtggcactaatctctgcaacccatccagagatgtgatatgttttttgatttactatttttctaggtagaggcagctctaattggtcttcctattttgtcttttccatcataatagccctcactctaccagtcagggagccaatgtgggggttctgctagctgctaagtatacstatgccaattatgcattctggcactggggaaatgaccacaggatgagtccagggacccactggacccactctaagtcagacttcagctaaaactccataagcccctactttaactggaggaccaccaggacgttttcggtcccctggagtcaacgtcagcttagagacactgttcagtagtccctgaaatggcaatcatttccctttccccaatcacagttactctggtaaaaagccgtaggtctccatggggaaggatgggagaaagactaacagcataaattgttgtcagtgtcatccttgtatccctgggataaatcccacttggtcataataagtgatcttttaacagcgtaaattgttgtcaaggggaaccagcctccccttcatttaagggattctaggtctgtaaactggtttaagtctggaaattgattgaggggaaattgatcctctgtttttataattcaaattagtcttttgtccacttgacctggaagttttctgcttatataaattaaataagaatgcaataggcttcctatcattttcacttctaggaacaccatgattaatcaacagatgccagagatctacatgagtcagactattgtgattgctgctttgcctctgctgtccattatggtagctatgcccaccttgcctttgacagttgactggcccctgccacctcgagatccaattattcccattgcatttaagttttgtagttgagtgactgtggttcctactgtaaaatctggcatacagagaagagcaatcacaaagctcttcaaggatgcaggtactcccctcacaaatctattttgcaaagtattagtcaaggatatattttctggatcctcccagctgggatgagtaggtctaaactgactaatccactccaccatcccaatctccctaaaccttttgatcccttcctctacattaaaccaagggagatcaggcatttccagcttgctcacagtgggccatcttttaatccatatttcagctaaccaagcacataaattatcagaacctttttaaactccccaagctgcaacattaaatgcagaatccctgcttagtgggcccaaatcaataaattcagcctgatccaatgccttggatctatgttccatccaccattatcccacacccttaatatccattcctatgcctgtcctccagatttttgcttatataaataagaaagctcaagcagttcttttcgagtgtagcacacctcctcatgggttatactctgaacctcacccctagggccctcctgggactttagtctagttataggtctagaagcaaacaggggtggtggggggtgggtcctgaggagaatcaacattatcttgcctggcaactgcctcaggggaagccatcactrttgcctcaggcagtgcagggtttttctcctcagacaaatgtggaaaggctgatggcagtgtgggttggggaggacatgttgccactactggggatgagaaagctgtttcttctggcaaaaaaagtttcatcagaatttayaatctcagtgtccccagcttcatcagggtccttttacatatccccattccaagtttcaggatcccattcttttccaatcaatgccctcatttcaacagtagacacctggcaaggctgtgcatgcacctttcattgcaggtcagccactggtatgataagaacttgtgtccaatttcccgcaatttyagctctttctctacaggagataagactctcactcagggcaatcttagcaggtttgaggttcagtatctgcttctgaagctaggaattagaatccctaagttcatcattttctttcatcactttgtccagtgaacttaggaggaaccaaccaacttcattatgttccttagttccccacatatggtcaaaggtattacatatagagttactaaactccttgcctctcacgaaccgtgcatcaggagtgtcaaatgaatttattttgtgtaactctgtaaacagttcgtgccaaggactatcagtgttctccatactattagaagtacagtccttagcatttttgggtctaatcatattaagcagccttctccagaaaccccaaaaccaatgaaagaactccatccttaatagtctgttcttctggaaccactcctgggaccaaaatctgtattagtcagagctctctagaggacagaactaataggatagatgtatatataaaggggaggttactaaggagtattaactcacatgatcacaaggtcccacaataggccatctgcaagctgaggagcaagcaagccaatccaagtcccaaagctgaagaacttggagtccaatgttcaagggcaggaagcattcagcacaggagaaagatgtaggctgggaggctaagtcagtctaatctctccatgttcttctgcctgtttttattctggctgtgctggcagctgattagattgtgcccacccagattgagggtagatctgcctttcccagtccactgactcaaatgttaatctcctttgatgacaccctcacagatatacccaggaacaatactttgcctcctgtaatccagtcaagttgaccctcagtattaaccagtacactaagtatttttttttttttttgcagctgttgtaaaagggattgagttcttaatttgattctcagcttggttattattggtgtatagcagtgttgctgatttgtgtgcattgattttgtatcctggaactttactgaattcatttatcagatctaggagctttttggatgaatctttagggttttcagagtacatgatcatattgtcagcaaacagcaacagttttaacttcctcttttccaatttggatgccctttatttcttcctcttgtctgattactctggatgagactttcagtactatgttgaatagaagtggtgaaaatgggcatccttgacttattccaggtctcagggggaatgctttcaacttttctccattcaatatgatgttggctgtgggtctgtcatagatggcttttattactttgaggtatgtcccttctatgccaattttcttgagggtttttatcataaagggattttgaattttattaaatgctttttcagcatcaattgaaatgatatatggtttttggtcttcattctgttgatatgatgtatcatattgattgatttgtgtatgttgaatcatccttgtatccctgggataaatcccacttggtcttttaactgtattgttgaattcagtttgctagtattttgttgaggatttttgcatcaatattcatcagatatattggcctggagttttattttattttgatgtgtcattgtttggtatcaggataatactggcctcatagaatcagtttggaagttaacccctcctctactttttggaatagtttgagtaggattggtattagttcttctttaaatgtttggtagaatttggcagtgaagccaatgggtcccaggctttactttgctgggagactttttgttacaactttgatctaattacttgttattggtctgtttaggttttaatttcttcatagatcaaccttggtaagttgtatgtgtctaggaatttatccatttcctctagatttttaaatttattggcatatagtggctcatcatagccactaatgatcctttgaattcctgcagtatcagttgtaatgcctcctttttcagctccgattttatttacttgggtcttctctctttttttcttcattagtctgtttaaaactttgtcaattttatttatcttttcaaaagattgactttttgttttgttgatctcttgtattttcatcatttcaaatatatttctgctttgatctttattattttctctactaattttggattcagtttgctgctgcttttctagttctttaagatgtatagttaggttatttaaaatgaggttttcattcttttccaatgtaggcaattacagctacaaatttccctctaatagtactccttttgttgtatctcataggttttggcatgttgtgtttccattatcatttgtttgaatcaaattttcaatttccttttaaatttctttattgacccactggtcattcaggagcatattgtttaatttccatgtgttcatgtagtttccaaaattccccttttttatttctaattttacttcattgtggtcagagaagaatcttgatatgatatcatttttaaaaaaatattttaggacttgtattgtgactagcatatggtctatctttgagaatgatccacgtgctgagaagaatgtgtattctgcagctgttggatgaaatgctccataactatctattaggtcaatttgttctatagtgcagattaagtctgatgtttctttgttgagtttttgtctgtcagttctgtccaatacggaaagtggggtgttgaattctccacctattattgtattgtgatctctatctctcttttagctctaatactatttgctttttatatctgggtgcttcaatggtgggtgcatatatatttataattgttatatcctcttgctgaattgaccccattatcattgtacaaagaccttctttgtctctttttggagtttttgtcttgagatctattttatctgttataagtgtagttacccctgctcctgttttgtttccattagcaaggaatatcttttcccatgtctttattttccagtctatgtgtatcttcataggtgaagtgtttcttgtgggcaacagatcaytgggtcatgttttttcatccattcagccactttatttctttttattggagagtttagtccatttacattcaatawtttcatttaagtaggaacttcctcctgccattttgtaatttgttttctcgtggtttcatggtcatctctcccttctttccatcttctttttcatgaaaataattttctctggtggtatgatttaatttcttgttttttattttttgtgtatccattgtatgtttttccatttgaggttacatgaggtttatgacttatcttatgacccattattttaaactgatggcaacttaacagactgcataaacaaaaaacaaacacacaaaaggaagactaataaaagttctacactttaactgtatcctcctgcttttaactttgtgttgtttctctgtgtcttattgtactatgttgtgaaaagttgtcttttttttttttttttttctgagtcagagtcttgctctgctaccaggctggagtgcagtggcctgatcttggctcactgcaacttctgcctcctgggttcaagcgattctcctgccttagcctactgagtagctgggactatgggcacgcaccaccacaacacccacctaatttttatatttttagtagagacggggtttcaccatgttggccaggatagtctcgatctcttgacctagtgatccgcccatcttggcctcccaaagtgctgggattacaggcatgagccaccatgcctggccaggttgttattatttttgaccagttcatcatttactctttctacttaagataagtttacataccacaattacagtgttataatattctgtgtttttctgtatgcctattcttaccagtaagtgtctcggcattgaagagctaggtatttcttatagtctttgcagtctgggcttgtttatccctgtccttcttgagaaggttttccagaaggtttttatttgaaggagcttgggcctcaatcccaataatactgtggtttttgcagactagtagaggtaccatcttggaggtcttgaataagatccagaatgattatctggattgccaggcaaaagcacttgttcttttcccttactttctgtcaaacagtctctttctgtctctctctctctctctctctctctctctcaaggtgctgggccatcttgaactaggggtatggtgatgcaagcactcctgtggcccccactttggattgtgctgggtcagacctatagccagcacagccctgggtcttgtccaaggcctgctgtaaccactacctgactaccacctatgttcactcaaggccctagggctctaagatcagcagggggtgacaccagccaagtttgcatccttccctttagggtagcaagttccccctggccctgggcaggcccagagatgctacttgggagtcagggattggagtcaaaatacttagaaatttgcctgatattttatttgactayggctaagctggcactcaaaccacaagacaaagtctttcccattcttccctcccctttccacaggcagaggtgcctctccctgtggccagtactaccactggtccacagggaatctgcctggccactgctgatgttcacttaaagcttaagggctgttcagttgtgttgtggtgaatgctgccaggcctgggactcttcaaggaagtgggcacccctctgccctggggaagatccaaatatgctttccaggagccaaagcctggacttggggaccccaagagcatgcttgttgctctactccacgtggccaaactggtaccaaaggtgcaagacaaagtcccctttactttttcctctgtttctgtcaaacagaaggagtctttcactgtagccaccacaactaggaatgtgctggatcacacctgaagtcagcacatctcagaacctaaggcccacagtatactacctggatatcactgctggttatttggtgcccaagggctctttagtcagcaggtgattaatcttgccaagactgggtccttcccaccaaggcaatgggttttctatttgtccagggtgtgtctagaaatgtcatccatgagctagggcctggaatgcgggcctcatgactctactcaatgccctatcctactgtggctgagctggtatccaagatgcaagacaaagtcctctttactctttkctctcctctccttaagcagaaggaaggagtgacttttgttgctgcaagcttcactgcctgggattaggggaggggtggcacaagcactcccttagctgccccagctgatgacttcctaggtcatgtgccacccctatccctctggttctgagcccagcccagcactaggagttacctaggaattgcaatccttgtgtcctagactgtctttcaagtttacctagaacctcagagcacttaagcatatagtggtgaggcttgctgagttctgactgctgggatgagtgattcgcctctggccaggcctgttccaaaatctcccttcatgtgcagctgctggctgagtccagcacagtgttgttccctgctacgacagcaccgagtttaatgtaaagttccccagttgctgtgctttacttcctccaagtgcgcagactccccacgttgctcagctgctgctgggggatatgggagggstgatggtggtgatcccagagtgtctctccaaccctcttcaatgcctcttttagtgatacgttgttaaatctaggtactacgattgctcacctgatgtttggtttttgtaatgacgcttttcygtgtgcagatagttgttacaatttggtgttcatgtggcgggggrggggggggatggtgtaggcttctgttccactatcttgctccacctcaatagtctgatgtgcagaagytctttagtttaattaggccccatttgccaatttttgtttttgctgcaagwgcgtttggcatctttgtcatgaaatctttgccagggcctatgcccagaatgatattttctaggttttattctacggtttgtatagttttaggttttacatttaactctttaatccatctcaggctgatttttgttcatgctgaaaggaaggggtccagttttcagtcttctgcatatggttagctagttatcccagcaatattgagtaggaagtcctttctccattgcttgtttttgttgaagatcagataattgtaggtgtgcagctttatttctgggttctctaacctgtcccattggtctatgtgtctgtttttgtattagtaccatgttgttttggttactgtagccttgcagtatagttgaagttgggtagtgtgatgtccttcttgttctttttgcttaggattgctttgactatttgggctcttttttttttccatatgaatgttaggatagtttgtttttctaattctatgaaaaataatrttggtagtttgataggaacatcattgaatctgtgaattgctttggacagtatggttatcttaacaatgttgtttcttcctacccatgagcgtggaaggtctttccatttgttttatcatctctgatttctttcagtagtgttttataattctttttatagagatctttcacatccttgattagccatattcctaggtattttctttttgtgtatgtctattgtaaatggcattgtgttcttgatttggccctcagcttggatgttgttggtgtacagaaatgctgatttttgtacattgattttgtatgctgaaactttgctggaggttttatcagatgtaggagctttttggcagagaatatagggttttctaggtataaaattatattgtctgctaagagagataggttgacttcctctctgcctatttggatgccttttatttctttctcttgcctgatttctctggccaggacttccagtaggatgttgaataggagtggtgacagtgggcatccttgtcttattccaagtctcaaggggaatgctttggatggtaccaatccttttaaacttattgaggattgttttagataatgttccatgtgcaattgagaagaatgtatattatgctgctattggctatatgttctatagatgttgctatgatatgaatgtttgtgttccccaaattcataaattgaaacctaattctcatgttgatggtatgaagaggtgagacctttcaaacataattaagtcatgagggcagagccctcatgaatgggattggtgcccttataaaagaggcccagagaggtgccttgcctctttcaccatgtgaggacacagcaaraatgtgacatccatgaaccaaaaagtggcccctccccagacactaaatctgctggtgcctgaatcatgaactttcaagcctctagaacagtgaaaaataaatctctcttgtttattaactacacagcatatggcattttgttataatatcctkaacagactaagacagatatcgtttaggttagttggtttttagtgttgttcacatctttcatttcctagtgatcttctgcctagttgttgtccattattggaagtggagtattaaagtctccagttatgactattgaattgtctatttctcccttcatttctgccagtttttgcttcatgtgttttggggctctattattagatgcaagtatgtttttagttgctatatcttcctgattggtccttttgtcattataaaatgtccttcttgatttctagtaacrctttttgtcttgtctgttttgtctgatattagtgtagtcactccagctatcttgtggttgctgtttgtacaatatatgttttcccattcttttactttcaatctgtttgtatctttgaatctaaaagtgtctcctgcagacaacacatagttggatgttgttttcctaaaaactctagactgacaattctgccttttgattgggttctttaatgtattcacatgatgttactattgatatatttggatttatgtttgttattttactcctttttctatatgttttaattctctttttttcctatacttttcatttactgatttatattaagtgaatattttagaatgtaacatggtaatttttaaaataaattttaaactgtatcttttgagttattttcacagtagtttctctagagtttaccatatatattttagcttattggtatctgcttcagatttatattaacttaattctagtgagatataaatatgttacttctagatagctttatttctcttctgccttttgtattactgttacacatattacatcttgtggtggattgaattgtgggcctcaaaaatatatgtccacatagtaacctttggaacctgtgacctcatttggaaataagtctttgaagacataattatattagagatttggggatgaaattaccctaaattttcaggtgggggctaattccagtgaaaagtttgttttgttttttaaataagagatagaagatgagaaaacagacacagaggaaaaggccatgcgaagatggagacagagattggagtgatgtcaacagccaccaacacctggaaaaggcagaaacagattctccgtagagcctctaaagggagtgcaaccttgccaacatcttgagttttaattctcctctccaaacctgggagaaaaactgtcttaagcaacccagtgtgtagtaatttgtcacagcagccacagaaaaccaatgcacatttatagtattatatacccaacaatacatcgctataataattattactttatgtaatcttatattttttagaggcactaagagaaaaaaggagaaaattatatatttatggcatttcttatttgtcattgctagttctattcatttattcttgtggattcatattaccatctggtgtctttttttaatcagatacagctgttctcccacacacctcttttatactgtaattgacaaatttgttatatttctgtatgtttttggtccaacaatagagttctacatactgttttatgcaattcgttagactcaggttttctatttcaccttcgaagtgtggcccttaggccaggagcagtggctcacgcctgtaatcccagcactttgggaggccgaggcggatggatcacaaggtcaagagattgagaccatccttgccaacatggtgaaaccccatctctactaaaaatacaaacattagcttggcatggtggtgtgcgcctgcagtcccagctactcaggaggctgaggcaggagaattgcttacacctgggaggtggaggttgcagggaaccaagatcacgccactgcactccagcctggcgacggagcaagaccaaatctaaaaaaaaaaaaaaaaacaaacaaactgtggcccttagaacttaaagtcatattttggttctcaaatcagttccaagagtaggtgatctagccctttcattctaaacactacacatgtagtactagagtayaatattgtatttgcttattttttcagagtcagggtcttgctatgttttctagactggggwgcagtggggcaatcatagctcactctaaccttgaactcttgggctcaagagaatcctcctgcctcagtctcctaagtagctaggactacaggtgcacaccactacacccagctaatgcatttttttttaacacacataaagcacagttttttcacaatagattgacaacgataattcacgtcttttttgctagatgatattaagccacagatcaaaaagtcctagacttttatacttacttgaaaaaaacctcaaatttgctgaatgccattgtattaagagctaatctgtctggtccaatcacataatatatttgcctatattcaagtttcatatttmtacatatttgataaacattcacactagattttcctctgtgctgcagacaaaaattttcttcaatggtgtctgaaaagggaggcctgcaaccactaccaaaccactctacctgagattagtttattagatagtgcctaacctgaaataaaaatctgctgatagaacattctgcaaaaaaagctctattatgttatagtagagctcatactatattatggtttcaaaggtaataagaaaaatatcatcagatcatcattatggtagctattttaagggaayttaataaaaatttaacagttatcatcaaacactggccacctcaattttaaacagtaaacacacgaattactcccataaaaattataagcataacaggacacttcttggctactattcaatactgacttggatgttctagataacacaagataagatacatgtgtgaatatctatacacatatagacatatttatagatgtgtgtgtatatatacagtatatatataagattttagaaaggaggataaatatatattacatgataaaacttatagtcaatataattttacacttgtaaaatcccagaraaccaaaggaaaaaatagaactaaaaaagagttcaatgaaatgattagtttaaaaaaataaatataaaaaatgtaattttcccacataccttcaaaatgtagcaatcccactaagcaaaaagtggtatttctaccaactatagataaatgaaaattcacctttaaatgtctcttatcctccatgaaactcatcaaaaacaacaaaaagtacagcagacaaaaaaaaagtcttatctttaatgaaactttgtaaaacatttgaacctcaaccatgatgtgtatgaagataagttactaagtgccatgaagattggaccaagatatgaaaatgctaggagaggatacctttcactgaagatcttggaaagggttggtatattggtattttctagagtagtgattctcactgagatgcaaaaccaaagactccttgttttggattaaaaagatctaggtacagaggctgagggcagaactctctcattatcctatttgtcaacacaaaataggagagaaggcaggactaaatctgagagtgagcagatgcaccattatttcaagattgaacctaaggatgtggcaaggtaaggagaaaagtcaggatgacaagttgccctgyagccgccagttctcatcagttgaagatatattaaaactatggtacacataagccactccatcaaacagtaaatatggctatactgcaagcagtaaaaaagtgaacaggctctgcttccatacagtcaagaacaaaaagaaacacttgacaaggttgagaaaaataaatggaaaaaaataaagaatttaaaagaactggagagaaaactgtagctttggaatacagaaaaaggagatacagcatactgctaatagatgtcctcaaagagaccaaatacatagacaaggggaaaaaatccaaagacatcattcaagaaaaaattttgagatacaaataaacttcagacttttacttccagcaatggaaatccagtttgtcttcagccagtggcatatctcagacaataggcaagccatgagaatggttgttggactgcagtttcggactctattactwcatgtatagtatttagaataaaagagctaggtctcctcatgtcagcacttatttgaccaatgggagtatgattttaagtttttagggtcacactttgaaggtggaatataaaaaaaattatagaaagataaatttttgttcagatgcatctactgcagcaatttgggaggctaaggtgaaaggatcgtttgagcmsrrwmgtttgagaccagctgggcaacatagtgagaccttgtctctacaaaaaattaaaaattagctgggcgtgggggcgcttggcctagaagttcaaggacagtttgggcaacatagtgggaccctatctttataaaatatttttaaaaattagttgggcatggtggtgtgtgcctataatcctggctacttgggaggctggggtgggaggatcacctgagcccagagaggtaggggctgcagtgagccatcttcacaccactgcactccagcctggatgatgaagtgagattctgtcccaaaaaaaggacaaaatgaaatatcagcaatgaaaggtcctgctaaagagaaggtttgttaattcataattttaatgtttatctggtcatcttatccaaaaggcaaaaatctttagcctcccttatctttgggatatcgttctctcttaaatgttgctttctcacaaatcccaatttacttgaataagaatgcaatgttatgccaaaagttagggaggcatatggtgggacaaatcctactgggtggatggtttcttcattcttttcacaaatgaaatcttctgaaaatagacgtcagtggcagtttaaatagagaaatgggaaaaagggaagccaaaaatctgagaagcgtgtgaaagaggaggagtttctgtgaagatttcccatactgttctctgtatgcatttttccttttttcctcacgccctaatctatacccacacatactatccctctaggtgcagctcagaattcctaaacctggtataattggaggcatggctgcagacctaaaagttcggtacatctttacagttgtatttcatctgtttaaggcagaaagaataaattttcattccaaagcagttagcttgcttagcagcattaatttaaaatgaagaaatgcacatcctaatctctggcactgaagcagaaaattagttttggtttagaaatttggtgaagaataagttcaatttttatgggctgttttgcatcctggtgagatctaatgaggtctgtacttgtgactacctaataggctgacatgtttcctcctttaattttatctgagacttggtgtcaatgattttttggtttcttaattcaaaaaggcaaactagccaaggggtatttactacttatattgccttatatcacagtgtgccctttctagttccctagaagagataacgaatgggtttgtgtgtttagggaggtaactggtttttagtggaacactggcattatcaatcccactcttagtgttaaaaagagaatgcccgagctacccctctccccaccattttaatcagcaatttttaaatgttttcaaatattatagaaatatgcaggctgatgccaggtgcggtggcatggggctcacacctgtaatcccagcactttgggaggccgaggcaggccaatcacttgaggtcaggagttcgagaccagcttktgcaacatggcgaaacctcacctctaataaaaatacaaaaattaaccgagcatggtggtgcgcgcttgtagtcctagctacttaggaggctgaggcaagagaatcgcttgaacctgggagggggaggttgcagggagctcagatcgtgccactgcactccagcctgggtgacagagcaagaacctgtctcaaaaaaaaaaataaaataaaataaaataaaataaaataaaataaaaagttaaaaaaaaaatgcaaggtgagtgcagtggctcatgtctgtaatcctagcactttaggaggctgagataagatgggaggatcgcttgagcccagaagtttgagaccagactgggcaacaaagcaacacgctcatctggaaaggaaggaaggaaggaaggaaggagggaaggaaggaaggaaaaaaaatttcaaacatacacaaaagttgagagaattgtgtaattgaccccaatgtaccatcacccagcttcaataattatcgatacttttaggcaggtttctaccagaaaatatgtcctggaaactttaattcttgatctgtgttcagattttgcctttcaaatgtttcattattggggctttggacatattgcacctgtattaaaagaaggatttgagtgaggratttagtgcttcatagtcaatagtcaatgagtctccttttggctcgcctccttcttagggaaaggaactggttgtagggtgttaggcagaatttgggtgtatctgttgtggctcagagatgtttctcatagaactgatcactgtcccaatatccacgcaaaagaccaaattaaaagcgaggagaaatacctaatgtaaatgacaagttaatgggtgcagcacaccaacatggcgcatgtatacatatgtaacaaacctgcacgttgtgcacatgtaccctagaacttaaagtataataataataataataataataataataataatawtaaagcgagggtgggtatctagcctattcttatcctgcctcatggtgttttctaaatatttacagaaagaaaatttacagagtagtttcctggtcaaactctaatgagtatctcagtactttcccctccacttctcacgtcttctttggggacgggtcgtcaagtctttgagtttctagttattgctattgactggtttataacctcctctttcacccagatcgtcaagggccgtttgcaaagcactcccaagtagagcctcttggagaaggagaaactgctatcacgcaaaaaaaaagccttgagctcgctggctccgctgcctcgaaaagccagagtccggaggcagtttgatgcggacactattccccaaccttcttcccctccttgtcgtctctattgccctcttggcagctcctgggatacaagagggtgcaggacagacttcaacccgcagcaggatccagcgcggaaagctctgcagcaggatccagcgcggaaagccccccgcagcacttctttcggggggctcctgtttccttaagcctagaaggtgtggtcgctcacgttcaccgtcccgcctctcgccgcctccgctcggcagctccacgctgagtcccgccctctccgccggagaggtgcgccggggtcagagcgccgggacccgacgcgcggctcccaaagggcggcaggaagagcccagctgggctcagccacagttatcagcaatctgcgggcagaggatgtggaggttaagatctgggcagcctcagggcgttgtcctagaaaacaccgtttaaggagagaagtgttagtgtctcggggcgtctcccaggctccgccctgcgcccgcagccagcgtkgtggtsgagaccccagcccgctgctactggagacagcacctctcgcgcccgggcgggcggcctcgtctctgcacccctaggcggcgctgcgctcctcaacacccggccggctccgctttcccagacggctgcccagcctccagcctagcaagcccggctcccagctggccagccccggcaatgccggcgttcgggaggcgcaacgtcggcggtcgctgagtatccagcccgcagcagtgacggccggcaggagcgtgctcttccccgcggctcgtgctctccaggagtccggagcatggtcctgggtcaccgttggtgtagcgtgttggtggaacgtggacgcctagagggaggatggtgggctgtggggtggcagttttatgtttgtgggtttcctgcggcgctgcagcgggacagctcgagtactcagtgccggaggagacggagcggggcgtagccgtaggcaatctctccgcggacttgaggmtgccagcggccgctatgtyctcgcggaactttcgcttcctttccagccaccgcgagctctacttcggggtggatctacccagcggcaatttggtggtcagagagccggcggaccgcgaacagctgtgcagggccaaagctgcctgcgtcttgacctacgacctggtgctcgaggacccgctggagctgcacaagattcggattcacgtcctggacaccaatgacaactcacctctctttcctgccggcgacgtgcagctgcacatccccgagttcctgacgcccggagcccgytttactctcccgaatgcccaagatgacgacgagggaagcaatgggatactaagctacagcctaagccccagtcagcactttcgcctggacatgggatcrcgggttgacggcagcgaatacccggagttggtgttggagaaagcactggatcgcgaacagcgcgccacccacctgctggtgcttacagctcgggacggcgggctacctgcccgctcaggagacgcacaagtcaccatcattgtggtggacacaaatgacaacgcgcctgtatttgagcgctccgtataccrcaccaaggttccagagactgcacccaatgggactgtgttattccgagttcaagccttggatccagatgaagggtccaatggggaagtccartactccctaagcaacagcacgcaagcagagctgcgacaccgctttcacgtkcaccctaaaagtggggaggtkcaagtagctgcttcactaggyccgcctgaaacgctcttggaggcatacattgaggcgagggacgaaggtgtctttggtttagctagcaccgctaaactgctggtggaggtgactgacgtgaacgatcatgcccccgaactggacttcctgactctttcgaacccagtacctgaggacgctgcccctggcacagtgattgctctctttagtgtaaaggatgaagacctcgattctaatggtagggtcatttgtggcatgtctagtgcaggcccttttcagctgacggcttcctttgacaactactacagcctgctgattgatgggcccctggaccgggagcagatcagtgaataccaagtcctgatcacggcctcagatagtggctcaccsccacttagcacccgaaggacaatcactgtgtcagttgctgatgtgaatgacaatacaccaaactttcctcaaccccrgcaggaacttttcgttgctgaaaacaatggccctggggcctctctaggccgagtgtttgcccaggaccccgacctggggaagaatggccttgtctcttatgagctgttggatgttatctctgaagggccatcagcctctarcttgstggcagtggaatcatccagtggggccatcactgccaaaacttcctttgactttgagcagctcagggggtttcatttccaagtagaaggccgggatggtggcattcctcccagaagtgcaacagtgactataaacttgtttgtggtagataggaatgacaattatccggttatcttgtttcccttgcccagaaatggttctgtcccagtggaaattgtgccccgctctgccaggactggacacttggtcacaaaagtggtagcagaggatgctgacagtggttctaatgcctggctttcctaccacatctcccgggcgtctgactctagtctctttagaatttcagccaatataggtgagctccgtactgctcgcttagttcttcccactgatgcagttaagcagagggtggtggtagtggttcgggaccatggagacccaccactttcctcctctgtcactctgggtgtgctgttgagcaactctgtccctcagttacttccagactttgaagatgtctgggaaccaggagggcagctttctgcccagaacttgtatttagtaattgccttggcttgtatttcctttttatttctggggtgcttacttttcttcgtgtgtaccaagttgcaccagagcccaggctgttgckctcagagctgctgtcgctctacagaggatctgaggtatggaagtaagatggtttcaaatcyttgcatgacatcagccaccatagatgtcactacagttgagagactttctcagacttatctctatcgggcctctctgggacttggttctgataataacagtttgctgttgcgtggggagtacaatgctgccgacctgcgaaatcttgccactggggtaggactgaatttgccaatatcctgtattcagattcggaataggaaaggggatcacgctaatgtcaatgccatggtaagcaaattttatggaatttgattcctttggcccggagatggctgctagctgtgttttgaaatatttcttagacaagcctttcacaacatttcatcaattgaaytaaacactccttcttagcacttcctgtgccaagaaatctggaagtatagaagtattagaagattgccctaggcctcaagggacttatagtttatttttgagaaacaarggcaaaaattaaaacctatttaagaacaataaaagtaatatgacataaaggtctaaaattaaaaataaaataccaaaatattttataagcaacagatgtgtaaggcactctaatatttaaagtgaagaatgaaaaatatgtaagagtctgctttatatgaatataatatggaaggtgaaacatttacttaaactattgcaatgcattattaaaagatgacgataaccacaaaagatgtaaaaataaattacaatgggggttaaaagaagggagaaagggaacataagagaacatttgagtgaggaggaaggagtcagagaaggctttgtgatagagatcacagatttagttggatctttaataygatataccatttaataaaaaacagtgtattctctagcctatacttttaatgaataccattttggtgaaggtgtcttctttgggaatgacaccctaaaacatagctgatagctccatagcagtgttttgtaactgctttggagtttttgcttacacaaaaactgtaagcctctctcataacatctatttatacwgataggagatcatattgttggatataggacttgacaaccttttgttttgtgtttctattgataatattttacaaagaggaaagatgagtaatttttatgtcagaaatatttatgtgttcaaaggtgcacttaccatccaaagtccattcaacttggatttaatttcttttattttaggggacaaatacacttaacaaataagtaaatatcatatttgagagtaatgtatctaatgaaagttaagtgattcaaatatttcaatttatctgttagtggcccttggcatttcaaaacttcttttttttttttgagacaggggtctcactatgttgcccaggctggtctcaaactcctagcctcaagtgatcctcccacctaggcctcccaaagtgctgggattacaggcatgagccactgcagctggccctcaaacttcttgagtgcagttaggacaacattttgaagcaattctacggtattactttttgacttctcatagaaatcctagatgcaagagaaggaggtgtgtagaaattaaggaaggaaaatgaagcattccttgttttactattctaggcaataaggggaaaagtggcttgtaagttattcttcctsaagtaatgatgttaactgcaaataaaataaatttacatatgttaaaattttctgtacttaatattttcacaatataatrgaatccagcatataagatatgcttagtaaatgctgactgaatgaataaatatgtgcatatatgaattggatggtaacactgttcaacacagagggaaaaactttaacttacttttctactttagatgtgtatatgtggttaacagtttaaaggtcactttcaaatgtactgtttcaatgattattttcttcctcatgacctacactaataacataacagaggaattttctgattgtagagctagcaagaaaaacttcaatgctgtgtctgggactaagtatgagtccagttctacagatgacaaaggaattaataggtatgcacatcattacattgtgatatttgcagtggatactatttaatagaatctcagttaattttagggaaggaaattggtgcactacaatgctagtatttcaggtatcagagcacttaatatgtgaacacttttcctaccaagaaatttcactatttatttcttttattttcattgctttctgtaacaaaaagagaggagaataccagtaatggctgtaaagtttgggagtgaggaattttttttagaaacacattttcactagactagaaaggaaacataagtaagcgataggaaggctgatgaatctagaagttagaaggaaaattagctatttaaaaggaaaaatataggaatgacagaggaaaaaacaacccttcaaaccaaatttttaaacatatatgaatgattaacaaaataatagagatatactgttcatatgtgcaggaatattgtaccatcccattcattcagttgaacagtctttttccatcattgttgatattttgctttttaggtagctcattggtctgctaataattgttgtgggctggatatttccttataaataaatgaattgtgattcataaaaccatgaataaaataacttctataaatatggggtatttgtaattcacaaaggcatttgttatttacttcttcctgttcaattacctattgatctgatcttaattctttagaaaagaattcttgtcatagtatcctgaatgccttaataacaacaggattctagaaataaaatatttattgctttcattttatttcaaatcatttgaaaagcatgacatttaacaatgattataatgtgtgtctgagtcttacagaatcatgttgatgcatatgtgtttatattttgctcaaattctaagttctttcattttagtttacggtaagtttacagtatatattaacatagcctgtaatactaaaaattatcagtttaagaaattcaggaaaacatggtttttatctctgtatttccaattgataatatttaagatataaacaaaattgattcactgattgtataacaattagacaatgtgtacctcatgtccatttttttctgttaatattcttgatgggcaatttaaattttttagaatggtatctaagagggtacctctgagatataaatttctacttattaaaaactgcattgacaatttttaaaggtataaatatattaatgtagcaaaaatgcatgaaacacttaccatacaactggccttattaaatttccacatgaaagttatacatagtttcaacataccaatgttatattagtgtattgttcacctggaattaaagcatcttcttttttgccagggtatataggaaataggatatctcctctttgcaatgtcatttgttaacagtagtagaatgtttgtggcattcaaggtgctttatttaacatacattccacaagtagactttcccatagggtaattagatgttttgtatatctattttgactttgaagctgataaccacactaaaaaactttagaatgatgaaactaaggaagtttgcatgacatatgaaatatattcaaattaaaaaactcatatagacaacacaataatattgtataatatagaccctcaaatcagtaaaaaggaaagaaaaagaacattataatttgagtggacataagagaaaagcaataccttggaaacatataagtgggaaagtattgacaatgtgtctcataatgttaatgacttattgtcttttgttgtcttcaatattttcagttagagggaaacaataatatttcaacaactaaattaacttagctaggttggaatgaaggtggactaaattgctgaaaggtttttacaatgctcaaatgcatgtcatatgaatatcggaaatattaacacttggcagaacttcaagtgaatatggattacagtccaggatcctgactaaagtattatgggaagtaaggaatttgttggtaaaggttgttcttaagaaacaaagctaaataataaaggtagatagccactcattttgttcccaattttaattgatggcataagataatggttcaggatataaataaattacatgtctgttatattgcatttatgaaaaagaaaggactataaacacaaaaggttattatatattcatttggaacttgttttggaatctggaaataaatatgcaatctcgtattctcctgtgctgtagagaaagataaacactttatttctaacccatcccaaattccttggctgttcctagagccatctggttaccatctacagatattctgtgttcataggggcactctaatgacataccttcaaaatatactctgaattcaaacacattatggttattctttagaattgttaagcaaagactacagctgttttgtttaaactcaaaataatgttaatataaaataaaaaccaattaagaagtcttaatagtgggtttttaggttgatttgtctttttcttttcttattaggttaggctggccctgttaaacaagttggaaatcctgtctctctctctgtctctctcacattttttttcctattcctcggacacatttactgagattggtgatacagctttcttaaatatttggtagaattcactagtgaagctctctgtacctacagttttctttgtaggaaaattttaattgagatcaaatttctttgtatttttattgctcctatttcattcctgtacctttaattttttcagatatatgttagttttatctgtacttttgaatattttggcataaagttgtttataatgtcctgttgtgactttttttcacatctgcaggatctgtagtgatgtttcccttttcaatcctggtgttagtgtcacctctcatttttcttgactagacttggaagtagtttattaatgatattagtctttccaaggctaacttttggtgttttgggttckctttgttgtatgtttgctttctattttattaattttcatactttattaatttatttccttccttatatgtttatatttcagtgtgcaacagaagtactctaaacatacttttcatttctatttcctcacacaaaatgtttaaaagatttgtacttaattgtggagatttatcaaaattaataataatcagtgcttcatcaagggcattcttactggtatttttcttactgcaaatgtccaatcatgaatgtaataaccaccagtacagtgtggagccactgctttgactccttctgtggttctatggtggccagctttacccaccaatgcttttgcattatcaatgcaagtgtaaatatagtgaaaaatgcaaataatgttttaacattattttgaaaattatattcacctcataaacacccaaagsgtccatagaccacacttcgagagctaccgttctaattctatcatttcttcttttttttaattaattgtaacatttctgtaatgggtcttcaactatttgattagcctgaggtacagttcacacaggaaaggcaggataaatgtttgattcttcccctttgtttagcagtattcaaaacaatgaattgatkcctggccatcttacaaaaaggaccaaggccttttttaggtgtcattatgaactcattgacttaaacatatttgatatggcccaatccatgtcaattatctttttaatgatcaaattatgctaactttggcaagttgggaactgttcagctttgctcctgagtctttgtgagtgtgtttgtgtatcttgttttaaaccttttattttggaataattatggattcacataaagttacaaaactagtatagagagatcccatgtgcttgtcacccacttttccccagtgataacaccctgaatccttttcatgtgagtcttaatagtcttttgaatgcttccttgatttctggtattacaagatgttcagattatcttgtacatttcctttcccagaatcagccatttttcaaagagctttcacttatttttagtgaaagatgatacttagagatataatctcaacaacaggtgtgcttattgctgctgggtcagttgctgtttctaggtatcttcagctactgagctaagggatgtctattttttaaaagataaaatacatcacatgtttatactaatctaataaagttcagcactccgaggtttttacttaacttcatcaatcttacattcctatttctcccatacgtcaaatcccagttttcattaacgtcaacagaattactcatttgttatcccacgggactcaaacaatggacttagraaacaatttcagcactacagaaataatatgatactgtagcagtttaagtttttgtcattcttttcatttataaggcacatccttacaaatgcccagtaggcatgtacagtcaaattattgtgttttaaagtatcttggaaaagttcctctctgtgtagttaagccaccagctagatacagagctaggcttttttcaagtcgctttcaaatttagggcttgctttttaaattttaattttcttttataattatgtgaaatatttacatggctccaaaataaacttataaaacaaaatatatttagagaagtctagtatctattattccatacaatacacattcttccccactttgagttttttcacttaaaaatataaacgagattatttcatagtagtatagtatttacacatattccatactkcttaatggtgtcttttgattagcaattaatgagctccaatttatcaatattatcttttttttttttttttgagacagattctcattctgttgcccaggctggagtaaagtggtacaatcttggctcactgcaatctctgcctccygggttcaagcgattctcccacctcagcctcccgagtagcggggattacaggcacccaccaccacacccggctaatttttatacttttagtagagacagggtttcaccatgttggccaggctggtctcgaactcctgaccttaagtgatctgcccgccttggcctcctaaagtgctgggattagaggcctaaaccaccacgcccagccaaagttgtcttttttatttagtattctttctatccttttaaagaaaacatatcctgcttcaagtcatgaagatatattcctgtgttttcttctataacattgctatccaatagaactttctgacatgctataaattttctctatctgcatatatggaatgtgtagctactgagcacttgaaatgtggctagtgaaactgggctactcaatttttaatgttactaattttaattaatttaagcttaaataaccacatctgtttagtggttgctgtagttctggaagctttcttgttttaacttgcacatttagatcttaaattacctgaaattgcttttgaatatagtgcaatgtagaagtcaagatttatattttccacttgtaaatccagttagattgcctactttcctcgctgctactgtgcagtgctacctttgtcataagcaacgtgactttatatattctgtttctggactgtctattctgtttcattggtcaacttgtctattcttgtgccaatacattctgtgttaaatatagtaacttttcatttgtattgatatctaattgtgtaagttctctcactttgttattctgcttcaagattaacttagctatttttggccctttgcatttctatataaattgtagattcagcttctcagtttctattttaaaaaaccctgctttgattttaattggcactatattgaatctgtagaaaatatggggtatattgaaaatatcttattttgatctttattgaatctataaaaatatgaagcttgttaacattgacaatattgagacagacaaccgattaacaaggtatattcttccatttatcttttttttttttttttgagacggagtctcgctctgtcgcccaggctggagtgcagtggcgcagtctcggctcactgcaagctccgcctcccgggttcatgccattctcctgcctcagcctcccgagtagctgggactacaggcgcccgccaccatgcccggctaattttttgtattttttgtagagacggggtttcaccgtgttagccaggatggtctcgatctcctgacctcgtgattcacccgcttcggcctcccaaagtgctgggattacaggcgtgagccaccgcgcccggcttcttccatttattttattattttatcttaatgtttatgtgtgtgtatgtgtatataggggtattgcacaacttttattagatagctgatattttaatgctattttaaaagtttaattttataatacaaaaattagctggacatgttggcacatacccgtaatcccagctactcaggaggctgaggcaggagaattgcttgaacctgcgaggcagaggttgcagtgagctgggatcgcgtcactgcactctagcctgggcaacagagtgatactccatctaaaaagaaaaagaaaggcagggcatggtggctcacgcctgtaatcccagcactttgggaggctgaggcaggcggatcacgaggtcaggagatcaagaccatcctggctaacacggtgaaaccccgtctctactaaaaatacaaaaaattagtcgggcgtggtggcgggcgtatgtagtcccagctactcgggaagctgaggcaggagaatggcatgaacctggaaggcggaacttggagtgagccgagatcgcgccactgcactccagcctgggcgacagagygagactccgtctcaaaaaaaaaaaaaaaagtttaatttgataattggcttttgttgaaagtatatagaaataatactgattttatgttaactttgtatccaatgttcttgctaaatagtaaaatctcatatttttatattttgggttttctacatatactgtcatgctattcccaaataatgttagttttattattgtattttttactttctctctttttttaaaaaaatagagatagagtctcactacattgcccaggctagtctggagctcctgggctcaagcaatcctcccacgccagcctcccaaagtgctgggattacaggcataggccaccatgcctggtcttttaaaaactttctaatcacatagttttcttgctttctgtcattgcctatgaaattcagtataaaattgaatagaagtaatgttaatggataatcttgtcttattcctggtctcagagaggaagtttttaaatatttaatatgaaatacattgtttgattgggtttatttgcaaaaatcctttatcagatttattaagttccctttgttttttaatttattatgttttttaaaaatcatgaataggcattgaatttatcacatattttctgttattgaatggataatatggatttttatccttttattaatagcatgcattatattggttgatttgttaatgataaaccaatcttgcattcttggaataaactcaggttgcttatgatgtataatccttctttatatcattagacttagtttcctaacattttctttacagtttttaaatatatgtttatgatagaaacgcgtttctacagaaaaaaataattatttttaaaggcatagttattgggtactagacttagtacctgaatgatgaaataatcggtaccacaaacccctgtgacatgagtttgcgttataacaaacctgcccatgtacccctgaacttaaaagttaagaagcaacacacacacacacagatgcgcacacacacacacgcacaagaaattggcttttaactttccattcttataatgctctagtcggagtttggcatcaaggctatcctggctttatatagtaagttaagaagtgttacttttcttttacttattcggaagagttgtcttagtccatttgggctgctatatcaaaatagcataaactgggtggcttaaaaacaatagaaatttatttttcacaattctggaagctggaaagttgatgatcaaggtcctggcagatttgtgtctggtaatggcccactccctggttcataaaacagaatgtcaccttcttgctgtctcttcaccttctggaaggagcaaggtagctctctggaacctcttttatgagagctgtgccctcgtgatctaatcatctctacaaaagccctacctcctaatatcataatcttaggggttagcatttcaacttatgattgcaaaggaggagggaacacaaacattcagatcatagcaagtttgtgtaaatcagcatttttttcttccataagcatttgaagaattaagagtgaaatttataggcctagaattctcttcatgagaatgttaattataaattcaatgtctataacattaatagttatagaattatacagagcctctatttcttgttgtattagtttggttaatcaaaatggaaaattttaacataccttgctcaaaaacagaacaaggagacaaaagaaaatcaataagggtactgaaaacttcaataacaggaataaccaacttgtatgtatgtgtgtgttgctggacattatcatttgtgagatacatttatattgttgtgtgtagctgtgtatcattcattgtcattatatagtatttcagggtgtgaatggtcaatttctataaatgttctgcatgttcaagaaaaagcagtattctgacattgcttgttgttgtgttctgtatatgtccattaggtcatctttgctagttgtgttgttcaaatattctgcattcttttttattctttttgtttgcttattttatcagttactgagaaaattatgttaaagtgttccacgatgaatagtgaattgtttctccttggattttgtcaattttttgtgtcatatgttttaaggctattttattttattagattcttaaccaaatataaatatgtgatatctttctgctaaattgaaacttttagcgttatgtattatttacctctatttctgctagtgataaactattatagtttttgtttgcctgaaatgtcattcttgatagatatttttacatgggtgtaaaattcaagattggcatttatttcattttggtacattaaagttacctcctcaatatcttctgggttccactgttgtctcattgtgctgcttcatcagtaatttattatctttcttccaattttactaattttgtcttcttgtgtgtccaacatgctattaaaagtattccttgagttgttaattttggttattgtgtttttcattttaaaaattataattattactgatcaagtcwgccatgatattttttataggtttctgttccctgcaattttttttttcaagacaagtcttgctccgtcgctcaggcgtgatcatagctcactgcaatcttgaattcctgggctcaagtgattctcctaccttggctcccaaagtgttgggatttcaggcatgagccgctgctcctggctcctgcaaatattcttaagcttgtcatttatttatttaaatatattaaatcttcatctgataattccagagtctgaagtctgcaagtgtatacctgctgtgtgctgtttcagctggacagctccatatttttatgtgtgccaacttttatttgacttttgatggtccatatcctgaaaatgatatttgccaggatatcctgagatcttggatggaaatacctttcttcaygatagatttttatacaccttccagtgagtgaatactactgctagtaaaccactttaaatcaagttcaagacttgaagctccttggctacttaractacgtattctcagataaaaatatgcaggatatctggtatctagttacaagtttataggattaaattttcctttcctattttccttctggcctttttggtgccaagtcaaattccccagcagttttctgggctggagagtaggtgggtttagttttcacatactattactggaaagattagtcctttgaagttccagcttaatgtagtttggaggccccataagactccccatcttgaacatcctgcttctttttttttctttcttyctttctttcttyctttctttctttctttctttctttctttctttctttctttctctttctttctttctttccttccttyctttctctttctttctttctttttcttctttctcttttttttttttttcagatggagtctygctctgttgcctaggctggagtgtagtgacaggattttggctcactgcaacctccgcctcccggrttcaagcaattctctgcctcagcctcgggagtagctgggattacaggcgcccaccaccacgcctggctaattttttgtatttttagtagagacgaggtttcaccatcttgaccaggctggtcttgaactcctgacctcgtgatccattcgcctcagcctcccaaagtgctgggattacagccatgagccatggtgcccagcccatcctgcttcttaatttctgtcttcctacaacttatgtccaattttatgtcaagttcaatattctgtttacctctttgggcttagctttcctccacaatttgtcctagcagttccccattatcttatcagattttcagtgcttttaagataattgttttaatgttttacccaagaatatttagttgatttcagtaggatgactgctgtaaataatttaggctgccattacctgatattccctatcatagagttctatcaccagtgactagcatctaagtaacattgaaatgcttttatgtatatcttaaaatatttgaattacttttgttttgaaaacaatagtatctttactttccctaaaccttgataagggattcatatctcttattatyaattttgggaaaaaataattcataaacctggtctattatgaaatgtttgctaattgagccaagagagcacatgcattcatctaaaacattcatataatcaaactttattaaaggtgatatttgtggctttacttgacataaaacagcttccatatttctctattccagacattttatttaaaatacatttttgagcataagatatttaaaatgtgtaggcaaataagatatccatatcattaaaagatatctaaagctggtaatggtggctcatgcctgtaatcctagctacttgggaggtcgaggcacaagaatcacttgaaccagagggaggcggaggttgcagttaacggagattgcaccactgcattccagcctgggcgacagatgagactctgtttaaaaaaaaaaaagatatctaacaataaacaagtaaactatcaattataatacaatcaaattcaagctacaactgaaataaatacatggtatctaggaaactcagaggggaagcaactaactcagtatggtggggggtagggggttgaggcagaaaaatcttcccatataggatgtcacatataattatagtgtttatatttgccaattgtaaaaaaaaaaatggcaaaagagatctcattcagaaaagcaataagcacaaaagttttaggaataactttaatgagaaatatgaagtaaaagtatgaaattttgttgaaaaatattttaaaatcttgtataaatgagatggcataatgtatttttaggcagaatattacaaaggcatgttttccacaaactagttggatttggccctgtgtcaataaaaattccagtaagatgattattttgctttagcatgacaacttttttcctaaaatttatctctaagaataagcgtgaagaaaaaaaaaattgaaaaagagtttaaagtgtagacgttctgttatcagaattaaattttggggctgggtgtggtggctcatgcctgtaatcccagcactttgggaggctgaggtgggtggatcatttgaggtcaggagttcaagaacagcctgaccaacatggtgaaatcctgcctctactaaaaaatacaaaaattagccaggtgtggtagtgggtgcctgtagtcccagctactctggaggctgaggcaggaaaatcgcttgaaccctggaggtggaggctgcagtaagccaagatcatgccactgcactccagcctgggtcacagagtgagactctgtctcaaaaaaaaaaaaaaaaaaaaraaagaaagaattaaattttgggaagtcattattagcaatattgtgtagtatccattggacaggatgagagtagaggaaaggagatcattaaaatatacaggtaagaaattatggatatttaaattcagactagaggcaagggctttaatatgatataaaggatagaattgataaggctaaatgtgggagatacagtaaaataataaatagatgctatcaaggttcatggaaatgttgagttcagtatgcaaaatgtcatgtaaatagacgtagacaataatcaktttaatttgttgatctgagtggggctgaattctaaatatagactttgattcatctgcataaggaagctggattatggataaaaccatctatgaacaatgtataaagtgtgaaaaaaagggataaggtcaaaatattgtggaacacatttaaaggtctgagagaatgaaagtccacagtctaaaagcagtaggagatgtaggaaaaaaactaggaagtggtcctttatgcaaagcaaaagaggaaagtttgaagaaaatgagttgattgaagttgtaagatgtcacagaagtcaagaagaggtctctgaagtgttcattggactggtcattatgatgtcatgagcactttagcatgagcagctttagaagtgtggttataggagaagcagtgaattaaagagttaaagtaattaagaaaacagagacagaactactgagtaccccccaaaagcaattatcttcaaaatatggaaaaccagattgggatacaraaaggtttcttgttaaagataaaggaggcctgagtaagtttatatctcatgggaaaatggtaccagagaagaaaaggttgaagattagaagagttgaaaattaaagggccaaggctggttttttgttggtttgtwttgttttgttttgtttttaaagagggttttactctgtcgctcaggctggagtgcagtgatgtgatcactgctcactgcagccttgacaccccgggctcaagcratcctcctacctcagcctcctgagtagctgggattacaagcacgtgccaccacacctggctaatttttaattttttatagagatggagtctcactgtgttatccaggctggtctcgaactcctgatctgaagtggtctgcctgcctcggcctcccaaagtgctgggattacaggtatgaggcactggactgaggcttcttaaatggtggcaaggaacatattttgtgctttaaatgatttaagtatttaaagatcatagttttcctggcaacttactgtagagatcacttcagaatttccctgggtagagtagtgtgctgtagaagtatagtgttgtaagccagtgtggattgggagtccataccccttatttatctattctgtgtatcctattaataacagtaattatcaggttattttgcctttgaacacsttagtaagtctgagcatttacatggaaaaaatgctgggtttattcctcctgttattgtattttacaagtctgtcgagggtccacagtgatctttgccccataattgtaaaatgagatattaraatcatccttatttatcttaaccacctactccactgtacagttcctataattccacaaacwtctctttatattggtttatgccttctttagatgattgtgaataagagtattatcttaacctctctggtgggtctacttctgtaacggwtgtgggtcatgaattattttttactcagacataattatctttggtcttatataaagaaaaccctacagactccacmaaaacactcttggaactaataaacaaaataaagttgaaagataaaaaatcaayktacaaaaatcaatagcatttctatacactattgaactayctgaaaaataaatcaagaaaaccatgctatttacaatagctatgagaaaataaaaatacttaggaataaatttaaccaagaggatgaaagacctgcaagttgaaaactttaaaacattgatgaaagaaattgaagaagacacaaataaatggaaatatattttatgttcatagcttggaaaaattaatactgtttaaaatgtccatattacccaaagcaatatacaaattcaatacaattcgtatcaaaatttcaatgaaktttttacagaaatataaaaaacttccctaaaatttgcatggaaccacaaaacaccycaaatacccaaagcaatattgagcaaagtaaataaataaataaaacaaaacatacaaacaaaaaaatraagctgaagacatcatactacctggcttcaaaatatacttcaaagctataataatcaaaacagcatggtactggcataaaagacatgtagaccaatggagcagaatacagctcccagaaataaatccacacagttactgtccactgatttgcaacaaaagtatcaagaatatacaatggaaaaaggacagcctcttcaataaatggtggtgggacaatttgatatccagatgcagaaaaatgaaactagacccttatctcacastgtatacaaaagtcaactcaaaatggattaaagacttaaacatagacctgaaattgtaaaactaacaaagaaaacacagtgggaaagatgaaagatcaataacactgatctgagcaatgatgttttttatatgaccctgaaagcacaggcaataaaagcaaaaatagactaatggattgcatcaractaaaaagctcctgcrcagcaaagaaaacaagagtgaagggacaatccacagaatgggagaaaatatttgcaaaccayagatctgataaggagttaacataccaaatatataaggaactcaaacaactcaatagtaagaaaacaaataacacgatttaaaagatgggtaaaggatgtgaatagacatttctcaaaagaaagcacacaaatgaccaacaggtatactaaaaaatgctcaacatcatgaatcatcagaaaaatgcgaattaaaaccccaatgagatatcacctcacacctggtagaatggctattattgaaagaggaaagataacaagtgatggagaggatgtggagaaaagggaactcttgcacacggttggtaggaatgtaaattagtacaatcatagaaaacaatatggaggttactcaaaaattgagactaaaacaactatccagcaatcccactactgggtatatatccaaaggaaatgaaatcagtatgtcaaagacctatccgcactcccatgttcattgcagcattattcatgatagttcagatatagaatcaacttargtgttcatagtggatgaatagataaagaaaatgtgaaatatatatatatatatatataccaatggaatactcatcagccattagaaagaatgaaatcctgtcattcgtgacaatatggatgaatctggaggwcattatgtttagttaaataagccaggcacagaaagacaaatactgcatgatctcattcatgtggaatgtaaaaaagctgatcttatagaagcagagagtataacagtgattaccagagatggrtagggcagtagtaaggaggagagattgaggagaggttggtcaatgggtacraagttacaattagataggaagaataagttctggtgttttattgaacagtagagtgtagttaagaataatgtatatttcaaaatattatagaatagaggattttgagtgttctaacttcaaagaaatgataaatgtttgaggtaatggatatactaattaccctgatttgatcattacacagtgtatatatgtattgaaacatcagactgtagcccataaataggtacgtgtcaattaaaataataaaaatagtaaaatgtatagttacttccacggggtagaaaatgtggtatatattcatggtatactacacagccttaaaaaaagaaaatcctgtcatttatgacaggaaaaaaaaataagataatccaatgtaccatttgttgaaaatacttkttctttttattgcattatcttgacatctttgtaaaaagtcggttgaccataaatgtgtgggcttaattctggactctatttcactcctttgatctatatgtttatcctttcactaaaagtagactgtcttgatattgtagctttataaatttgaaaatcasctgtgaaatcctccaaccttgttctacttgtaaacattgttttggctattataggtcatttaaattttcatataaattttagaatcaacttttcaatttctacaaagaattccgctgggatttatattgggaatgtttttaacatttagatcaatttagggaagatttggtatcttaacaatattgagtcatcagatcgtatgaacatatatacctccatttacttgggtctttaaaaaattgtctcagcatgttctgtagttttaagtattgaggtttcaaaagttttttgtaatacctattcttatgtattttatggtttaaaaaattctattgtaaatggattttaaacagacttttaatttgcagagactatttcttcctttccaatattaatatttgtttatttattttgtcattataatggctaggacttccaggacaatataaacagaagtggtgagagcagacattcttgccttaaccctgatcttatgagaaaagtgttccatattttacaattaagtatgtgctactcataggtttttcccaaatactttattaaattkaggaagtacccttttcyggtttgctcagagttttatcatgattcattgttgaatttcatcaattttcttttaatctattgatatgagcatatgatttttcttcgttttactaatatgttggattacactaattgatttttgaatgttggaaaaaaccttccattcytagggtaaatcccacttagtcatgatatattatcttttcaaacattgttagatttaacttgtattttagtaaatatttttacatctgtgttcatgtagaatatctgtaaataattttgtaaagaatatcttttcttcttgagggrtaatgttttcattaggttttagtatttctaacctaataaaatgacttaggaggtgttccttcctctattttctgaaaggttgtgtaatattggtgttatttcttccttcagtgaaacattctgtgccagggattttcttttagggaaagtttctgataataaattcaatttctttcatagactttctattaaaaatgttaacactatttatattttatttcatgctctgtcaattttgttaagttgtattttttaaaggatttgtcagtttcattcaatttatcatatttttggcacaaagttgttaataatattctctcatcttttaacgtctgtataatctgtagtgataacatctttttcatttttgatattggtgatttgtgttctatcctcttttttatcaataagtctagctgagaatttatcaattttgytgatttttttcgaatagccagcttttggctttgttgatatattttctattgtttggtttctatttcattaatttctgcttttgtctgtattatttgccttcttatattacttcgggtttactttgctctcttttagattttaagtggattcttaggtaactgattaggtaactgacatttcttctaatataaaaaaattaaagccacgaatttattagtatgaactgctttatttgcattttactaatttttatatgtgatgtttttatttttattcatttaaaagtatgttctaatttccattatgatttaactctttcacccatttattacttaggagtgtgatcaagtttacaaatatttttggttttcctagctatcttgttgcttttgatttctaatctaattctcttttggtcagagaacatactctgcatgatttcagtcttttaaaaatctgtttagacttgttctgtggcccagcaacagtctatcttgatgaacatatcacgtgcacttgaaaagaatgtatattctgtaattgttgggtgtaatgatttataaatataaattattgttatccagattttctgtgtctttatttttttgtctagttgtcctatcaattgctcagagagcagtgttaaaaatcacctatcatcattgtgtttatctctttgtgcccatttttgcttcatgtaatttgaagccctgttattaggcacacacattgatgattattataatttcctgatttattgatccttttatcttcataaaatatcgatttgttgctggtcatactttttttcttgtagtagcttttgtgtgatattaatgtggccattctagtctcatgttttctgttttcatggcatattgctttttgttcattttacttttgtttctttaaagtatgcccttgtwgaagcgtattgttggatcttgctgttttacccattttgataatatctgctttttaactgaagtgcttagcccattcacattagtgtaatatttgatatgtttagatttgtgtccttcaatacattatttgctttctatttgtcccctctgattttgttcttctgtttccgcttatctgttgtcttttgaattatttgggtattcctcagaatctcttttaatttttagatataactatttttagattttttttaatttgcattttttagtggttgctgtaaggattacagcatacatacttaacttttctcagtccacttaatagtgtacaaccttcataaaatatagaaaagttacaaccatataagactatttagctcttcctgtgccattgcttatgctatagttttcatttgtattaaatctcatacaatacaaaacccacaagacacagttataatttttgtttaagcagttattatgtactttagagaattaagaaggaaaaaaatagtcatttctgtttacctagtcatttaccatttctagtgccattaatttgttcctaaagagctgagtttatccataatgtctttttgcttcaacctgaaaaactttayttagcagtttttgtaatgcatatatgctgcagtgatttatcttagttttcctttatctgaagatctatttatcttccatttgaatgatayagaattctgggggattgacagattttattttcttccayktaaaaaaaatgttattctactgtcttctaatgctcatagtttctgatgagaagtgtgtagtcatttaagtcattattccctgtgtgcgatatgattgtttttgttgctcttgcatggctggggggacacttattttaaggttttctacttacctttggtttagaagtttgactatgatgtgcttatttatgcttttctttatttttatcctgtttatggttggctgagtttatcaaacatgtacatgtatattgttaaccaaatttgacaaatttttgttccttatatccttaaattttttaatcctaatttctctctatcctttctggactccaattacatacatatggtactttttaaatattgtctggttttaccatagtagggttaaagtttggtcctttaagactatacatttctttcatattcttgtatattctatattgttcaataggtctctgagatttattttatttttattttatttcagttctttttcttttcttcagattggatcatttctattgatctattttcagattcattgacttttgcctcttttagctccatttttcccaagatcaggcagtgagttttaatttcaaatattatatttttattgctaaaatttccattggctttyttatattttcctttttttctgataagatttcctttattttcattccttaccaataagttttcctttatcttattgaatawdtagtagctactttaaagtcattgtccgctaattcccacatctgtgtcatctcaggtttggattcttgatggtctttacctttaggaatgcatcacatttttctggtattctatgttaggtaattttggattatatcttgatattattaatgtgttattcttgagattcatcattctgtttgtrttagtccattattgcactgttataaagaaacacccaagactcrgtaatttataaagaaaagaggtttaattggctcacagttccacaggctgtaggaagcatgatgccggccatctgcttggcttctggggagccttcaagaatcatggtggaaggcaaaaggaaagcggctcatcttacatggccggtgcaggagcaagggasggggggawgtgctacgcacttttaaacaaccagatttcacgagatctctctcactgttatgagaatagcaccaagggggaaacctgccccatgatctaatcacctcccaccagggcctgcctacaaaattggggattacaatgtgacatgagctttgggcggggacacagatccaaaccatgtcattctgccactgccctcaccctccrcgaaatctcatgacgttcttacattgcaaaatacaattatcccttcccaatggtccctcaaagtctgaactcattccagcattaagccaaaagtccaaagtccaaagtctcatctgagacaaggcaactctcttctgcctatgagcctgtaaaataaaaaacaagttagttactcccaagatacagtgcgggtacaggcattgggtaaatactcctgttccaaaagggaaaaaccagccaaaagaaagaattataggccccatgcaagtccgaaatccagtagggcagttattaaatcttaaagctccaaataatcttcattgactccatgtctcacatccagggcacactcgtgtgagggrtgggctcccaaggccttgggaagctccactcctgtggctttgtggggttcagttcctgcagctgctctcatgggttggtgttgaatgcctgcagcttttccaggcacagtgtgcaagctgcttagaactgctggtggattcccattytggggtcttgagggtggtggmcctcttctcacagccattkcactccagcctgggcaacaagagtgaaactccatctcaaaaaaaaaaaaagaaagaaagaaatttcctctgccagrtaccctaaactcatcattctcaaatttaatgttccgcagattcctacagcacaggcataatacagccaggctctttgctaaagcataaggaaagtgacmtttgctccagtcctcagtaagttcctcatctccatctgagacctcctcagmctggacttctttgtccatttcactatcagcacttcggtcccaatcattcaagtagtctctaggaagttctaagctctccctcatcttccctccacactattccaacctgtgcctggttacccagttccaaagtcactttcacattttcaggatctttatagcaatatcccactctcagtatcaattttctgtactagtcttttctcacactgctataaaaacacctgagactggataatttagaaagaaaagaggtttaactggctcgcagttctgcaggctgtacaggargcatgatgctggccatctgcttgtctwctggggaggcctcaggaaacttacaatcatggtggaaggcaaaggggaatcaagctcatcttacatggcatgagcaggagcaggagcaagagagagagaagggggaagtgatamacacttttaaacaacaagatctcatgagaactctctcactattatgagaacaacattaagggggaaatccacccccatgatccaatcacctctcacaggccccatctccaacattggggattacaatttgacatgagatttgggcagggacacagatctaaaccgtatcactgttatatttctatgaagggtgttgacatttttgttttagtagagaataaacttgattagactaaaaatgcaaaatctttcttgcttctgcttrgtagcagttcaaacttcagtttagttcttttagctttagcctttgctctttatatgtgattcagggacggcagagatgtgggaagaatttgatcatagaatttagggctcaccttcttttgttctgtgcactcaaggattctctacccctctcagttgtggattacagtgctgttgctcctggctcctcccctttgtccttaagctggagaaactagggattatctgtcagagttttaacttcctcatgctgtgtcacaaccttgatcagctattaggccaaagcaacaaaaacrggaaactcacttcatgctgattcttttctccaagttttagtgccctsctctcccaaaactgcctccttttgtttattccccagagtccttagatatttgctttatgtattttggccagragctatagttgttatctctggaagggtctgtttattatgagcttactttgatctactagactgagcttcagacattgtgttttgaaatttttgcttaacattacatttatccaagaattaaatttaatatttatttatttttttcttcaacttttaagttctgaggtgcatgtgctagttgtgcaggtttgttacccaggtaaacatgtgccatggtggtttgctgcacagatcaacccatcacctaggtattaagcccagcatccattaggtattcttcctgatgytctccctcccattgctcccccaacaggccccagtgtgtgttgttccccttcatattttcatgtgtactcatcattcagctcccacacrtagtgggacgatgtggtatttggttttctgttcctgcattattatgctgaggataatggcttccagctccatccatgtccctgcaaaggacaagatcttgttcstttttatggatgcatagtattccatggtgtatatgtaccacattttctttatccagtctatcwttgatgggcatttgggttgatcccatgtttttgctattgtgaatagtgctgcaatgaacatacacatgcaggtatctttataataggatgatttatattcctttgggtacatacccagtaatgggattgctgcgtcaaatggtatttctgcctctagatctttgaggaatckccacacagtctyccacaatgagtgaactaatttacaaccccaccaacagkgtaaargtgttcctttttctccatctgttgtttctggacttgttaataattgccattctgactggtgtgagaagatatttcattgtggttttgatttgcatttacctaatgatcagtgatgttgaggtttttttcatatgtttgttggctgcatgactgtcttcttttcagaagtgtctgttcatgttctttgcccactttttaatgggcttgtttgggtttttcttgtaaatttgtttaagttccttgtagactctggatattagacttttgtcagatggatagactacaaaatttttctcccattctgtaggttgtcttttcactctgatgatagtttcttttgctgtgcagaagctctttaatttaattagatctcatttgtcaatttttgcttttgttgaaattgctttaggcacttttgtcatgaaatctttgcctgtgcctatgtcctgaatggtattgcctagcttttcttctagggtttttatagtttcatacttttatgaattamgtctttaattaatcttgagttaatttttgtataagatgtaaggaaagggtccagtttcaattttctgcatatggctagccaattctcccagcaccatttattaaatagggaatcttttcctcattgcttgtttttgtcaggtttgttgaagatcagatggttgtaggtgtgtggtgttatttctgagttctctattctgttccactggtctacacgtctgtttttgtaccagtaccgtgctgttttggttactgtagttttgtggtrtatatgaagtcaatcaagtagcatgatgcctccagctttgttcttttgcttaggatcggcttggctataaaggctcttttttggttccatattgatatggtttggctgtgtccccacccaaatctcaccttgaattgtagttcccataatccccacatgttgtgrgagggacccagtgggaggtaaytgaatcatgggggcaattatcccatacagttctcatgatagtgagtgagttctcattaggtctgatggttttataagggcttttycctttttgcttggcacytctccttcctgccaccatgtgaagaaagacgtgtttgctttcccttccaccatgattctaagtttcttgaggcctccccagccatactgaactgtgagtcaattaaacctctttcttttataaattacccagtctcaggcagttctttatagcagtgtgagaacarattaatacacatatgaattttaacatagttttttcgaaatctgtgatgaatgtcaatggaagtttaataggaataccattgaatctataaattactttgagcattattgccataacactgattctgtctatccatgagcatggaatgtttttctatttgtttgtgtccactgtgatttccttgagcagtggtttgtcattctccttgaagaggtccttcacttccctttttagctgtattcctaggtrttttattctctttgtagcaattgtgaatgggagttcattcataatatggctgtctacttgcttgttgtttgtgcataggaatgctagcaatttttgcacaytgattttgtatcctgagactttgctgaagttgcttatcagcttaagaagcttttgggctgagacaatggggttttccagatataggatcatgtcatctgcaaacaaagataatttgatttcctctcttcctatttgaataccctttatttctttctctttcctaattgccatagccagaacttccaatactatgctgaataggagtggtgaaagagggcatmcttgtcttgtgctggttttcaaggggaatgcttccaggttttgcccattcagtgtggtattggctgtgggtttatcatatatatggctcttattattttgagrtatgttccttcaatacctagtttattgagcatttttaacatgaagggatgttgaattttatcgaaggccttttctgaatccattgagataatcatgtgggttttgtctttagttctgcttatgtgatgaattacatttattgatttgcatatgttgaaccagtcttgcatcccagggatgaagcctacttgatcatggtgaataagctttttgatgtgctgctggatttggtttgccagtatcttattgaggatttttgcattgatgyttatcagggatatcagctggaagttttcctttttgttgcatctctgccaggttttggtatcaggatgatgctggccttaaaggagttagggaggagtacctccttttcyattgtttggaatagcttcagaagaattggtaccagctcctctttgtacctctgatagaattcagctgtaaatctgtctggtcctgggctttgtttgcttggtgggctatttattattgcttcaatttstaatttaatatttttaaatcttgggttaaatggttgaatgaatgtgtgaaaagttagatatcaatgaatgaatattcttaaatgtataaactttaatcttgctggatataggataaaatttacattaaaacactgtaatthgtcaatttaagtaaaataaattcaaggaagtggtctgaatttctcagtgagcatttagatatttatgggagtcatataaaataawttataaatgtgactgagggctttttattaaggaaaatgaaatattgctatggacatgattctgtgtgtttctttactacactatgaactaaaaattttggagacaaatctaagtatataaattggtttattgatgaccgattgggaatataaataggcacaaaaatttggcgaagcattttggcatgtctacctaaaatttaaatatgtaagcactagtccccccttacctgcagtttcactctgagcagtttcagaaaataggtgagcacagtacagtaagatattttgagagagagaccacattcataaaacttttattatagtgtattgttataattgtcctaatttattattattgttgttaatcttttactgtgcctaatttataaatcacactttatcataggtatgtatgtataggaaaaaacatagtatatgtagaattcagtattatccttggtttcagacattcagtggggatcttagaaagtattctctgtggaaaaggagggactactgtacttttaacaaagcacttcccagaataaacacacagacatatacatgcacacactttcagaaatgcacttaaatattcaatcatggagtaaaaattaattatgaaatatctagacaatgaayattatgtagtttttattaagaaagaagcagaattatatatactgacatgaaaggatgttcattatatatgttaagtaaaaactaagttcatcatatatgttaagtaaaaaaaagtcacaaattaagagaaagtgttaattgatttgagagtttgtgtatttttttttcctattttgtgctgaaaagctgaagttggcatcaaccaaggcatattgktatctatgtatcaagctaaataatttaaagatctttaagactattaattcagagatgctgtataaatagaatcagtgccagattttttgtttcaattctatcagccaagtatactatgctttctttgcttgtgatagaaaaaagagagaaaaaacacagaagcaaaaagtaaagttgtacaatagtgtgtagagtgtggttccattttgtaaaatgtatcagtgtgtatatttatatagcatagtcaaaagcctggagtgatataaattttctgttactggtctagtatacaagggaattagattttaaaggactttcattgtttttaacaattctgaacaaatttaatttggtacaagaagtatatattttaaatattattgaacttaattaaaataaattagagctcaaaaaataaataaatcacaggaagttcacagtctgactttatcaggaatgttgctattttcttaacaggtcatcaaacattatcactgatgcttggaaagaagcactttttataatttaaaaataccttttattcttcaacttctgctggcttaaagagcactaartccacatatcctaggaggcatggctgtccaatatatactatgtgtacattgatttatgaaccaataaatgtttcatacacagttgagattttaaatgagcttatgataattggatcaaaggaatactagtccagcttgagagtactgcagaaaaccaatcacagaaagctatgatgaaattttaattataaaggatattgaatatcctagagtgacaactctgttataataaatgtaacactgaatgggaaagagagaaaggagatttttacccatttctgtttgaaatcaactttctatttctagtaaattatcacaccattctgttttaatttttatatcttaaagttatcattccagtgtctttggtttactgggtttataaaagaattgaccagtagctatataatagatayagaaaagtctgcctgggtgtrgtggctcatacttgtaataatattatattataattgttctattttattattagttattgttgctaatcttttactgtacctaatttatacattaagctttatcatgggtatgtatgtataggaaaaaatgcagtatatatagaattcagtattatccttggtttcggacattcagcaggggtccgaaggtgggcgaggtgagcccactttgggaggccaaagtgggcagattgcttgaycccaggagttcaggaccagtctgggcaacatggtgaaatgctgtccttacaaaaaatacaaaaattatctgggcatgatagtgcatgactgtagtcccagctacccaggagcctgaggtgggagcatcactgagcccggtggttgaagctgcaataagttttgattatgctactgcactccagcgggacaactgagtgagaccctgtctcaaaaaaaaaagtcacaaattaagataaagtgttgattgatctgagaatttgtgtatttttttctattttgtgctgaaaagctgaagttggcatcaatcaaggcatattgttatatatggatcaaactaaaaaattttaagatctttaagaccattaattcagagatgctgtataaatagaatcagtactagattttttgtttcaattctatcagccaagtataacatgcttttcttgcttgtgatagaaaaaaagagagaaaaaacacaraagcaaaattgaagaatttgtaaatcatttctaaataatttcaataaaatgagctttgaaagggaaaawttttagataacattatctcatcaaaatgccttaaagtatattttaatattcagtaagaacagtgtatattaacatggctaatttagaggatttatattttacccacatgataatgtattatgcctgtaactgctaaaggaattatgtagcaaaatctgtcaaggaatacacgagtgggatttatatcagaaaaatcaaagccatttgtaaagccccattacttaggcagaatatcataggtaggaggtagatgttactgaaagaagaagttgggatatgaaatacaaatctattttgcatcatgattttgttaagtccggctgtttattattaaaaacatgtacagaagattcaattgaagtttctaaaagagaaagaaacttgtagttgtgggaacaatagtattccttatgaaatacttagatattaatagcttgagactgataatacaattcttaagttaggggttgcatgtgtagtggtcagatgttatttcaggatctcaagaaacagagccatggtaaaaagaagcttcctggagcttctgataaattccgtcacctttttgggacccagtttcttcatcmataccaacctcattagggtcctgtgagaagtacatgaggtgagatatgtactgaaataatatgccaactcttaagtgccaagacattaggatgcaagggggggtgcccaaaaagtcaacaattacttgatactctagatatatgtatggataattttgagaagtaatccttcttacacagaggtgtaggtttgtttgttccaagcagcaaacataatgggtataggaaagagaaactgtggccttcatatagactgagcttaggaaaacagttggaaaacagttcaaattcaaggtacttcaacaatatctagtgtgtttttgaaatatatttttaaaacccctatccaaatcaatgaatgctttggctaaaacctacttgggaatgagggtgttctttagtgccaaatactcatctkattttagtccatggctaaaatcccaagagttacagaggagaaatagggccaaacaaggtttctattaaaataagaggtcccaagtgatgaatggaaacttggaacaggtttaatggcaactataagccagaaattagctgaaatacacactaatgaatttggggcatatcttgagtttcagatagaaaattggtactaagtttagtgaattagaaacatagcttaacctaggcagttgcaattcttgttccaaaaatgctcaatttgctgctggactgcatggacacttgctacctccttgttttgagtcattaacaaaatgttgaatgggatatctggagtatcaagtaattgttgactttttggtcacccaacccccttgcatcttaatgtcttggcacttaagagttggcatattatttcagtacatatctaaccttatgtactcctcacaggaccctagtgaggttggtattgatgaagaaactgggtcccaaaaaggtgayggaatttatccgaagctccaggaagcttctttttaccatggctstgtttcttgaggttaaagaacatgatttaccaggctctgtttcttgagagaccaagagtggatccctgtagtccccattagaattctccttctagtttgaactattccattagtaaacactttttggcatgttatttaaacaattacaaaatcacctaactacactgtcttgcagctgcctttctttttttgtcttgtccacgtgagtatattgggagactytgtttaatgtctccacraattctagatagactgttcctgcagcatttctttttttaaattttgttttgataagcatttattttggcaatgattctagtaaatgaaactaaagtgcccatatgaaaaacaatcttaagtctatgtggttagtttgaagttaccagtttttaattaagccggagtagtccttagtatgaatgccttcatttctaagtgctcataaacaatcactttagtaatattacagttttgaaggaatttatatcaagcttaatggcactttttaaaagataggaaattgggttctctagtcacatctgtaagttatttcagtgccttggaagatcatttatctggccacagataattgacttacttacatcagttttttttttttttgagatggagtctygctctgttgcccaggctggagtgcagtggcatgatctcggctcactgcaacctccgcctcctgggttcacgccattgtcctgcctcagcttcccgagtagctgggactacaggcacccaccaccatgcctggctaatttttttgtattttttagtagagacggggtttcaccatgttagccaggatggtctcgatctcctaaccttggcctcggcctcccaaagtgctgggattacaggcgtgagccaccacacccggccacttatatcacttttatgcttcctatctccttattgatcttgaggttcaagtttcacttaaccattttcttcaatgaaaaataattttataatttaaaaaacctcaacctttaatattctatgattcttgttaggccatctcaattgagaatactgataaagaagtaaaactccccccaatactggctagtttgattttatctgttaatattacgcaatctgccccaaacctgtctctccctttttattgttacttatccaaagatggcttgaatctcttatggcttgaatctctttgtttattctaagcaattttcagacacctcagccaactatcaataatatattagttttttagaactaaaaatgtagaggatctccccctaaaagccaattgttaatgccaaatatttgactgatatatttcttctggaggaagggagatgtgaaaaaatttagccatcaagttatgtgaaaactttttcatcttcccatccactggatgttttatctgtaaataatgctataatcatattggaaagtattttccttctggggatgcatgaagatcaggaatcctattcgtttttaacaagatggaatttttaaaaactactttggacaactctaaacatcagagatgaccatttgtctcttttttattatataacttgtgctcggtttgtagagcaacataaatacatgaattaaaaaatgaaaactagctccttccctatttgacagatacttctcaacctcctctccataagatatgctctatccctatataggaaatttttctgtagcagcttgagtttactaaaaataagatctgaagaaaatgaagcaattaacatttattgagagtctataagggtttctacattgtgaaggagacagaaatataagacatggctcctgctttcaggttgcttataattaaagagataatattaaattatttggatgaatttaaaaatgacacatgccatcttacagatatgctgtagactgtgaaaatgaaaaaaaaaacctcgtgtttagagtagacactgtttsatggattaggtaggttttcatctggactttgaaatgtatgtaagattttataaggaggagagaaaataagaagctgtttgtattagaattacacagataaatttgtaaatttagttcttttcaaagaacattaattgagcacctctgtgccaagctccctactggatgctgtagattacagcatgtttaggaactaacttcatactctgttgctaaagtatttctgtgttttctaaaaaggtaaatctcttgtgaggaaacaaatctcttgaaggggttctcataacagaagtcccatttacttcatgatataaaaaggggctgttttctggttttgttctcaaaatgtaggatatagttctagacgtaattgggaaagcttaactttgttgcatacgcatcttccctatcatggttgatttcctatatggcatagttaaatgtgtttatccgtgtttgatatctaaagggccatgctacatatagactgccaactaaggttttatctgatgataataaattgttgtatttcatgacgacagcaacaacaacartaatgtacttaactagtcactgtgcaaattgctttacatacattttctcatgtaatcataataataaccgtatgagttttgcttactattgttttccttaattaaaatgagtaaagtgaagcttaggctaagtaacatgtccatagccaaacagttagtcactggcaggagtgtgactgactccaaagtctatattcctaattactgtgttctactttttaatagrgagctcttgaaggtccaaggaaaggaatgcrtaatggtgtggtcaaggcattagtgttaatatttgtagaaagggtaattaacaacagtctgagcaatcacattctaacaactagtaaggttggcaggagcctcagtataatggtgtgaggaacgaaatcattatagtgccaaatagagtataccatctctttagtacaatgtctttcaaaatgaggctgattgtgttggctttatatttgactccttaataattaaggcagtaaattctagctggagctaaatacctacaaggcctaaaacagcataatggacaacctggcaggtgtccttgctggaagatgacaagagtgctgaaaggagagtcctggtttttctcccaagacatgacatttgggggcttccattaaaaaattaccaagcctctgccactgtaatctcttccttaagtgcctatgattttttcacagtcacaggtctatgcctggtcaatacccagtggccaggtctctgagctgcgtgcagagatggcagcgayttggagggctgggaggagataaggggaggaaagatcacttttcatgacaacttacaacttgattccacttataagccatttattttcagaaacaagtaatgggtgargacacaggccaggtccacaatttgtgcacttgagagattaaggcctccgagatcaaattaccacagcaaactgagacagaattattgtagggatgtttggggaggatgcagagagaagaggaagaagccagagacccaagaaaggagacaggaatagattttgatgaaaattgcttcctactctgtacccttgaggaaacaaagaggacaaataagaagcagcagtgataggaggctgggcgcttctctggaataacactggctaggtagtggagcattgatagtgagtgtgcttggttggtggaacgaagggatgtgctagttcaggcctttgaattctgggtgtcaggatcacaaccttggctcctttaactgtccgctctaggagggaagcatgccaaatgtcaggtctcactctgactttgttccagtccatagctagaaaatgacccatagaggaagatctacagatgacagaatactgggagatgaagagaaaggacgttttagtgagtgctttttttgcacatgaggcaatagatttcaaattcctgtggaagaaatgtgagaacctgggaagastgaatattcagaactgagcagcagaggcaatgacacagcatggaaagatttcctctgatccttctaccttctcttttactgaagtgaatttgttgtctctgtgttgcctctatagcagtacaagaggaaacttggggacacagaagaacagaagtctaaggagtcttatatttaaggaagataagctgcagtcattgaaattgctggttattgtaagataaatcccagactcccacattttgcttaatgacagcagatttttttttttttttaactgcaaagcattaatggaatccaaattccagcctggcttaggagatcaacagtaacgctcttgatttaatggttttgcagactcttgaagacattgtcatccattaaagaaaaaattttaaattactcttgaaagaaaatgtcttgggtgataaatgtaaaagatttgaagcaagattagaaaaagcttgagagaagaatctctttaaaaattttaccagattttccccattgtcgccaaaatgggtcaaataatagatttgcctacagcttcatggagactatttttttaaacagagcattttaaacatttaaatattggttatttgccaaggcacacactgaaaataagggccacttggccgagagcagaattgagtcttggatcccaggatgctggttttaggcttgctcccggaaagagggcagcatttgccatccccctccttttgccctaggagttgagcactttctgcagtacttaagagtgtccagggaagatgtgggagtcaggtgaatagttcccatcgccagtaaccccagagcgcctccccctgcgttgtttccttttaatgttagatccgccgcctgggtgcccatacttagctaaggcccctcagtttattttcctgaattgcgcttggagatcttttcctggggagctgatagccagacttctaggggcttgactgcttttcccagactaatctccttaaagacccgttaagcaggggagagacggtggagactggatgaactggacagtgggggtagggagaaagggagtggccgtgttcctgcggtccgctgggatccggcaggtccagggtgaaggagatggggcwggagaggctgagcagtccgggttcgctgtccgccacttcggcgcggaatcagagcaggacttgctgagccctcctaccgctccctttccccctccccctctgtcttcccttctgtttccttttccctccccctggagctgtagcggcagcagcagcaggaagccgagccgggttgagcgactcggaggcgagcggaggagctggaatatggggagtcagcgaggacggtggggccaggagcccttgggagggcctacggagggagcggccccaggcgctttctagagcgtgagcggtgggggagcaggcgcagggtggcacgagcggaggcggggcccgggcgtggggcacggctggggaagctgccgcctccggccctgcccggctgcctccgccgcggccagtggctatggagcaggcgggcaccagacctgcggcgacagagcatccacgrctccggcggcccatgccctggctgctgctactgcctctcctgctgctgttgctgctgctgctacctggcccwgcggcctcccagctgcgatactctgtgccagaggagcaggcacccggcgcgctcgtgggcaacgtggctcgcgcgctggggcttgagctgcggcgcttggggccgggttgcttgcgcatcaaccatctgggtgcgcccagtccgcgctacctggagytggacctgacgagtggagcgctcttcgtcaacgagcgcattgatmgggaggcgctgtgtgagcagcggcctcgctgcctgctcagcytggaagtgctggcgcacaaccccgtggcggtgagcgccgttgaggtggaaatattggacatcaacgacaactcaccgcgtttcccgcggcccaactaccagcttcaggtaagcgaatcggtggcgcctggagcgcgctttcacatagagagtgcgcasgaccccgacgtgggcgccaactcagtacagacctacgagctcagccccagcgagcacttcgagctggaccttaagcccctgcaggagaacagtaaagtgcttgagstggtgctgcgtaagggcctwgaccgggagcaggcagccttgcaccacctggttctcacagccgtggatgggggcatyccagcccgctcgggtacggcacagatctctgtgcgtgtcctggacactaacgacaactctcctgcctttgaccagtccacttatcgcgtccagctacgggaggactcacccccaggcacattggtggtgaagctgaatgcctcagacccggatgagggctccaatggtgagctcaggtactccttgagcagctacacgtcggaccgggagaggcagctcttcagcatagatgccagtaccggggaagtgcgagtaattggggggctggattatgaggaagcctcctcctaccagatctatgtgcaggcgactgaccggggtccagtgcccatggcaggtcactgyaaggtgctggtggacatcgtggacgtgaatgacaatgccccagaggtggtgctcacggacctgtatagcccagtgcctgagaatgctacacccaacaccattgtggccgttctcagtgtcaatgaccaagactcaggccccaaccggaaagtgagcctgggtctggaggccacactgcctttccgactgaatggctttggaaactcctatacactggtggtgagcggcccactggaccgagagcgggtggctgtctacaacatcacggtgacagccacagatgggggaataccgcagctcacatccctgcgtacactgaaggttgagatctctgacatcaatgacaatccaccaagcttcctggaggactcctattccatctacatacaggagaacaatttgccaggtgtgttgctctgtactgtgcaagccacagacccagatgaaaaggagaatgcagaggtgacctactcycttctggagagggagattcaagggctgccagtcacctcctatgtctccattaacagtgccagtggcagcctttatgctgtcaactcctttgactatgagaagtttcgggagttctttgtgactgtggaggctcaggacaaggggagcccaccactgagcagcactgtgactgccaacgtatatgtggtggacatgaatgaccatgcccctcacattctgtaccctacctcaaccaactcgtcagcagccttcgagatggtgcctcgaactgcccctgctggctacctggtcaccaaagtcatagctatggactcagactctgggcaaaatgcttggcttttttaccatctagcccagacttctgacctggacctctttaaggtagagctgcacacaggagaaattaggactaccaggaagatgggagatgagagtggtagcactttcaacctgaccgtggtggtccgagataatggagagccatcactatcagcctctgtggccattacagtagctgtggtggatagggtttccaaaatcctccctgacactcagaggcatgttaagagccctcggacatactctgaaattaccctttatctaataatagcattaagcacagtgtcttttatatttcttttgacaatcatcattttgagcatcatcaagtgctaccgctacactgcrtatggcactgcatgctgtggaggcttctgtggagtaagggaaaggtcccctgcagaactgtacaaacaagccaacaacaatattgatgccaggataccgcatggcctcaaagtgcagcctcacttcattgaagttcgagggaatggctccctcaccaagacctactgctacaaggcctgtctgacagcaggctcagggagtgacactttcatgttttacaatacaggggcccagacaggaccagggccttcgggagcccaagcagcagtgactgacagcaggaatctcacaggccaaagtggtcagaatgctgggaacctgattattctcaaaaatgaggctgtttctcaaaatgaggtgagacagtggtcagggggtcttctacaaactcatgcatttgttacacatcccccaatatcctgtgatttggctttattgagtcattaacagtgacaagagttatctggtaaactgagtatatatagtatccacaatttgatcataatctgctatttcctctctagaaaaatagcactaaagaattgttttatttttcattttcagaggcatgaagccttgtccataaaattgtttgagaagtgaggattagtcttaatatttaatgctaaaacacagatttgtagagaaacaggacaggccttggaatagggattatgttttagggagtaatgttatgagactcaaggagaaatggcctctgctgtatcatctacagggaaatttttcttttgaaatcctatatgagtgatgtttcttaaaaagctctgaggcctctaggggctatcatagtcaccactatctgctgtctctgtttatactctggactgtctacagtggaaattatctagttaatatttctggtacttgcactgaacctatgtgataggatcctctggaaatgcatgtcacaagtgataaagctgtagtatttagacatcatactgaagctaaagtttgctttggctgtatgatgtggcarctcttctgtagagggctgtcagagggagtggatgatggtgaggcagagagattaagtaccaatttgtctggttggtccagggaggtattagaatgagtggattaggggtgtggggggatggtgaagaccaagagaagctgggattagaaggaagagaagggaaaaagaattctcccaatagtcacctttcttggcatactctgaattcattgtaagaggatttccctgaatttagcttaaatgcagcctgtaatcttctgattttctgttgacagtttctrtggttttgatgagatgtaaagtagccttttcaagtccttcatgtctttaagttaaatgacagtacttccaaagcatgcattcattttctggatctaaaatttgatttgctatagcttcaaaaggctggcttggaaagtggatggcttaccctacagtaaggtgtagaggcaggtgttagtatatgcactagttttgagatttaagtaggtataaggccagcttgttcattattatgaagaatgtacataaattattagaaagtagatgaatatgtgtgtgtgtttgtgttgtgtgttcgtctccatatgtatgcttgaaataacagagatatgctttgtgatacttaaaacttggatttcaaaagccaaaattttgtaccataaatagtgatgaattgttatctttccaaataactactttgtagaaagggcttttagagctactacacaatgtgtgaacaatatttgtctctcctctattttttgcaatatattttcattgacatattgctgtacatacatattgtatgtaatatccatattgttacatttcaagttcatggtaatcttgaggaatgtaatgcacaggcacaaaagttccattcctgattgagagtagatttttctcatggacatttcagatagatttattcatttatcagaagtgcctggtgttagtcaatgctgagaaaccatgggargcakattgtagattaagaaaaatgggggaataaatcaaagagtttccagaagtctttagatcgtagcatttgaaagcacgtaaaagggtttagctttaaataaggttgctgtagacatttgcttaacaaattcttgtgaagccctttgggattggggtgggctacaggtggtgaagaggcatgaacaagtcaggccaggctcagctttgccaccagctgtaagccggaagctcagaggaaagacactgttaccctccctctcctgactcaaagcttggggcaatttgatacataaactatttctgtcttacactgacctgtatattaatatgtacttyggtacacaaacatttaatctagggagaaaattatttcagaaagtgcttgcttttgggagattttgccaggagagtgcatgactttaataaaggcaaatttctgccaggcacttttggaaatccagtgaagaaccccaagatctacagctccagaaatttttgcagttatagggagagagtgtcacattgttacagtgtggcaagataggagcaaaagccactcagttctgaaagtcatcattgccagatcaacctgttaaattcccatgttgggctttctttttttcctacctagttactacagatggcaggagagtcctggggtacaattagtaccatgtgcctacattaaaagtagatgggaattagagaggaagagtaagggaatttgtactcactaaccaccctgctatatagatatatgtatatcatacatatacacatacatatatctcatattactgaatcttgaatattattcaagattattcaatatattgaatattataatattgaatacatatatgatttcattacctgcaagtcatgcgttaaatatttgttaacatctagcatatgaggaaataagctcagggaggttaggtaatctacacagccacactgctagtgttattttaagttgtatccatctgactccaaaaactttttttcaatactatgagtagacagaagttccaatgtttatattcccttttatatgggatattcaggcatttaagctatcactaattcacctagtcgtatatattaactgcttttggaaaaagagtaatttctggcatagaagcaggtaacaaatgggaatatcagtgagttactactatttttttatttttatttttttgagacagagtcttggcctgtcacccaggctggagtataggtgtgaatatggctcactgcagcctcgaccttctgggctcaagcaatcctcacacatcagcytcctgagtagcttggaccatagatgtgcgccaccgtgtctgactagtttttaggtgttttttttttttggaagagatgggggtctcactatgttgcacatgctgttagtatatttgtatttgtttatttgcttcactattggcaaaccctgttaagatcttttatttttattatttcactgatttttctcttgttgcttattaaacatcagcatttaaccccagactctaatctgttggtagattttacccccagtgagcttatttcataaatcacttgtgcagtgaggattytgaagtaactatttggcaatagggcagaatttctctttggaaatttctgaacttgatactgaatgttgttggcactcccttcagagtctccataaaaagaaaccaaattttttttttttttttttttttgagatggagtctcactctgttgccaggctggagtgcagtggcgtaatcccggctcactgcaacctccgcctcccaagttaaagtgattcttctgcctcagcctcctgagtagctgagattacaggcacgcgccaccacgcctggctaatttttgtatttttagtagagatggggtttcatcatgttgtccaggatggtctcgatctcttgaccttgtgatccacccgccttggcctcccaaagtgctgggattacagatgtgagccaccatgcccggcaaaggaaaccaaatcttaaggtagattctgtgcatttgtggtcgtggtgttgtgattgttaatgagtcactttgagtactctagtagatttgtccaacagtgtctcagtgggcccagctggcacaacatgtagaaattatgaaagagtagcagagatgaattaagtttgcattcactttcacttattttaaagcaatttgtagtcaccaaaccttcagttatttctgccactatgtgtgcatattcaccctaattccaggtatagtgacctgaaagagttaattcttctttcagtggcacctacttttatttcccccagcactgatttttctatctgatgactctatcctggaacagagtttacactcgttgtaaagtgacatagtagtgaatttataaaaattgcacaatggtcagaatagacaaagaaatcatatctatgagcttccactccagtttttcatcctctgatggtcactttataatgactggggctgttttagtttgcaaatttcatattggtcacaggactcttcttctgagaaaaagtttattttctttggtctgatgatacaataatttatttcaattacctctttcctcaatttttctacagactgctgagccagatggaattatggctgagctcttctctgtttctgtatcttgtacacattctgactgaagaagaaatctatttattgtagcttgaatgtcattggcctactgtttccttctgacccaggagtgagccatcacatgggcatctggtctaactcagaacactctgcagggacacagcctggcatattataggttgcctattggcatgctgtctacttgacagaatagcaaagtcagttctgggtacttgcttgttgcctaccaatttttgctctcaatgagaggtcagaataatgtcaatttgcaaatgtttgaggaaacattcctgtcaccaaacccagaggtttagctgaatatgatggcattttacaggtgtctttaaatgtggcttttacagaacttcacctggatcaatgttttgtgcatgtgataatacaactataaatttagcttattaatatgataatatttggagcagtataatctataaccatgacttcaaaaatcaaaggttaaaagtattcttttgcagtgttttaaatctgctaacctgaaaactatacaagggtttttctttcaagaattttaacttgacaaatgcaaaggaatatccaacattgcaaaggtaaagagaaatcttagttccttggcatataagcaccatcagttcctttctggccttccagggtcagaactctgggctccaaggaggtacaactgtgagtgagagagtagctrctgtgctagcaggctatgcatccagaactaaacagacctagcactttctgttgtactggaacccattaggtatgttctaaagttatgtttattttactttcctggtttgtaaattagcattttaaatgactacattcagaggaaagtattccacccagaattctcaaatgtattacctttgtgttttattttattttagtttttttgagacggagttttgctcttgttgcccaggctggagtgcaatggcatgatcttggctcactgcaacctctgcctccagggttcaagcgattctcctgcctcaacctcccgagtagctgagattacaggcatgcgccaccatgcctggctaattttgtatttttgggtttcaccatgttgttcaagctgctctcgaactcctgtctccaccttggcctcccaaagtgctgggattacaggtatgagccactgcgcccagccctcattttgatatactagaagaccaatatgcaacataatgattattttaaatgttatattcccttttgccttaatgcggaacagtctatgtatcccttttctgatgatttgtaacaaattaccacaagtaagttgtttaaaacaccacctatttgttatctcacagtcctgtaccatgtggctgagttgtccgctcaggtattctcaaggctgaaatgaacacagctgggctgtgttgtcctttgcaggctcttaggaagaatctactatcgagctcattcagattgttggcagaatccagttgtttggggactgagatctctgttttcctacttactattggcctggggtcactctcagttcctagagaactgaggactcaggactcttgtcccatggtctgctccatcttcatggctggcactggagaatcttccctcacatggaatccctcttatgcttcagatctctctgatttctgtctctgacctctagacccagatttaaagagctcatgtgattatgtcagtcccatccagatgatctccctttcttaaagccaactgtgctacatagcataatgtaatcatgggaataagatccatcacaatcacagtcttggagactattcagggtgtgcacaccaggatatagggatcttggggccatcttggaattctgcctatcagtttatatcaatgttcataaaatagcactatgcaaaatctgcagtggatatattcttaatacagtcctattaggaaggaaaaggagatattatatgcagtctcatgtcccagagggcaatttgttgatgtcttccacatggatttccatggtacgaagatagcatattatttcattgagtagttgtgtgagtttattaataaaatagggtattttaaacttattttactttaaatcttagaagaggtgattcatccttctgtagctcaaatattctatgtcataaatcacagataataccattacaagataaattaaatcttttttataattttaataggaactgaagtgtattcttattcttcagtaatactacatcacccatatggactacctaattgattttttccacatatggagttttgtgaccattattctaccaaaagactaacctttgaagcaataggacatattagagttcttcaccaatagaaagtaagcatagtcctgggaggtaccatctaagtattaaagaactaaataatcacagttatttcaactgtgattgaaattgtgatagtaatatatgtcttactgtgtcagatatatcagtagtcaacttttcaacttgaatttttccaagtttaatcaagttctggatgaaactcatgtacattttactacttttagttttgtattgttttaaatcaatatcctggaaactcagaagtaaaaaagagaaagaagaaaaatatatgtcatttcatgtaaatttatttaaaacacagacttttggcaaggcacagtggctcaagcctgtaatcccagcactttgggaggccgaggagggtggattgcctgaggtcaggtgttcaagaccagcctggccaacatggtgaaaccccatctctactaaaaattcaaaaattagccaggtacggtggcagatgcctgtaatcccagctactagggaggctggggaagaagaattgcttgaatccgggaggcagaggttgcagggagccaagatcgcgccactgcacaccagcctaaatgacagagtaagaccctatctcataaataaataaataaatataaataaaacacagacttttgtgttaaggggacctaaacatgactgtcagctgaactcagcaatcagacaagtaatttaatctctccaaagttcagatgtctcatttttgcaatttaagtacaataatgttgactttgcattatagttcatttatttaaacacattttaaaaacctcccagatgccagaagcctgctagactctgactatatagctacgcttttatgaatatctgaagatatgcatgtgtctaatgagcaaarcagatataatccctttcatagagtttactgtctgacaaagaaagaattaggatacatgcaacagtatgtaataaagtgcaaaatctagtactgtgtagctacttaaaacatattatatgytttcttcctttccttttccctgcctgatcttactgccataagaaatcttgtaactgtgattctgtcaaatgaatctaagaaggatgttgttgctgatggactagtatagaaaatagcagcatgacaaattaaatgtgtcattggggaagtgagattgtataatgaactgagtttcctggtcagtcctgctggaactgtgcctttcrgcaaaatgagtttgatgatttcattccaaagatcaagttgcagcaattttcatcatgaatgttacccaatcatagaaaaattggcaacatttctcagcagatgttacagtctttctcaaaggaaggttctctcagctgacaagctaacgatagtgctcctgatggcgaggggagagacggtgatgatgactgattgataaaaagtattttagtcatatttccaggtttataaaatgatttgcaaacattttcttttgttccctctaacaccgctagtagataatggaaactcctttgatttggtctgtagataattttatgctktgttatatggaatatccacagcattttgtgaacttgaaaacaaaggaggaagcagcttgcatatgcatatcttgctagcagattggtagaatagagagagcagttagcatgtgaggaccattgaggtaaagtatcccagagttgtaactttttctgggccttgactttggctaattctctgcatgccaaatatcatgtagccatccagaaatctgtctgaatattgagatggtgatcatttctctcctgggtgttatgaagaaatgtgtttattaaatactttgcatcccttaaaggaactatatgaatgataggaataagaattattgacagttttgaatggtctattgatattactatggctttgtttctaccaaatatggtaagtataatgtagaggaaaatacaaaatacaacttttatcccccatttttttcattcaactatacctcaatattcagtgacagggccacctyaatctccgcccatgaaaacgcatctagaggagtgtcacaagtttttcacagtgacatttttgcttactgatacaagacagtgatggtgactgatgatgtcccagtgatttytgagtagcttctaaccagcacataactcccccaacagtctttaagtctttaggtgcccatattttcctctttgttctcccccttcagactgagagtttgtagagagagggcaacagatcttttcaatacacaactaatgcaaaatgtatcaggtttttcttggatttcagctactccctgttaaacaatcagagcttagtgaacagtgattcagtgaggagggaaagcactcaggaaggagcaggaacaagtacaagtttatgaaaaggattagctagcaaaacaaggtcaaactctgcaatagtttgttttcctctccctagtatccctcttcaatcagaaaagagactgttatcagttgctggtgttatgactgggcacatccgccctgggtcaaatatgctgcagtctgcaaagccagcagcagattgcagtcctctgcagtccagccaggccagcagaacttgtgtagccatgtgccctgttatagctgtaatactgaattgggaatgttcccttaatggggcacttgagggcaaaagcagtgaaagcttttcctttctcaaagcagactgttcttcccgtagtgttttaagaacacagacatgtattgggcaaggcaaagccaaaggtggcctttacaagattattaaatctggtcttccagggtatctaatctgtgtgaggaccctgatgaactaattttcttctmaagtgctatatatgtagatatcatcatagagttacacatgaaatggctcattcaatacttttttagatgcctggaaatatttaagggagtaactaatcaattagcagcattcctgggagaacattgtcttgtcattttaacagaaaactctctttgtgattttgcagccacgacagcccaaccctgactggcgttactctgcctccctgagagcaggcatgcacaggtatgtatttccctcctcattcactcagaagtaaccttaacttggtatggctcagataaactgcatctccmtaggccagaagcagctgtcaaaactaaaaagctttaggtactttgccaggaaaatgcaattattttgtccccatgtttattccttgaaagatcgcaaatggtcagtgccagatgcttatcaagtgctggcatataagagtcctctgtaaaatcacagaaacaggctgctatgtattttctcccatcaaaatttctacagggaagtaatttcaacctccttcatccctctctacctatgctttcttttcctcctttaaaaactgtaattaatactcatgctttgagacttgggtacattgtgcaatgtatacatacatgttgtctaccttgttttttttttaatctcacattggctattacatcctattaccctcaataattgattgctattgttgtttgtgttcacacctattagagcctcctcatctttcccatctgttgctatcttattgtcatcaatgacatggttcttcagaagatgagccatgtaaagggctccaaatctagcttactttaaattaacctagagtaacggtattagtctaagactcagattaaatataattttgctttctctactttgtctctctgacagtaattgattaactaccattatttctggaggtgatccagtatccatgccatggggccaaataaaagattcattatttgcgaatgtctttggaaaccaaatgggaaggaccaagaaacaaatgatcacaactatcaaaaggatttaattttaaagaagaaataatcttcaaacttaagcccctcaaaatatctgggcaactatcaagtgaatattcaccaaacttagatcagttcgtaaagagaaagcctacaaagtatgtgtagagttaatgtgaaattagttttagcccattaaaatgcattagattgaaataaattaacatactctcaagcattacaaatgagcagaaatcattacattgggtgctatttctgattcagaagcaatcagtgaagggctgaagattagtagttggcttggtaagatgtcacattggaacctgggtcataattttaggccagaaacattcatgcatataccagaatattaggtatcagaagaaattctttatatttattagagaccaacttgtgcttttgcctgcatctgagctgttggtggagacatgcaatgggtaaaagcatggtttacagtaccaactcttgaaaagtaccaaagctatgagttgtgccttaaaaactacatttgaaataaaacattaaaacataacttcctggactgggcgcggtggctcacacctgtaatcccagcactttgggaggccgaggtgggcagatcatgaggtcaagagatcgagaccatcctggacaacacggtgaaaccctgtctctactaaaaatacaaaaattagctgggcgtgatggcatgtgcctgtagttccagctactagggaggctgaggcaggagaatcgcttgaacccgggaggcggaagttgcagtgagccaagatcgagccactgcactccagcctggcgacagtgcgagactctgtctcagaagaataaataaatgaataaaataacataacttccttatcccattttcaaattgaaaaaaaaaagccaaatgtgctcctatkcgggtttcaattaagatattatgagatttgagtagggtaagaaataaaataaaaattgaaattaaaatgccatttcttttttgcattgtaatacattgaacatattaaatgagttgtgaacctaaataatactaatctttttcgtatgtgtgcttgggtgttctcggtctttccagtcttggacatcatgtaactattctttaaaaaattctgctttgagctgagctggctccaggatagttacaccttcatgaatctgactgagcccacacaatttgctagtaggatccaggaacacttgaaggctgttaatatttggggaaaaaaaacagataattctagagtgtagacaaggggaagaatagtaaaaggtcagagtttaatgagtgaatttctactggatatgttgtttgaagtcaaagagtgagaaaacattgaacttatatgttgccttccctctaatagttcaagtttgcctgctctgttgcctcatataacccctttagtcagtagtctaaattttattttagaaatttaactttcaagataagcaaatgtctagtttaaaagggtcctctagtctaggtgtagtggctcatgcctgtaatcccagcactttgggagggtgaggcaggtggatcacttgaggtcaggagttcaagaccagcctggtcaatatggtgaaaacctgtctctactaaaaatacaaaaatgagccaggcatggtggcgggtgcctgtagtcccagctacttgggaggctgaggcaggagaattgcttgaacctgggaggcagaggttgcagtgagctgagatcgtgccactgtactccagcctgagtgacagagtgaggctttgtctcaaaaataaataaaataaaacaaaatgttcctctaattttgatgagggttttcttggacattttctcttaggatcccacttatttcttccttcctttcttccttcctcccttccatcattcattcattcattcattcattcatccaacaaatatttgagagattaatatgagttagtattagacatacataaatgaatactgcaccatgttctcttttcccttgaacagtttatgttctatctctgcttgcctctaaaggtctcccagtttgtatctcactcccagcaatgttttatgctgaattaatctcttctgagcggggatctgtgagtggtggtgatcaagtttctctagtctcaggaaatatagggtgggtcatctatgcataaaagatatagaaagagtaaaatagaaaataaggttaagaattaattagatagccaaattggaacaatactccaattatcagaaaatattttagtgtgttttcttctttagagtagagaacctaggaacaagagaacctgcaagagaggcttggaacttttgagaacaagccctcctcatctgcttcagtatcgagatgttaaaatggcttagtcctctgatgggcttcctgttagatttagtgagcgccacatggcgttaataaaaaacagaattgccataaagatagaacatgtgtgttcctggaatagtatagcaggcaataagtaagtcagcaatgcttctgcagtttatgcagggtgactgctcagcagtaattgcttcagttcaagcatgagcagaatgtgttagctgcagccctggcttcatagttgtaagcaatttctgagggtggaagaagagatgggaaagaatttatgatctaaccrttatctgggtctgtgtgtttattcagctctgtgcacctagaggaggctggcattctacgggctggtccaggagggcctgatcagcagtggccaacagtatccagtgcaacaccaggtaaagagctggggtctctccattctttcttggtttctggaaagtgatcagatgacctacttttgtaagatcaggaatgttgatggctctttttcttttatatttttgttattcccttttttccatacatacatgatttccttacatatatgattattttgattttatacctaatgctcttcaggagttgaaaaaggataacaaggaaagtgtgtgtgcacgcatgtgtgcatgtgtgtgtgtgtgtatgaagtttttggggtttgtttgtttgtttaaatcaggtacctttcaaatgcttaggtcatccaagccatgcagagaagatctggtggccttatgcacagagatgacactgttaacaaagatcttttggttgaagactatggaaacccacccaaagtagtaaggaaagaaagagaaaaagaaggaaagaaagaaaaaggaaggaaggaaggaagatggtttctcatggaagtggaaaattatcggaaccaaggcattgttttgagttcaagtcaaagtcaatctgcttctctctgcacatcaacaacattctgcagactgacttttagtgccttggcatgcatgttgccaaacatgaccgcctcacaatttcttagtttagagggataatagggactatttcctaatccaaactttcaggaaagagaacctgctaagttgtgtaaaaaacctaatggctgggtgagtataggaaaattgcttaaactcacatttgcttggtatccttattcttgccctatcactaaagcagggtcatgtaatagaaatatggctttggaggcccatcgctgtggcagttttcagaaagggaagattaagtgttggtagagaccacaaattgtgtctactctaatcctctattaatagaacatcatgatgataatagtagttactaattattaagccataatatgcctagacactgtgccaagtacattgtatgtgtggtctcatttattccttaagtcaagcttgcaagggatttattacatctattctacatatgagaaactggagaggcagagagattaagaaatgtacccaagttcacgtagcttgtaagtggcagagggtaggattcaaacccagatgtgtttagtttcaaatccaagtatatctagcacttatattcataacatggctggcttgcaataatccattcaaattcaaatacatatctacatacataacagatgacagaatgtgtgtgtaaaaggttttttcccaaaaataatcagatgcctttcaaattattaagtaacatgcagctaagggcccatttttactggcaactttaagggcattcrttgattctaatcagccaggatttgctatttatggatgttgcacaattcaactaaaagtcacatttgtccaaaaaatatacgagttgaagcaattcattagagagctaatattgccagattgcaaggggaaaaacataaaatagttcattgacaaatctgtaccctcagtgccaacgatggagtgaagaaatgatggaggaggaagtggttttagactgccaagtgttgcaggatgtggaggcatctgggaaggtgagaacttcccaaagaagccacgtgaaatcatgactttctaccttgcctttatttcagagtttttcttgctcttatggaggcattgtaggtcgacctggtaagccacaaactaactttgaatacattctccctcccattggtgatgctggttggtgtgtattcctaggcaaatgtggaataggaaccatgtattgatatttcatacatctggccaagtccctctttcagattcaaaaaatgttgagaacctatcttttttacagagatagagaaggggatctcccttgttccctttcttactgtcccagcccctcttgtataacccattttatccagaactgtgcctggctgctgatgcatgagtcacagtcttcatggactgtgctggatagagcttacatcttccaactactccatggcaacctaatcatacttttcaatacatacctctgcatcagtggtgtaaagttaaagggattctctgccttctccctgtccttctggtacttttaggtttttaggactcaatatatgttctgcactgcttggagggaatatggcataaagattaagattatgatttagagtcagatttgagttgaattctaatcccaagcttacttgctgggtgagcatagacaaactgcctgaattcatattttcttaattaccctttctgtaaattgggtgtagtaataataataacacctattttattgagttnccatgagaactaaaggagaaaaaaagaactgagcatagtgcttgacatatagttaataaatgtctaatcttttttttttgagacagagtctcgctctgtcccccaggctggagtccagtggcacgatatcggctcacagcaacctctgcctcctgggttcaagtgattctcctgcctcagcctcctgagtagctgagactacaggcgtgtgccaccaagcctggctaattttttgtgtttttagtaaagacggggtttcaccgtgttagccaggattgtctcaatctcctgacctcgtaatccgcctgcctcggtctcccaaagtgttgggattacaggcgtgagccaccgcgcctggcctaatcttcttactcttttttctttctggactacttttctgcaatctatgatatagtgttggctgatagcctggtggccagaattcagtagttctcatttgcaggcccagatatagaccctctgaggttatctgggtctatataatccagtcaccccaactgttcccctggaaatggagtgaggaggatttattagttgctgcctgaagaaaagggaaatgctccaaaaaatttggttgtttccagactcaaatagagcctgcctttcattgaytctgttgcccttaaagcttcacggtgaagatgcagttgcttccaaaaggcttctttctggtgcctaagcctccttatacttgcttcagagccctttccgtgaaccagctgtgtattgctcttctcatcccaacacttgcaatggctgaataaaggaagtggggcctgccttacgctaatcctcgttcatatgtgtttcttaaagttatttttccttcactgatgaattccttttttttttttttttttttgagacagtctcgctctgtcgcccaggctggagtgcagtggcacgatctcagctcacaacaagctctgcctcccgggttcatgccactctcctgcctcagcctcctgagtagctgggactacaggcgcccgccaccactcccgtctaattttttgtatttttagtagagccggggtttcactgtgttagccaggatggtctcaatctcctgacctcgtgatccgcccacctcagcctcccaaagtgctgggattacaggcgtgagccactgcgcctggcctcactgatgaattcttttgctttttaaagaaactgttcatttattttcacagtctgcaaaagcctaagataaagatgccacactctgaaaggatcaacaagggcatcaccaagtaatgttttctgcaggataaacaagtcaggcattaaattggttaatcctgattactggcccctttctctagcctcccctctgtgtgagcagacccggaccacaggctttcttatttcctttcagcttcccttgagactgagcagagagagaaaattagctaaatcaggaatgcagggaatacagttgcagcctcttcttcagatggaggaatgcgttttggggggagggacattaaagggccagtcgctcatgttacagctctttttaacttcatgagtactaatgccctgaagaggttttaatgaatgccctcttgtgatcagttcctagggcaatcccaggttataaaaggactgcccctgcctgtgagggaactggcctggcttcagtgggccaggctgctttgttatctgttattggtttttccagctcctctttctacatttcaagggatctcaggccttacctaaggcaacagtacattagttttagagtgggagatgctcacagttttcagaagagttcagaaagtttcaaaacacacagcactgcagaagataacattatagcttctcaagaccccaggggatctgggactaaacagtgaaagattaattaggtagcggaagccactaaggcagtgagtcttagttagagaactttggtttagacaatggttctcaaaggggcagcaacaccaacaatacccggaaacttgttagaaatgcaaattcttaggccctatcctagactaatgaatcagaaattctcaggatggaggctgggtgtggtcgctcatgcctgtaattccagcactttgggaggccaaggcaggcagatcacttgaggtcatgagttcgagaccagcctggtcaacatggcgaaaccccatctctactaaagttacaaaaatgagctgggcgtggtggcaggtgcctgtaatcccagctactcgggaggctgaggcaggagaattgcttgaactcgggaggtggaggttgcagtgagctgagattgcaccactgcactccagcctgggtgacagagtgagactccatctcaaaaaaaaaaaaaataataaataaagaaagaaagacattctcaggaatgggacccggcagtctatgttttaacaagccttctatgtgataccaatgtactgtraagttttaagaactggtctaaggtaaatattcctgaggttgtcttatatcattacagggtcagaatgcatgcaaggaagccatctgtttatggttcttgtgagaagcagggggcctttccccatgcccgagagataattgttaagagctcaagcttgggagtcagtgaccctttctgaattctacctctgccactcagtaattgtatgttcctgggaccattacttaactttcctgattctcagtttctttctctataaaatggggagaatagtggtgtctaccttatagggttcttggaagaattagatgagataatgcacacatattgcagaatctgaagaacaatcagggtttagtaaatagtagctattyttaaatgatttttccaggtatgagtctatcctacagcttcaaaatttagacccaggttgttctgagtattctctgtgggaagaatctgctatagagaagatttttttaaagtgcctgtctctttgtttccttaggggattgcttttgccctgatttgccacatctctttactctgtggaaaatggacagtttatgtgccctagttttatatggggatttatattcttaattgtctcaaggattcttacctgtctgacaaaaccaactccccatggaaagactccatggagactccatctctgatccttccccagaaagaaagcatgattcttaagttttttagaatctgtttaggagcactgtcaacatgaatttttctatttcatgagtgagtgcagcctcgggccttgttggagaatttagaaagcatgctgttccactaacctgttcaacctcaacttctgccgttgtcatagcaatgacagtcctgggaggtgtgtgcatatccttattaggaaaaaaaaatgagatcagggatctatgtgagtggggcagctcccgcctgtgagtatccttcgctgtcacctgccatctgacagcccaggagtgccagcttggcttggctttctctacccgaggaaagtaagtccttttaagatgcacttttactttctggggttgtgaaactcattgtgtttgccagagttctcttcgcagcttatgtaaagaatttgtttgttttggattgacctgaagggaggaagcaagggtgtgggaaggggaattagcatcccctacctaggagaagccatgaagcttacttaagtctctgctggctccatccattcatgactttcttcatcttcttcttgggaaaacactctgtaccttccacttttaatggtcatgtaaataaaagactagaatggagatgtcctggttttctgaaattaaacatttttgtttatgaatagactctaagataattctttccctagacgctctgtattttcttggacctctcatttgccccatagtaattattctaggattggtggcctgggcagaatacagtcatggttaagaccatgatacataatagaagaatttcttccgtaacagtagccccaaacagagatcacgtgtctcctgaaacctatccagtctcatgtgcactcagatgtacgatcctggatataacattttagagggtgtagtgaggagaatagaacaacactgttctcttaggctgcagtttccttcaagccccacgatggagagaagcaggctaatgcagggtaaggaaatagagacttattatagtttcttcagttatcattgattcctttaatatgccagctacattgaggcaatacagtctggcctctgaaaaccttgtcaggagaaacaacttttgaatatatcttagaaaaataagacactttatcccttcttttgtttaagagtgttgcataaaacaggagagtttctgaattaccctcccttctagctttctttatacaccattctttgtagctgaagttttaagccccttgtcaaaagggagattcaagtttctgctgrggacatctcagtgtcacaaagggccaaggaagtagggtctcaccaactttgccacctgactcagctcaaaggtgataggtcacctgtgtgactgagagctttgtgggaaagatgatatggagggtggagagtctgcacttcactctgtgggaaaaattgctgaggttgtttagaattgttaggcttggaactcctcctgggaggtgcttgaacaagaaagacctgcttataacctgagttgagggcagaggaggaagatagtttgtaattcctttacgttttgtggctccggcaagccctgtcctcagcctcactgacacaagtaaactaaaaatgaaagtctgtcctagtgacagcaagggtctttcatggcaatattttaaaagaaactctgcccagatttcaaaggaacgtgaaaattttatcttcagaggcagtcagctttgcagttgaaaaggycattgcctaatctggagaaacatattcagttcaagcactggctagagactagaggcccccaggaaagggccrtaagattggtcactgccaggaagcctgtcaatgagtgtgtggactggagaggaatctttctctgcctcagcacttggagtctccgttattcacaatcagaaaaagagggagagcagagatagatgacattccacgtttttctcggtgagaccaagagcttcctcagcaacagccctgcctgaaattgtctatctccaagggcgtgggctaggcaaaggatgggagaagtcagtcctgaagatggtaatacttaaaggaaataagggggacaaaggatgyttgtgctactattgaaacaggaaattgagagctctgtagaagtcagactcaagaggcataataatagaaagttagggtatgaaaaggtgacttttaagaaccaaatgtggacccgaaagagaacaaagagaagtttattgtaactagcgttgtattccttgtctgctggataccaaacaatgtaccccgggtcttgagattatcgatgccattgtctgtaaaaaaccaaccaaacaaactttaaaaataagtaaagcctgccctgtacagaaaatctaataaagcaaatttgttggtgatgttccaagaaggttcaccagcttgggctttcaaccagcattracccaatcttgtgtccagagctgttgctgtaggtggtatcatgtatcaagctgaatagtgaggtgacattccccaagtcttctctcttgtcttttttgactgtgcatcatagatactgtattacccaagaacacacacctgttcgatctcttttcctataatcacctggagtcagatgaataccgtaaaggtctgtggtaagactagaagcctcagccagtatgaatgatttacattagatgcacaccaagctgctttcggagagtccagatttatggggataagagcatcactaggtatatcaacagccctagggtggatacctttragcctgtaaatttggctctgtgttggacgatgaaccatggaatacagaagaagctcccttctctcagctaaagcctattagcaaaaatagagccctgaggacattgtattttaagtgtatgttccagtgagtgggtcgttgctgggtcaagttttataagtctttaaatcccatactgttgcctcctggactgtagaaatagtctcttagaacaagagaaaggaagacratagctaccatttattgagaactgtgataagcactttacatatgttgcatacttaactttgagagaagtacattattattcccatgtttcagataaaaaaattaaagctcataagaattaagtggctttcttacattcacacagctagtaaaaatgttttttgctcaccattgtattcccattgtcaagcaggatgcctrgcacacaatgatgctcaataaattttgttaaattcattaataaatgcagtggtaaaggcagtatttgaactcatgtctgcttgctgctgaactctatacacttaacacattactattatcttgtcccgcatgatacatgaagggaatagcttggtaacttggaaaagactatttactgtctgagttctaggccaactgtagggtgtctgtatttatttcccattatgctataacaaattaaccataaacttcatggcttaaaacaacacaatgtattatcttacagttctggaagtcagaagtccacagtgagtttcactggctaaaatcaaggtgtgttcttgccactatataacaaggatccactttcctttagtttccaataacaggctccttatttctacctgagccctcactggcagcacctttaatgccatatttgtaataacaatctgttcatgacaatttaggtttgctcctcacttttttctgagtcctctctagtagagccattaatatgcatattgctactagcagcctgttcaaggtaatgtaggctctttctatcatgctcttcaaaattcttctagactctgcccatttcccaatctcaaggccacttccgcatttttaggcatttataacggcagaaccgcacttccagataccaaaatctgtattagtttcctagggctgccataacaaattaacacaaaatcccttttgccatgtaacataacatattcacaagttctaaaattagaatgcagtcattttggtggggccattattctgcctaccacccggtctttcatgttcaggcagaggtggctctgtgtgtgtgtgtgtgtgtgtgtgtgtgtgtgtgtgtaagttaatttcagtagagaatgagctagagtagagaaagagaattaaggtgagatgtgtcatggaagaacagtgactgatgatgctaactttgctcaatcaagaagtgtgatccatttaaatcatgctttcagtgatctatccaatcagataaactactctcccttcctgggaagagtaaggaaggaagtagagctaaagatgaaagttcttttcgtagcacatccctgcaaaggatgggagtattgttttggtgggcattcccttttctaagagcaaagatggaaatgtggagagaggagaaaaatggttcccattacattattgtgttctggacttagagatattgttctgccccaggtytaagaatattgttccaagagttgggagcaggcagcagaggacagtactctttagatcacccagaggccaatctgtaaggattcaatcctggggcatggtagctaatggaaaagtcactgtcacaagtgatgccaggagatggggcaacacatattgcctgccttgtatgcatctagcgtctgtgtctaagtgaaagcagattatatccagaacttccctgraaaatagaagaaagagcctgattggtgtgtatgtgtgtgttaggggttgaggggtgggtaatgttcctgccagtattcgtaaatcccacctgcttttcctgtgatgcttcctgtgttggggataggagggtgggatggttcagggtcaattttatggatccatatgtatctaaggatgtgtttgttttttgggaacattttgtataacaaccagtttcactctagctccctccttgatattctaaacaagctggatatctccaaagcttaggccctctccatacttacagcagctctgactggagattaaatcaccccttatactgctgacaatgattaggccatgggacccatgaaagagcctccccagagtccagcatcccctgtgggctccgtgtgtcatcaagatgtcaatccaactgctgttcctgcagtctgcaatcagcagggctatgtttattcagcggtcagtgtcacatcaatttccttctgttgcaacaagtataaatggattctaaatatttgcctttgggaaatttctttagagggaaactcactaaagctaatttttttagctttttggtatgttctctctgaatctggggatttagatatataaattagcttctttggtcttttcttgcccagggtcacaaccttgcctccaggataataccttctaagtgtttgtgatttgaagggcactacgaagatcctcacaaaaactacctcccagccgggtccctgaaactccatcattaaccaccttcatcagcatttctcttttaaaatccttattcattcctgttctccttctttctttctcacacacacacacacacacacacacacacacacacacacacacacacggggagagagagacagagagagagagagatagagaagtgaagtatatagtatcctttctagggatgcttttcttggcttggctccaatagagaattttgttgggaccctctatatatagtcgtgtaccaaataatgacactttggttaacaatggaccacatatgtgacagctgtcccataagattgtaataccatatttttactgtaccttttctatgtttagatacacaaatacttgccattatattacaattgcgcagtattttgtacagtaacatgctgtgcaggtttgtagcctaggagcaataggctataccatatagcctaggtatgtagtaggctatgccatctaggtttgtgtaagtacgctctatgatgtccatacaacaaaaatgcctagtgatgcatttctcagaacatatccccattgttaagtgatacatgactgtagtcatcatcaaacatttattaagcacttaggtcaggccaggctctgttctaggtgatgcagatataatattaaatataacacagtcctgcccttataaatctaatggtgaagggagaaatgtaaakaaatatgatggaaatattacattgtcatgtgataagggcgacaataatgccctacgtaggtagggtcaacgaaggggaaggaagctgggacaaaccaccagggcctgttggtccagaatgggacccagggtctgtctatgttataatcaattcaaaccctaggtaaataaggtaagctaggctgcctttcttgagacagtccccagattgttttcayagggcccaaacactctcagcaaccatgaacagtggatgttgtgggacctcagaagatggaattggaaattcaggggactaagtcagagattatttgacatttaatactggatattgaggccgggcgcagtggctcacacctgtgatcccagcactttgggaggctgaggcgggtggattgcctgaacccaggagtttgagaacagcctgggcaacatggcaaaaccccatctctacaaaaaaaatataaaaattagccgggtgtggtggcatgcacttgtagtctcagctacttgggaggctgaggcacgagagtcacttgaacctggaaggtggaggttgcagtgagctgagatcacactactgcactccagcctgggtgacagaatgagaccctgtctcaaaaaaaaatttaaaatactgggtattgcaggatggcaagtaggatgtggagaggaagagaattccaggcaaaggaaacaatgcgtgcatgcaaaaacaaaatacaaaaaactgaattgtgtagtctgggttaataagatgagtgcatttgatggatgtggtagaataaagagatgttaggaaatgagatcagaaatgtagactggaatcagattttgtaggaccttaaacatcctgctaaataatttgtagtttcatttgttggccatggagacccactagaaggttagttggtttgtttatatttaggaaagaagattcttttaagtttccttaactctactgaattttcaaaaatcaacctacagcaatccaaacttatctgtggagatacattccaagaccctcagtggatgcctgaaacctcatttagtactgacctttatatacattatgttctttcataggtgcacctatgataaagtttaatttataaattaggcacaatactcttgtgctttggggccagtattaagtaaaataagggtacttgaatacaagccctttgataccaaaacagccagtcggataccaagacactttctaagtgaactaacaggtgagtagtgtagacggcatggataggtcggacagagggatgattcacgtactgggcaggataaagcgggatggctcgagatttcatcacattactcagaacagcttgcaatttaaaacttatgaattgtttatttttgaaatttttcatttaatattttcagactaaggttgactgtgggtaactgaagcctcagaaatcaaacctcaaataaggggcgatcactgtactgaataatatgtcaagatgagctatgagcttttaacttagtgtttttcttctcccaaaccaaatattggaaactttggagtgtttagaaaaggagaatcgaaaagggaagtaaatgcagcattttttttaattgttaaataaagggctgggcttggaaatgttcttaggtaatcctggtggatttggtatatcatgtytgagaaaatgtggagagtgaagggcaggtttaaaatttgtctcatgttagtttctgaagggagatagcctggcattgcacagtgcctcacatttctatcgtatcacttaataattgtgcaacctgtgcttcagatttatcaatgtataaaagaggagagaccataggctgttgtaagtattaaatgacataatgcacgcaaaatgcttagaaccatgcttagttcatggtagccactcaaaaatgtcgtcagaactattactactcagtttaatgctcctagcacttaacacagtgcttggcacacagtaaagaggattcaagatgtttttgctagattacatggaatggtatggaagtgtgcagggtggtgtagagggttctcccattatcttgccttccttatactgcaatgtgctgacagcacctccattttataccctcaatgcaaggatatcactacttgtctagaaatggttgctcaaggctgagaagtgacagcaacacagagcctgggattgctgccaaatttcaagaagcacagattgtaacaaagtaaggggggagggtagagaagaaaagtttgaaaacccaaccaaagtcagaagccattttgttgtcggctgaaataatgcctcatagagtttcaggtggggcaggcagtgtgaaaactttgggaatagtcagtgtcaagttgtggtgctaagggaggaacccagtagtgctcaggcctgggcaagtctggcttcttggggcccagcatttagaaaggccctgtgtgttttgatattatgctgtcactatcttgaagttcttgataatttgttaacaagggccgcctccccccattttcatttggcaaatttcactggttcctgcaaattatgtagttaatcctgggtgcaggctagtttttgaaccatgttgggctagtattcttctgaacctctatctctttgatttaattacagaagaaacaaaagtcataacaaattatatctgtgcaggactaaaataaaatgagtagtgcctcactccctacatccaatcatgctttccaaaagtaaccactaccaataatttagcgtgcatcttcagaattctttatatgcctacattttaatgtatttttaaataaaatagaattacattgttgaagtaaatattwaaaaatatagcatttttgcatagaaatatttatttccctcaatcccactcccctttggtgaagcaaccactgttaacaattttgtgtgtatcctccaatatttttttgaaattaatgaactttactttttagagcagttttaggttcacaggaaagttgagtagaaagtgcagagttctcatgcactcctgctctcccacatacacaatgcccccacacccccgccacagtgacatcctgcccagagtggtacattcatgacaattgatgaaactatattgacatcattattgaaactatcattaccacccaacttccatgtttactttagggttcactcttccaaatatttcttgcatcacttaacaatggggatacactgagaaatgtgtctttaggcagttttttcgttgtacaaatatcatagaatgtacttacataaacctagatgatatagcatactacacacttaggctctatcgtatggcctatttctcctaggctacaaacctgtatatcatgttactatactgaatactgtaggcaatttttacacaatgataagtatttgtgtatctcaacatacctaaacgcagaaaaagtacaataaaaatacattattataatcttacaggacaactgtcatatgtgtggtccgttgttgactgaaacatgattatggggcgcatgactatatagagattttcaaaaagcaaaatgggataatgcaatatgtattattatacagcttgtgtgtgtgtgtgtgtgtgtgtgtgtatgttaacaaacacctttctacgtcagtacatatagatttgccacaatcttcttgagtaaggatatagcactatgttgtatacctatattataatttatccaatttgctgttggtatctatgttttctaaacaatacaatatacattcttatacatatttcttatgcatgcttgctagtatttatacaggataaatttcmagaagtagaattacagaatcataggatataaaaatatcaaattggcaaattggcattcacgtacctgtggttggactgcacttgttacatacttccctctgagccttccatccccacctcgagctagtgctatatgtcacttaactcagtgacatcatcatcaacagacttagcctctgcagttgaaaatgctagagcaaacagaggagaaaatttacttgtgaatcataatagctaacctgtactgaacagttaagccatgtgccaagtattattctaagcactttacaagtattaactcctttaatctgtataaccacacccagaaatttgtgcattattatactcattttactgctaagaaaactgacacccataggattaaatcagatcacacatttagtaagggcaccaggatctgaagcaggattgtttgacttctgagtctgtgctcttaaccactgcacacaccgtctctagaaagtttaatgccatctttatgccaaagtttatctacctggtttatcctttaacactattattgtatttattcatttacttgtcttttcctcccactgtgctgtaactctttgagaacagggtacttgtcctaatattattcatatttatatccctaattcctaatttaatgtctaatttattgtaaataagttttttttttttgagacagagttttgctcttgttgcccaggctggagtgcaatggcacaatctcagctcactgcaacctctgcctcctgggttcaagtgattctcctgcctcagcctcccaagtagctgggattacaagcttgcaccaccacgctaggctaattttgtatttttagaagagacacagtttcactatgttggtcaggctggtctggaacccctgacctcaggtgatctgcctgccttggcctcccaaagtgctggattactggtgtgagccacatgcctggccttgtaaataataagtttagttgaataaataacaatgcctccgggaggtagctattatatccattttacagatgaagaaactgtaagtcaatgttaatcaaatagtatcctagaaaatagtagaaagcagaatgctggagctgagatttgaacccaagacttttgatacttcgtccagtgtgctttccaccatgcctaagtagtctccttcacttcctccttcagagggctatggagagtaacctagcaaccatttctaagctggaaaatgtcacagccggaagtcttcagtcccctagaaggaaaagagcctgatggggagagggtccttggaaaagagaatttctggaagtactacatttgagaataggtggttaaagtgggagttggattagtaaaggaatactgcatagtagtaatacccattctttatttcagaatttcttcatgacagacattgatctgtgtgatttataagccttgtctctttttaatgttcacaatcccattagatggttattgttatctttgttttgcatatgaaagaatgggagctaagaggccaagtaccttgcctcttattcgttcaacgaataagtggtgaagcagattccaactcaagtctatgttacccaagaacctacattttaagcattttgttaccccctggatatgacagccaatgaagagggggtattttgagaagagactataaagggaaattgccttccctacatcctgggggaccttatcaaccaggaaacaaggtagagaaaactgtgcagcctgagccctgctgggttgcggggggctcacagaaagaagaaatgtgatttttttttagctaactacggagaccagccattccaatgtttgaatctgggttcgcagcacatgatgtctttatactcttaacctagaaatggcagagttattttgggcacaaagcaagagctgtggctttaaaaatatgccaagtgtatttatctcttccgctccaagattactgaaaattagcccagctgtagcttgggacaccaaacagccaaaaaatcttcttccagctcaactcattccacccaaagagggtgaaatacccaggagtagcagctctagcggcctctgggtagtggtattagattggcctccccattgctaagcctgacatccaatcacacacacaccactctcccagctgctctgtagatcacaatgctaggcctgtgaatggagctcaactccgtctcttccctcatccccaaggcttcacaagaagtaaacaaaacaaacaaaaactatttgattattgagccaaggagtcaatgtgagaatagtttttcaccttcattatcaaawgcctgtgtggagctgaatgtggtggctgacacctgtgatcctagcactttggggaggcagaggtgggaatattgcttgaggccaggagttcaagaccagcttgggcaacacagcaaggccctatctctctctctgtctctctctgtctctctctctctctctctctctctctctctmtmtatatatatatatatatatatattttttttttttttttttttttttgagacagagttttgctcttgttgcccaagctggagtgcaatggtaagatctcggctcactgcaacctccttctccagggttcaagtgattctcmtgcctcaaactcccgagtagctgggattacaggtgcctgccaccatgcccagctaatttttgtatttttagtagagacagggtttcaccatgttgggcaggctggtctcgaactcctgacctcaggtgatccacctgcctctgcctcccaaagtgctgggattacaggcatgagccactgtgcctggcccctatctctgtatattaaaaaaaaaaaatcttagccaggcatagtggcgcacacctgtattcctagctactcagaaggctgaggtgggaggatcacttgagtccaggagatccagtctggcagtcagccatgacctcaccattgtactccaacctgggcaacagatatagacgctgtctctaaaaaaaaaaatcctgtgtgatttaggacaaattatcttgctgtaatttaagccttcatattccttttttataaaataaatatgctttaaatatgtatttagatatacacttataataatagctttaattaattgtaattaaatcatttaaaattaaatacatgcaaaataccccataaactgtctaatccataataagcaatcaatagtccttaaacaaatgaatcttctgttgctctgatcttaataagtaaaatttaacgagtttttactttgcaccatgcacttatgctatgtgctgtataaggatagttacatttaatctataaatcaaccctatggggcgggcactcttakgaactttttttacggatgaaaactgaggcccagagatatgaaataattwgccaaacatcaccataatttacatgatgtagccaggtttaagcctactattctgattacagagcctaagatcctacagagaacagggagtatatttttacattcccttgtttccatggaaaagtctttccactgtcaattgaaggactaagcagcagcggggaagtgctggaaatgctagcccaggtgggcttagctttctccctctctctctgatcctggacaggatttgggtttcagaccacgattctcctgtgttttgtgggctgtgattactcagattaggtttgcccaattcataaaggactggcgggggttgggggtgaaggtgtgggagaaggcggagcttgtccagtcggtccaacaaaccccacagatggcgaaatagggggcggggaaggagcttgagatattttacaacctgggctgtttcagtggttgatggcggatggtttttgccttttggtcagcctgagtatatactatcattctacaatcggccaaattctgacagagagggagacagagagagaggttgattaaattgatgcccaaaaccaagaaggagcaaagaaatcggggctgtttgaaaaagactgcagtggctgacttgggtggtgagcggaaataaggaggagggagaggcggggtgtctctgcgcggaaagcctggaagttcacttgcaaacacagaatctgcacagccttcggtgccctgactctttcctgggcatccagaggcagcagcagccgccagcgccaaagaacgagcagtccaggggctgggccggaaacggctataatcatttaatagcctttgccggctgcactgacttagcagagtgggcggtaggcaggctccagagtgctgtctggcaagatagtccccggctttaatcaaaatgatgggttttctggaagctctttattaacctcagcactgaaatcccagagctggtaacaaagggatgaatggggagcaaaggggcggggccgaaacctggaggccgggctgcatccgcaccccttcccccacctccactcctttcaactcattctggcttagggctcctgctggcatctctgtgcctcccaaatagtagtaacaaaacaggcaataaccataataattggcacatttgtataacgctttagcattttcaaaggatgaccttgttatacagctcaggatctgagtctcctagctggagtcagactccctagatttgagtcccaggatccaccagttagtgaccatgtgaccattagtccttagtcccctcatctataaaacagacacataacacagacagagatactagaaatgtctacttcatagggctcttgtcaggaccaaaacctatacgacgtgcagatttgtttaactctgttgcacacacataggaagggcacagtaaatgttaactacatcgacaaccctgtgatgtagacaggaaggggatcatctccattttatggatgaggaaactgaggctcagagatatttatgtaaatggcccaggactatgcactagtgagagaaccagggcaagtcctcaagaacagaaagagaacaaagcaagatgaagagaagatcagaaaagtgaacaccctccaacaccctccagcacatgcccctctgagagctttcctgaaaatagtatccttggtcaaaatgagtttatgttctattagggaaagtcagtgtaaatcagaaaagccctcctggccttaacagaacagttccaaatgcagatgagggtgagtttaacaggcctggcatttgcttcacaatcttctggccctttcctggcatttgccttggcaaagactctgacctgatcaatcctagtccctgaggctcaactccatcaactcaggcagccagggttagtttagcatgaaagaggaaagctggaaattttgccaaaaagattcctgggcagtgcctaagggaagtgcccaaattggattataggattacatgaagtggccagctacttccagagggcagggttttttgtttgtttgctctgtcacccaggctggagtgcagtggtgcaatctcagctcactgaaacctccgcctcccgggttcgagtgattcttatgcctcagcctcccaagtagatgaaattacaggcgtgcaccaccacagtctcgctaatttttatagttttagtagagatggggtttcaccatgttccctaggctggtcttgaactcctggcttcaagtgatccacctgcctcagactcccaaagtgctgggattttagatgtgagccaccattcccggccccagagggcagtttttaaagtagaagtgaagatctgtatgcatttattaaaatatatgttgttctgattttaaaatatatccctaccaattgtgaagatatcggctaatccaataaaaaagcaaaaccatattttgtakaattatggtcgtattctgttaaataaacttttaaatcctattgggttgtaatctgtagtctgggaagggctctgcctaacgattcagacccctaccagatttatatgtgtctgaaatcctccttctagcctcttaacaggcccattcatttgggtcttgactgcatcctcagtcttgtctttgcctgagggtgagctaggaccctgggagcataagggaggggacttgccggagatcctagaagggaaaggaggcagcactgaaagaagaaacatttccttgattgatcatttgctgatactggcccctggttggggttaggggtagaaatgtgcttcttccgttttcatcttcttcaaaagggagtatctccatgattctgccccaaaggcatgacattttataggcaaagccagccaagtgtcttgagtgctcttaaccaaaaggaattcagattaggaggtcagtcagtgtttgtcagatccttaagcttttgttttactggaatgagtcacagtctacatgctgctgagctctcagagatgtttgttttatacaacaaccagaacaggtgaggcacagtggtctgtgagggactggagagaccacaccttgttctgctctgcggaagctggacatgtggaggaggcacctgactagatctctgcctcctggagtttaggctgagtcatatagaaccaggaagctcagtgacatgttaaagtggattaactcttggcagtcctgctgtgaggggctccctctgccaatacacacagccattaatgtcctttaactgtgcaagatgaacatatctctgtgttctgcatctccagatgacagtgcttaggcctcatgcagagtcctggttatggttgaagaaaaatttccattttgggctctgagggcaactaaaggactgtggagtggtgctgaaacccagttttaggtgccgaatcagaggtttttaaatacatttctctcttttgtctcagtctcttagagacaggacctgtattttaaaggtaaacaggcagattctggctgagctcaattgcagatttgattaacttagatagatcaaagtcattagtctcagagaaaaaatttgtttctcatccctaaagtgctattgtgtcagctctgccagggtgtaaggaaaagggtttggaagagagaagaaaatttcttaccctctctcgtcactgcctgctgtaaatttgcagtatcattatcttggtctcctaagccctgagagctgcattatatataattgcccatatgtgataccatttactgaattcttgcattgtgctaaggatcaagcttagtactttacatgcattacatcattgtctttagggaccccaaaagtgcctcattggagagttgtttggtctgctaaagagtgggtaccactttcacttctcacatcagtcctttcattcattcatccagcaagtatttactaaacacctgttatgggccaggaattgtgctaggcactggtgatacattggtgaataaacagatacattttttgcctttgtgaatcttacagtggtagagaataataggccaagggggtgctgcttggctaggaatgtcatagaatgcctktccaaggaggttacatttaatacagacttgaagagtgaggagtcatgctaagaatggatgagaggctcacgcctgtaatcccagcactttgggaggccgagacgggcggatcatgaggtcaggagatcgagaccatcctggctaacacggtgaaaccccgtctctactaaaaatacaaaaattagccgggcatggtggcgcgtgcctgtagtcccagctacacaggaggctgaggcaggagaatggcgtgaacccgggaggcggagcttgcagtgagtcgagatcgcgccactgcactccagcctgggcgacagagcgaaactccgtctcaaaaaaaaaaaaaaaaaaaaaaaaaaaaaagaatggatgagaaatcattcaagacaaaagcaaaccagatgtgtaaagatcctgaggcaaaaacaactccaaggagccaggtatggtggcctgtagtcccagccacttgggaggctgagacaggagggtcgattgagtccaggagtttgaggttacatcaagcaatgattgcaccactgcacttcagcctggttgacagagtgagaacctatctctaacaaacaacaataaaaaaacaattccaaagagtgtttgaggatctgaaagaaggcctgtatggttggagtataatagtaagagggagatttgtagatgagagtggagaagaaataaaaatcagattattgaagggacttatgtatcatggtaaggagttttttttttttttctcaaggcagtagaaagcttaagcagaggagtgatataatctgatttatatttttaaaagagtttgctatatgtatgttatgcctcatttttttttwaattttttatttttagatggagtcttgctctgttgcccaggctggactgcagtggcacgatctcagctcactgcaagctccacttcccgggttcatgccattctcctgcctcagcctcctgagtagctgggactataggcgcccaccaccacgcccggctaagttttttctattttttagtagagacgcggtttcactgtgttagccaggatggtctcaatctcctgacctcgagatctgcctgtctcggcctcccaaagtgctgggattacatgtgtgagccaccgcgcctggctgttatacatcagtttttaaagagagacattaagaaataaagatgactctggctactgtgtggagggttggagagaagcaaaagtggaagcagactgaataaggagactattgctgcaattcatataagagatgatggtgtcctgaaagagtggtggcagtgaaaattgggagaagaggacagagtcaagatatatttaggaggcagaaatgacaggtcttgatgatgtattataaatggagaatgaagaatagaatagagaaaaatgaataattagctttgaactttctggcttgagaaatggggtaaatggggtgtaatttactgaaactggaaagatttagaaaggaatagattcgaggaatcaagagtttgatttcagatttcttcagtttgggatgcccatgagatttccaactggggataccagataggcagttatacatgagattggagcacagagagatgtgggcttaaaatataagtctgcatctcatcagcttattcatatggtatttatatctatggatatggctgagatcccaaaaggagagagtgaagagaaaatagagaagagagtctagggccaaacccaaggaagcttcaacacacagatgaggagactgacaaaggaaactgtcaaagaacagtcagagagaaaggtcaggagaatgttttgatggtgggggccagaatatgctgtcccaaaataagaaggattgttgagctgaaggcaagttaaaagaagcagatacaggctgggtgcagtgggctcatgcctgtaatcttagcattttgggaggctaaagtggrcagattgcctgagctcaggagttcgagaccagcctgggcaacatgatggaacmccatctctactaaaatacaaaaaaaaaaaaaaaaaaaawaattagccaggcatggtggcatgtgcctgtagtcccagctactcaggaggctgaggcacgagaattacttggacctaggaggcagagactgcagtgagctgatatctcgccactgcactccagcttgggcaacagagcaaggctctatctcaaatttaaaaaataataatcatgataataataaaagaagcagatataggagaggtcttctgccctccctgtatttgcctaaaaaaccataaatttacaaagacaaaagttatcctacttccacctccctcctctgcctcccaccaccagggagaacaaaggttaaccactgaagataactttggactcttattggcctggaaatggtactgctttacaaattagcctttatctgccattcatttgccttcccccaagtagctacccattagagactcaaagtccttaaaggtcttttcctttgtcttacacttctttaaaaatttattgttctttgttgaagatgctatataagctggaattctaagccacctttttgagaactgctcattctctgggtgtctgtcatgtatatatgaaatgtacatgttaataaacttctgtttccttttttttcttgttaatctgccttttgtaacaggggtccagtccatctaagaacttattggggttattctacatgacaaagaactcatgagaataagtgtttcaagaaggggatgacaaatgctgctgagaggtttgataagatgaggactaaaatgtgaccattgattgtggaagtaatataatgaacttgacatgagttatgttagaaaattactgctcagggacaccaaattagaggagactgagaagtaataggaaattgaaatagcagttgtacccaaccctaaactgtaattgaacataaacagtttatttgatggagcttttcacgtgtcaaccaaaggagcagtgttagatacataaacattgctatgatgtcagagttccaatgtcatggccactgggatcactttgcccagacagaccattacccttcctctccagctctgacttctactcttctagaagtcactggtatactttatggtgtgtcttccaatcagactcttgggaatgtcttttattgaaaactcctgtggatgcataatcattttcccaagactcagggcagatttcacctcctctggaaccccattaactttctcaagtataattaacaatttcttcttctggagtcccacaatactttacatatactttagttattgcatgtattaagttrgtttctagttgcttgagtgtatgtccaactagactgtgagcacactgaggsaaggaatttggcttggaaagtaaaattggctcccagtgttttatctaaacaaataggctcaatttacaacaggattccatcctcttacgctgtgtattcccatctcttccatgctgcatcccaccacccttcaatgttattacaataaaattaagatcaaataatttattcarctaatttttcttgttttggacaaaatagacatcctaatacatttatagccaaagtttaatctagacactaaaaggagcatattttgcctttaggctctgtatttcccatcccgttcccagtcaagataatcacaactgtattctttaggaaattcttcacaaagaaccaaacatatgttactatgaaactagattcttggtatcctggtgaaaaaacctgccctcttgcttgtctgtaaatactggccttggctgggtgtggtagctcatgtctatgattccaacactttgggaggccaaggtgggaggatctcttgagcttcagtgtttgagaccagcctgggcaacatagtgagatcccatttctataaaattttttttaaaaagctagcctggcatgggagcttgtgcctgtagttccagctacttgggaggctaagatgggaggattgattgagcacaggaggtcgaggctgcagtgactgcatttcagcctgggtgacagagggaaatcctgtctcaaaaaaattaaacaaataaataaataagtaaacacttgccttgccctcagacttgaacaaacaactcgtgatttttctggggaggttcagcctgcctatgcagtactcctgtactctaccagcagtgtggcatcaagagcatgtgttgaccctgttaatgatttgtaatgttttgtctttcagaaccagaggcaggagaagtgtcccctccagtcggtgcgggtgtcaacagcaacagctggacctttaaatacggaccaggcaaccccaaacaatccggtcccggtgagttgcccgmcaaattcattatcccaggatctcctgcaatcatctccatccggcaggagcctactaacagccaaattgacaaaagtgacttcataaccttcggcaaaaaggaggagaccaagaaaaagaagaaaaagaagaagggtaacaagacccaggagaaaaaagagaaagggaacagcacgactgacaacagtgaccagtgaggtcctcaaatggraacaagccacttagccagtttttgtaataatggcaaatctctcccatgtagcaattccctgctcctttttcctatctacatgagccctcttagagacctcagaaatctgcagaaagttccctgtgtctgtctagaacgcatttaacaggttttgtcgtaaaagctttactaagtctggtgttaactctttctctccactctggcttgttttcagaacctaaaaagcagacccaagtttcctttctcctccgccgcaaaggagaggcttcccagccccgccagtgagaggttggactctctgccctgtgctccggggatcctgtcttgatgacacttgcagggcaggctgaaaagttttgagattgagcagcttgggagtttgtggccactgggtatgtgtggctaccgcgggtatgcgagtgccagatattggctgagacgagccagcttagactaattggtacaaggaaggcaagaaaacaaagacaaataaacagcggaagttatcagtatggaggggaagtgtaaacttaaagggaccagactttctaaatcttacaactcaagaggtggcagccaccctctaggagacaaaactacccccactgacaaggctttaggagaccctaaagtctgttggctgtgacgtcattatacctaaaatctgcatcatacctgcaagccaacagttcagtgttttaacagagaaccaccctgggaaacagaagcagatctgatgtgtttcctatacatgtcctgtgctcactttattaaaaattcttttgcacacaatgtttatgaaaaggccagatccttttccaatacttatgcaaaagcaaaagaaaaccccgacacctcacctttcgctgtttgttgtttcatagatttatttaaaaaaagagaaagtctatagctataaatctttaaagagaaatatgaatacaattcccctaaactctcctcaaaagagaattcagtctacagccatttaaatgatcattgctgctacagaagtgctttaagagaattgcctgaaacatctgtattatatcggccacctgccaatcacagctttactctttcaggtcactctggggctgcctcttgcatgtattactaaataaaatgatctctctttctctctctctctctcttttctaagaaacaattatgtgcactttgatacacaaccttctctaaccaactatatatcaagacccaaaaattgaagaaaaatattgttttctcatacagtgagcagatttttcaatctactaattctgtgacttgtcttggtgtgctagcctacaccttctctttggtttagttttccttttctataacactctgaattgctaatcttactaacacctatgatgttacctkaaatcaatctcccatatgtatgctgtatgctatgctaagactcctgaaatatacttactctgtgcttgtgtatgtgaatgttaatgcaactattacctagagtgaactttaagctttattgttgaatgtaattccattatatttccttttgtacacctgtgaaaaagtggagtagtgtttttttaaccattgttaatcagcttttgtgtatgaaagacacagtaaaatttctttcttaaatcaagatactggtgattcaaggaattttatttatggtccagccaagagccatctcgtgccaagacttctgctggcaagggaatggataaagctgttttgttctagtaacaattttggaatgaatactgacaatattccatgagggtgtgcaagcacaaattttaccaatctgacctctttgaagttgcagaatgctttgaaattctaatggtatctgaaatatcagctcatagaaagtaacaaaatttgctgtcaccttaaataagacattttaattttgttataatgtacaatttagaagtttgattaattrtattatctatttaggcattaatataaaagaggtaggagtctgttatttaaaaaaagcattaaatttaaaaaaaaactgtcttgtctacttttagcttcattctcccatattttgaagggtgtgtaacttcagctctgcaggattgcatggggtaaaacttgttaccaacacatgtgaaccattgctacattgtaggttgtgatcattttgccccactgaagcccatgtatctgaccttacgtgccttttgaactaggagaatcgggctaatttattaatgatgataattataatgtatctgtacagcactttttacatttgcgaagtgctttccaatccatkttagttactagttattacagctgtaaggataaaacacgtcatgtggattcattttgaattggtgctattggtatttcctctgttattgctaataaatgaaaatggtggtatgaaagaaatggtggtcatttctaagaataggaggaaatagaacactgataagcaattaatactgaagaagattgctgcagtatgaaactcactgtaacactctcttatcacgttagcttttatgtccattactaaggcaaaagccccagtggaatcaagattcaaacttcatatcattagaatgggcagccaggaggttgctgcgtcactttgtagttacactatttcagttttctctaataagaattgcaacaaacccatttttatcacaagagcccttctaggcatctttttcattacttgtttagcccttgcacctctctacaattggaaagccaagtgacaccccaaagaaatgaacttttaggtcagggatagtggctcttgcctgtaatctcagaactttggaaggccaaggccagaggatggcttgaggccaggagttcaagatcagcctgggcagcatagcgagatcccatctgtacaaaaagaaataacttttattgagtacagggtgtatgccagccacactactgcataggttcagctgtgacaaatagattgttttgtccttttgtagttaaatttgtataaatataagctttagatgctgtaggttctcagttaggagcaattttgccctcctggggacatttggcaacgtctgaagtcattgttgcttttcattacttgaagtggagggtgctattggcatctactgggtagggggcaacgatgctgtgaaacacctggcaatgcacaggacagccccctataacaaaggatcttacagcccaacatgtcaatgtctcaaatcaagattgagaaaccttgagatagagtgaccatataatttgtgtagtccacttttgaaatggaacaggagacaccattcgttattacttcaggattcaagatgtaaactgggactgtcccaggctaactgggatttatagggactctataaataaactggtatagctgtgccactaactagatggggaatttgaggcaaaccactacttctctcagtttttcagtcatctctaaactggtcataattataatacagaccttatagatttgtgaggtaatcttaaaaggttttagcaggtctggcacaccatagtactcaataaatattattatttattaatccttttcttccatttccttacccccttttcagagatttagctattagacccagggaacttttcctactgactaaaatgtgaatgagggatggccaaaaaaatcaacatagtcttggcaataaaaatattttatttactcctccgctcttttgctcaccccaggaggaaaagaaataaagtcagtttcataactccttacctatttctatcataataataatcaaatccctaagtagtcaagtggccagtctgtttgcagctatttcacctcaattattggtgatctgaaagccagaaaccaaagggtttgaagtacaacagcttgagagagaaagagaagagtcacctccaacaacttctttcggcagatgagcaaaacagaaatgccaaattacccacagacttgcctgggatttcacaggcaataaaggacaagacaggtgcatctctctcaagggtcaggctacttgatataagtctcacatatacagagtgcaggattcattctttagaaatattgcaattgatctaattttaaaggatgagattctccaatgagtgtctagagccttggctttgaattttaggctcctaggtaagattgtaagtgccaggatctcatgttaatgtattttacgtttaaattataaacattatgtttgttataaaccccaatctaaagtacaaatgtaactgaccaaacactaatgcaattttactgttaaatctagatttaaaaaccatgcaaacattaagagatacaataaaacaagtaaacaaacaaaactacagatacagttcctcaagactttcagtccctggagcttttccaggaaatggaaatggaaataagttggccactctttgacctatttcatcatattttcatgtgcttcctttccttgtagaaaaagctgattatgttatttccctcaaaattaccttgactgttggctggcaggacacaacttgcaacctgagaaatttcttctggctttatgcacacacacacacacacgcgcacacacacacgcgtgcgcacagtcatacgtgcacacacgcgtgcacacacatgcacacgcacacatgctgacacacatgcacatgcacagaggttcttactgtaactaggagggggctttagcaaatgagcatggtgctgtcctccttttgaaactgtgcctaagagtggtacatagcaacctttttgttataatcagtcaggtaaaatgtttgctgggtcccattttctcttggggttgatccattgggaaatgcctgctgacgtatgaaatcttaaaagttttttgcctaataaagtctatcaccttgtctttgaacttaagctcctctgagctggacastagtaaatttactttcataatatgagtctagtttgcataaagaaataagaaagagtaggtagtgaaaaacataaagtccagcattttgttaggttacacaattgtcgggtgacttggggatcatcaatccacaaagaacatgagcaagtcagacaaccactcagccagtagctggtcttagagcagagctaaaacaattggcacccgaagcataaatatatgggagactgacacaacagttctcgttttagagtttgctttcactrgacttactttatttagttttatgtgaaattgaatttttattataaaaggtaatacgtgttctttaaaataaatcaaataaaccagagatatataaagaaaaattattaatctcaccatcttctttcaattctctcttacatgggtatccaattttaacaatttcaaatgtgtttctctgcatttttctctatacacacacatttatatcacatacacatagttttaaaaataattgttttccttttttttctttgagacaggatctcactctgttgcctaggctagagtgcagtggtgcgatctcagctcactgcaacctctgcctcccgggttcaagcaattctcctgcctcagcctcccaagtagctgggactacaggcgtgtgccaccaggcccagataatttcttttgtatttttagtagagacagggtttcaccatgttggccaggctggtctcgaactcctgacctcaggtgatctgcccgcctcggcctcccaaagtgctaggattacaggcatgagccaccgcgcccagcctgttttcttttttatataaaaacaaaatgatgccatgcttgttgccctgtagatttttyttttaatttacaataacatgaagatttttttcagttcaactctacatcactctttttaatgcctgtataaattccacataatggccagatcataatgtcataaggcatttaatttttctagatttttgctactcaaaaccaaaaatagcacttgttcacaattataaatttagcacctgagctttataaaacctggtctaggtgtattacaaaaaggacgtttggaagactrttatgaactttatgtgactccctccacaataatcacattcctttactggaactcactcagttctagtattcaacgttgaattgtggctctatttgtagatgaatggtgaaaaacagacattcacaagaaaaacagaaaaatgttagaaagatatgtcttcatttacttatccagaataatttcatgggagcttcatttcatccaaagacttctccattcaatcacagattgaaatgtatgtatgaaagaagaagtctsaaagacaattcaaatacttgcttagacctgtgatattttaatataatctggttgaacattgggtagaaagcagtctaacttttttctaggttgttacatgttacctgagggtagacatattaactttgtaccagtggagcttatttcattttaagaaaaacaaattgcttatcaagtaatgaatccaagacagccaaaaatcaaggcagccattcatgtatttaaaaaatctcagttacaaaaccatctggctataaacttcaggaaaccttccttatgaaattattgatactattttatcccttaaatcagcctttcaagacgtaattccagtctgggttcagtggctaatgcctgtaatcccaacacttttggaggctgaggcaggaggattgcttgagcccaggagtttgagattacagtgagctataatcagtcacatcactgtactccagcctgggttacagagcaatacactgtctcaaagaaaaaaaagaaagaactgcattcctaaatcaggtttattccattctctatggctaatagaattcatcagccagacacagcacacatttcttcccaactgctgtagctttccagatcaccttcctcttggtcctcctcaagcctatgatcaatttttcagaaatcttggagtctggaagtcctagccttcctttcacacttttcacagtagtatgctagcttagagcccaaccagatatctggtaagtcggttctaggacataggtgggtggtccatatacttgggatcagtagctgggataggcagtgctagatttttcctggggatgcttataggatggggaggaagccttgtacaggttaaacaaataaaattaggatcattcaggtactttctttgcatagatttggaatgatagggccaaggggctatggaatgagaccatttttgctgacagagatgtgcattttaaaatagattcttgggttgtgagttaaagaaaccaacaccatctagtttaagctaaaaaggatgatttattataaggacacaaatttgtttcattgaaactaagaatgggagtaagtttaggcctctggaaccagtaacttggaagccagaaaaattcctttttaaatttatcttctctaattatctctcttaatctgtttcattcttcctgtctctacagatcagctccctctccttctctttgccacagcttctaaatttatacacactaggttctagtggcccataaaaacctacgttctgtttcttttttctcttctttttttttttttttttttttttttgagacggagtctcgctctcacccaggctggagtgcaatggcgcaatctcagctcactgcaaactcctcctctcggattcaagtgattctcctgcctcagcctcccgagtagctgggactacaggcgctcaccaccacacctggctaatttttgtatttttagtagagacggagtttcaccatattggccaggctggtctcaaacacctgaccttgtgatccgcccaccttggcctcccaaagtgctgggattacaggcgtgagccgccgcacccggccacatactttctgtttctaattcctagttctaacttcttcctggaaagaaaaactaattggatcaccttgagtcaggtagcccatcagccatgggccagaggactgtgggtaggaaggagaattctcagaaaaaaggagatcggatacttagagacaactttaatagcttgctgatagctgatattccccagatactgttagtatattaaacatcagtgtatagaatcttagaaacttagggccccaaggaaacttatttaacaaatgagaaaattgaggctcacagaaaggggaatgactcattcaatgttacacagctagtcaatgacaaggcagctattctcctgttaccactctactgcacagctagaggccaccaggagtgaatgacaatactcatttcattatatgtttgagagccaaaagtagtacaatttagggaggtcatgttaattttatatagagagtagtatttcattgttatatatgttttattaatctttttattcaagatgaaatatcaatattgatttccctttattgatt

SEQ ID NO: 9923 - DNA, 12655 bp, Homo sapiens
gattgaaagctccatgatagtgatcttcttctatcctggtcattgtgtcccagtgcctagtaccagaatgtgggagatacacaaaaaatatttgctaattgaatgaaaaaacttatctgtctagaaagatcatagtctcaaatcctgtagtgatttctgagagaaaatacattctttgtcattttaaaatgagatagagccactttacatacatttcctttctagtcaaggacaattctaattgttatgaggtggggaggtttactaatagtgtgtgtgaatgtggtttagctagaatgagatactgttgtgggaggaaattaaaatgacctgacgttagtttggtttttaatgttaattttaaaagagaaagtatgcccttccagataacggtaaattatttctctttgcttataatgtgttgaagaatgttagctgacttacttgtaatttccagaatgatctatttcctctttttcaaagatgaagttttttctgttacaggcttgagccacctcgcctggctgtgttttgtttaaccatatacaatgtgaggtcattatacatgaaaataatccaaatattactcagcatcttccctatgagttttatgatgctcaaatattcttatcatagaaggtaacttgagataaattgtatgcaatttttcattttccaaaattactgtgtattttagtttctaaacctttctttacatggaatattgccagacatagttaaaaggattaactgaggttttcttaatgtatctagctccttcagtcctgaaatacattttctgcttttgagtttaacacattttctatatgctgttttaggggaggaaattatattgaccctaaatatttttttaaattggatttatcagtagacattaagataatctgctgggtgcagtggctcatgcctgtaatmccagcactttgggaggccaaggcggatggatcatctgaggtcaggagttcgagaccagcctggccaacatggtgaaaccccatttctactaaaaatacaaaaaaagggccaggcgccgtagcttacgcctgtaatcccagcactttgggaggccgaggcgggtggatcacgaggtcaggagattgagaccatcctggctaacacggtgaaatcccgtctctactaaaaatacaaaaaattagccgagtgcggtggcaggcacctgtagtcccagctgctcgggaggctgaggcaggagaatggcgtgaacccaggaggcagagtttgcagtgagccgagatcgcgccactgcactccagcctgggcaatagaggggactccttytcaaaaataaaacaaaaacaaaaacaaaaacaaattagccaggcttggcggcgggcacctgtaatcccagctactcgggagactgagggaggagaattgcttgaacccgggaagcgaaggttgcagtgagccaagattgcaccattgcactccagcctgggcaacactggagcaaaattccatctcaaaaagaaaaaaaraaaaaaagataatgtgatgtggcagtcctctgcctatcactaaggcctaaggcctctgccacatcacattatcttaatgtctactgataaatccccagttttttttwaaaaaaaakttccattagacattcagaaaaactctgaattgatgaattacactcctgtggttgttccatggaatatctgtgataccagtgaacaaaagatttggggagagcaataaattccccagtgtggtaacaagtcctccaaaggcttcctgtctgtgattaaggagtgtggcaatcaggttactaataatcgtgtatgtttgaaaattccctttaatacactttctagttctttaaagggctccaaaatataagctgccctttaatacactttttagttccttaaagggctgcttatactttggaggttaaattatgggtgatgggagaaatcctgcttatatttaggaggtagaaaattataggggtgaggaaatagcaaataccacagaaaagccagcttacatattgctatatcaccatatattttaaagataaaaaggttaactaaaaatatttagcagttcttktatctagtaggatgttttctataggaaaacattaaaatctaatttatgctggtttaaacagtaagaaaatctatgatcccaaaatacaggtagtctagcacagctttgtcctatagaaatatgatgtgggccacagatggtcagccacagatgtgattttagattatctagtagccacattcamatagcaaaaagaaacaagtgaaatttcaataattttaatccaatatatctaagatataattgcaacatatttttacaataatgtaaagatattaataatacgttttacattcttgttttgtactaaatcttcaacacctagtgtgtgttttacacttacagcacatctcagtttagactagctgcatttcaagtgctcagtggccacgtgtggctggttgttactctagtggacagtgcaggtctagaagtttcactgcctctaggccagatacaatcatggtgtagcacaaattgttttttcttcctaattttgaagaatgagcacttatttatactttttctgttgtttcagctctgctttcctctccttgtggaattctaaaggctgtagtcacaagataccagccagcagcaataactggagaactttcttcattgtccgtgacaagagagttactctccccaaacagtctatctttcaatccaactggaccaacttaggccatgttccyattcttagctcagtaatactagggaaataccctaagcctgtgtttctgaaaatggttggggagaggtgaggtgacatttggtaatgtctggagacatttatggttgtcacaactgtggggggtgggtcctactggtatctagtatatagagaccagggatactgctaaacattttacaaggcacagaacagctccccaccacaaagaattatatggctcaaaatagtaccagggttgagaagccctgctttaagcttattattttaagtctatattcctaactaagcactgtcaagaggatgagattatcattattagattaaatttatcagaacctactacagctctgaataggttctgcttccctaggtacattaagggcgaacacctaaactaaaaggaagtgttacaagaggaaaaaggggcatgagcaaccaatagtatccataaaagagctgcttatttttgtaattgtgaaagtatatatctatttttaaagtatggataagcatcgaatgtaaattctttatatcagtagttacataatgcaattattcataattttacatttttatyagtattttctaccttttatagtgaaattttctcctttaatatattgaatttacagtgagaattttttataatttttttacagtggataatttcttgagtagccatttttacagaaaataagtttcaatagtgtgtcatcttgaaaaggaaatgtcaagagggaaaaatttgtaagaattcttagtcgaattttaatgtattttaggctgggtgcggtggttcacacctgtaatcccagcactttgggaggccaaggcggacggattacctgagatcaggagttcgagaccatcctggccagcatggcgaaaccccatctctattaaaagtacaaaaattagttgagcatcgtggtgtgtacatgtaatcctaactactagggagcctaaggcaggagaattgtttgaacccttgagacggaggttgcagtgagccatgatcgtgccactgcactccagcctgggtgacaaagcaagactctgtctcaaaaaaaaaaaaaaaaaaaattaagaattttaataaaacgttagaactaaattttgtgaaatgatcattttgctaatattttatcaaaaacaatgatttgtacccttcttagtaaagcagctggtattttaaaatatgtctcgagaaaaaagccaatacagtctcttttgaggaccttgaaaactaacctgctagggatatcatactaggcctctgggtgccgctgtccgccaatccgtggctggagggaaacaaagcaatccactgacgcagcagtccccgcaggcttttgagacacacattaggagaggactctgcccgctgtctgtctcacaatctgctcgaaatatcttggtcaggaatctcaggatgtctagtgaccccgagtgaggtgctgccttttattcctgagcatctttggaagcaggaagcagggagcaacggtagcgagaggtattcggatctgagtatcagcaggaagaagaaacagaggaagaagtcccccataaggaaggcgtgaggagcgcaggaagcgctgtttccctgcctgagatctttattctactaggtctttattctacgtagccgatacgctgtaaaattctggaagagaaggctaggggtttaaggttggtaatctctcagaagatctgcgtctcggtgacggaaagaactaagggtaagtgctgagaagcctctctttacagccagagaacgagccagagccgagcttgagaatgacgggatagatctagcagttatgcccaaggaagaccctcggccctttgaatttgaaggcactgaaaatcgtataaatgttttcatataaacgtatgcatctttgatataaataacaaaatggcttttagcacaaattttgttttggaaattttgaaaaacgtcttaataagaggaatgtttactcttaagtctgcagtagattttgaacaccggcagtaactgtacaaatatatcagattagttttaatagccatctccccttcccctacaagtaaaggagagtactacagcagtatgtactctgaattgctgctattgaagaacccctgagcctgtgcagcgtggcactcctgtggtccccattactcaggaggctgaggcaggaggattgcttgatgccagctagaggctgcagtgcactatgagaacacctgtgaatagccactgcattccagcctgagtaacatggccagaccccatctcttaagaaaagaaaagaaaccctgaaccagaggagcagagctgccaccacttagtggtggggatggggcagaacagctcagggcaagacacaggccttggatgccaatgccagccgtcagatattgagcaatgtgtaagtggggttagcctgcakgagaacctgctcgccacctcctcctcttcattctttaggtgatccccattgacctagacaatatctttaatatagagttctcctgatttttctacacaattttacagggcatacagaatatatttcctgtccaataatgacagaaatacttgattttgaagagtaacagttatagcttggaatagaagactggaggcagtttgagggccgacttcagagtcctggttgaaatgaaggttgagaagtataatgcagtcagtgcaggtgactttcagctgggtatctagtcctatcagaggtaaaaactgtggttgccctaaccaaaacaataggactaagagaccttaaatgaaagatgaaagttattatagagagaaatgatcatactggcaaacaattcacctccaagaattatgatgtgactctttgtcagatactcacagatggaattctaaactggtagcagaccctgaaggacaatgtcaccatcagaaccaccaacaaggacaaactgtccctctcctgcatcaccctgcataccatctgcatccacaaaaatgctcattcttcaacaagcctcctatttcttttgggtgactgggaacactgcccagcacctccatcacatgctttagcgcttcccaccctaacttagggtcccatatgcctcctgtttcttcttgaccagtgacctgccactgtgggcactgtcattctacatgtcagtgagtgcagagtgctatggttaccatgcagactatctttgagctgactctgcaggccagtgaccagggttcaacttgctcagtgtcatcctgaacctgcatgtgatggtggatgaccattgcaamaatgcaaggacactatgccaggagttgcagccaagtggggccctctttgatgctgcaccactcacaatgcaacccagctatcccatcaccaaagtggacaccagctggggcataaaggctgactgtcctatcatgtgcttcaggccagctaatgtggctcttcaaactagggatgtgcacragctagatgcgtgccgtgtcactgtgggtaacagagatgcaacctgccaaggtttgttggtcaccgtggtcaatggtgaatcatcacgctgaaacatcacctggttgctgctcatagtttgcaggagttgctaccagacctcagcaatcgcccagcacccaacagcaggcagcagacagcacccaacagctggcgatggccgttgccttgatctccatgctgtttctcctcagtgtgactctggccatctctctgaacctgcaatgccccctatagctccattgcctggggctgttttcagctggatctctggtccaagcccggatatggagttgtctccaacttaaagaaaggaaatttgccctgttcctacaacgtatgtgtggttttagatatttttaaaatcttaatttctttaactcaagaaacagctttgarccaggtattctctgcagtgccagcaatgaagctttgttttatttttgtttttgtagaaacggggttcactatattgaccaagctggtctcaaactcctggcctcaagtaatctgcccaccttggcctcccaaagtgctgggattgcaggcgtgagccactgtgtgtgggcagcaatgaagctttaaatgttgcatttgattcaaatgtatttgtgtgatattttaacatttttattttatacttaccatccttttataaatcactcctgcgtgtttttggttgctgaaagtagggagctctacaggtttacttactagttcttatgtatattttaatttacctcattagctcacaatttctttggggaaaagtttatgcctattaatgtgtattctgaaaagttacattctctgttaaagagttacttccttgcaatattgaagatgatttattgcacctttaaatttctactctttggctccatgtacttgtctttgagaagctgagaaactgtagatttggttaagaactaaagttctctttccaaaaactattattgagacctttcattgttttctttctttcctcatttttaacttttctcagtcatggtgtccatgggttggctggccgaatttgttcctgaaattatcagactctggagtacagatagcatgcttctctaactttggggtaaagataagtaagtcactctaagcctgagacattttaattagtaaccctttgctaatagtgcagtgattaaaaaaaaaagaaggccacatcctcaactggttaaaaaatactgttaagagaaaaccaacttctyttggagaaaatattaagtgcgattatagaggaawacatattataagagcctatctaaaaataaagatgagaccatttttcttttcagctgtgaagaataatatcatagactttgtctctgaaatttgaaatctaaattatatattcatgtgacttttcaatgaaattccaagagcccagttttatttttttcaaaatatattgcctttggtgaatcttaagaattttttaaaaacccacataatgcaaagacacttcaaaaaaaaaaaagaggaaaaataaggatagggttaaaccatgctcttcaaaatcccaaggtttctgataaatattcaaatcataatgggaaggaaatgggatggtatgatttttttaaagtctagcttatattctaaaagattatttttccctctaatacttttcaccctccagtcaaaggggagctgctctatgtggcctgggaaattaccaagtggtcaaactttactacagaaaaagtggagagatgattttgtcctcattgtaatgttaggtttttactataattccctgaatagcaaacttggaaagcagataacatgggaatacttggattctcctgtatatttcaatttggtgacatttaggcacatttaaagaagtgaacatatagtttctctttttcatacatatattgtagaattatttccttgacaatagactaaaacttaagaaaataacaagttaatgagaaggttttcagtatttgctaggaatgcagtaactggttaggactgtgggcgccgctgttcactaatctggtagatacaggcagtacacacaggtcaggaggaggaaaaaaaaaaaaaagaaaaagaaaaaagctctcgtgcctcttagaacctccataaccgccagattgaaaactgactgtccaagactgcctaaatcctacttctggatgactctccagtcagaattctcctgaaaattgggttaatttcagctcagaaaagcagaaacgatacccttggtactggactggaagaaaactacgaagtgagagagccatgaagattcagaaaaagctgactggctgcagcaggctgatgcttctgtgtctttctctggagctgctgttggaagctggggctgggaatattcactactcagtgccggaagagacagacaaaggttccttcgtaggcaacatcgccaaggacctagggctgcaaccccaggagctggcagatggcggagtccgcatcgtctccagaggtaggatgccgcttttcgctctgaatcctagaagtggcagcttgatcaccgcgcgcaggatagaccgggaggagctctgcgctcagagcatgccgtgtctcgtgagttttaatatccttgttgaggataaaatgaagctttttcctgttgaagtagaaataattgatattaatgacaacactccccaattccagttagaggaactggagtttaaaatgaatgaaataacgactccaggtaccagartctcattgccttttgggcaagaccttgatgtgggtatgaactcactccagagctaccaactcagctctaaccctcatttctccctggatgtgcaacagggagccgatgggcctcaacatccagagatggtgctgcagagtcccttagacagagaagaagaagctgtccaccacctcatcctcacagcttctgatgggggtgaaccagtccgttcagggaccctcagaatttacattcaggtggtggatgcaaatgacaatcctccagcatttactcaggcacaataccatataaatgtccccgaaaacgtgccgctgggtactcagctgctcatggtaaatgccactgaccctgatgagggagccaatggggaagtaacgtactcctttcacaatgtagaccacagagtggcccaaatatttcgtttagattcttacacaggagaaatatcaaataaagaaccactagatttcgaagaatacaaaatgtattcaatggaagttcaagcccaggatggtgcggggctcatggctaaagttaaggtactgatcaaagttttggatgtaaatgataatgccccagaagtgaccatcacctctgtcaccactgcagttccagaaaactttcctcctgggaccataattgctcttatcagtgtgcatgaccaggactcaggagacaatggctacaccacatgtttcattcctggaaatttaccctttaaattggaaaagttagttgataattattaccrtttagtgactgaaagaacactggacagagaacttatctctgggtacaacatcacaataacagcaatagaccaaggaactccagctctatctactgaaactcacatttcactactagtgacagatatcaatgacaactccccagtcttccatcaggactcctactctgcctacattcccgaaaacaaccccagaggagcctccatcttctctgtgagggcccacgacttggacagcaatgagaatgcacaaatcacttactccctaatagaggacactatccagggggcacccctatctgcctacctctccatcaactccgacactggggtcctgtatgcgctgcgatccttcgactatgagcagttccgggacatgcaactgaaagtgatggcgcgggacagtggggatccgcccctcagcagcaacgtgtctctcagcctattcctgctggaccagaacgacaacgcgcccgagatcctgtaccccgccctccccacagatggttctaccggcgtggagctggcgcccctctccgcagagcccggctacctggtgaccaaggtggtggcggtggacagagactcgggccagaacgcctggctgtcctaccgcctgctcaaggccagcgagccgggactcttctcggtgggtctgcacacgggcgaggtgcgcacggcgcgagccctgctggacagagacgcgctcaagcagagtctcgtggtggccgtccaggaccacggccagcccccgctctccgccactgtcacgctcaccgtggccgtggccgacaggatctccgacatcctggccgacctgggcagcctcgagccctccgccaaacccaacgattcggacctcactctgtacctggtggtggcggcggccgcggtctcctgcgtcttcctggccttcgtcatcgtgctgctggcgcacaggctgcggcgctggcacaagtcacgtctgctacaggcttcgggaggcggcttagcgagcatgcccggttcgcactttgtgggcgtggacggggttcgggctttcctgcagacctattcccacgaggtctccctcactgcggactcgcggaagagccacctgattttcccccagcccaactatgcggacacactcatcagccaggagagctgtgagaaaaagggttttctatcagcaccccagtctttacttgaagacaaaaaggaaccattttctcaggtaaacttttgtgatgaatgtatcagctatctagagaaaaataattcttgatttaacttactagcgttcgctctttgctacagatagttcttctaacccatgtatctttgtagctttttattacaagtcctgcaaaatcacgattgagtctacacgttcatatgcaggtatatttataattgttcttgcactgaaaaggagactgtgatcataatgtaggtggttgggttgaaggtatgtgtgagatgccatctctgtttggaaagagcactgcattagaaacggcgatctagcttctaacattttcttacttgcctctgggctaaaaggtttgattagaaaaggctcaccaatatttaaatgactaacactattttcaaattttctttttataagtacctgctaatctacccctgaatttaatgtagatgtcatctgtcaggacactgtgatagtttatttggggacatttgaagaggtgaagattgtctaaagtagtatttttagttgtgttcatataagattatagagatctatataaactgcaattttaaattattgttgaatattttagccttttattctatctttattatcagatttttttggttttgagatggggtcatgctagagtgcagtggcatgatcatggctcactgcagccactacctcctgggctcaagcgatcctcccacctcagcctctcaaagtgctgatattacaggtgtgagctgtggtgcctgtactgaagaatacgtctatttaagtaatgtatgaagtaacaaaatgaacaacacaaaatttatcatgcaacttgagaaatatctttgaagcctcctgacttatacattatacctgtaatgaaatcagctaacaaaaatcaagtatatatcctattttaatgtgtgttaacttttcagaagaaaaaaaaagtatggtcggggagtaagtccatgctttgatgtatttactctgctccaataaaatacagagatacataaaatataagaggaaagcaaaagcaaagtggtgagctagtctaaagccatgtgagttatagtcttggacttaaaagcagaaattgaaggttaggaaactgcctccagcaatgtaatagggacagaagtgcttcagactagataaatatctggaccaggcttactgcctgaatccaaaataagcaatgaggcccttcagctggttaaaaaggaaaagaaagatgcattaacatgctgcctagctgggcgcagtggctcacgtctgtatttccaacaatttgagaggctgaggcggaaagatccttggagccctggagttcaagaccagccggacagggcggcctgcgactgtagtyccagctacgcggggcggggaggggcggggcggggcggggcargagctgacgtgggaggatcccttgagcccaggaagtcaaggcttcagcgaaccgtgatcgcgccactgccctccagcctgggcgacagagccacaccctgttaaataaataaatataataataaaagctgtttcccaattccggtggttataactttcttcgtaagctgtgtagaccaagagagagagacagacacggatgctggatagagacagcgaacaccaagtatctcatatgtgagctgtggtatcc

SEQ ID NO: 9924 - DNA, 194449 bp, Homo sapiens
  misc_feature (124708)..(124708): n is a, c, g, or t
attgcaacatatttttacaataatgtaaagatattaataatacgttttacattcttgttttgtactaaatcttcaacacctagtgtgtgttttacacttacagcacatctcagtttagactagctgcatttcaagtgctcagtggccacgtgtggctggttgttactctagtggacagtgcaggtctagaagtttcactgcctctaggccagatacaatcatggtgtagcacaaattgttttttcttcctaattttgaagaatgagcacttatttatactttttctgttgtttcagctctgctttcctctccttgtggaattctaaaggctgtagtcacaagataccagccagcagcaataactggagaactttcttcattgtccgtgacaagagagttactctccccaaacagtctatctttcaatccaactggaccaacttaggccatgttccyattcttagctcagtaatactagggaaataccctaagcctgtgtttctgaaaatggttggggagaggtgaggtgacatttggtaatgtctggagacatttatggttgtcacaactgtggggggtgggtcctactggtatctagtatatagagaccagggatactgctaaacattttacaaggcacagaacagctccccaccacaaagaattatatggctcaaaatagtaccagggttgagaagccctgctttaagcttattattttaagtctatattcctaactaagcactgtcaagaggatgagattatcattattagattaaatttatcagaacctactacagctctgaataggttctgcttccctaggtacattaagggcgaacacctaaactaaaaggaagtgttacaagaggaaaaaggggcatgagcaaccaatagtatccataaaagagctgcttatttttgtaattgtgaaagtatatatctatttttaaagtatggataagcatcgaatgtaaattctttatatcagtagttacataatgcaattattcataattttacatttttatyagtattttctaccttttatagtgaaattttctcctttaatatattgaatttacagtgagaattttttataatttttttacagtggataatttcttgagtagccatttttacagaaaataagtttcaatagtgtgtcatcttgaaaaggaaatgtcaagagggaaaaatttgtaagaattcttagtcgaattttaatgtattttaggctgggtgcggtggttcacacctgtaatcccagcactttgggaggccaaggcggacggattacctgagatcaggagttcgagaccatcctggccagcatggcgaaaccccatctctattaaaagtacaaaaattagttgagcatcgtggtgtgtacatgtaatcctaactactagggagcctaaggcaggagaattgtttgaacccttgagacggaggttgcagtgagccatgatcgtgccactgcactccagcctgggtgacaaagcaagactctgtctcaaaaaaaaaaaaaaaaaaaattaagaattttaataaaacgttagaactaaattttgtgaaatgatcattttgctaatattttatcaaaaacaatgatttgtacccttcttagtaaagcagctggtattttaaaatatgtctcgagaaaaaagccaatacagtctcttttgaggaccttgaaaactaacctgctagggatatcatactaggcctctgggtgccgctgtccgccaatccgtggctggagggaaacaaagcaatccactgacgcagcagtccccgcaggcttttgagacacacattaggagaggactctgcccgctgtctgtctcacaatctgctcgaaatatcttggtcaggaatctcaggatgtctagtgaccccgagtgaggtgctgccttttattcctgagcatctttggaagcaggaagcagggagcaacggtagcgagaggtattcggatctgagtatcagcaggaagaagaaacagaggaagaagtcccccataaggaaggcgtgaggagcgcaggaagcgctgtttccctgcctgagatctttattctactaggtctttattctacgtagccgatacgctgtaaaattctggaagagaaggctaggggtttaaggttggtaatctctcagaagatctgcgtctcggtgacggaaagaactaagggtaagtgctgagaagcctctctttacagccagagaacgagccagagccgagcttgagaatgacgggatagatctagcagttatgcccaaggaagaccctcggccctttgaatttgaaggcactgaaaatcgtataaatgttttcatataaacgtatgcatctttgatataaataacaaaatggcttttagcacaaattttgttttggaaattttgaaaaacgtcttaataagaggaatgtttactcttaagtctgcagtagattttgaacaccggcagtaactgtacaaatatatcagattagttttaatagccatctccccttcccctacaagtaaaggagagtactacagcagtatgtactctgaattgctgctattgaagaacccctgagcctgtgcagcgtggcactcctgtggtccccattactcaggaggctgaggcaggaggattgcttgatgccagctagaggctgcagtgcactatgagaacacctgtgaatagccactgcattccagcctgagtaacatggccagaccccatctcttaagaaaagaaaagaaaccctgaaccagaggagcagagctgccaccacttagtggtggggatggggcagaacagctcagggcaagacacaggccttggatgccaatgccagccgtcagatattgagcaatgtgtaagtggggttagcctgcakgagaacctgctcgccacctcctcctcttcattctttaggtgatccccattgacctagacaatatctttaatatagagttctcctgatttttctacacaattttacagggcatacagaatatatttcctgtccaataatgacagaaatacttgattttgaagagtaacagttatagcttggaatagaagactggaggcagtttgagggccgacttcagagtcctggttgaaatgaaggttgagaagtataatgcagtcagtgcaggtgactttcagctgggtatctagtcctatcagaggtaaaaactgtggttgccctaaccaaaacaataggactaagagaccttaaatgaaagatgaaagttattatagagagaaatgatcatactggcaaacaattcacctccaagaattatgatgtgactctttgtcagatactcacagatggaattctaaactggtagcagaccctgaaggacaatgtcaccatcagaaccaccaacaaggacaaactgtccctctcctgcatcaccctgcataccatctgcatccacaaaaatgctcattcttcaacaagcctcctatttcttttgggtgactgggaacactgcccagcacctccatcacatgctttagcgcttcccaccctaacttagggtcccatatgcctcctgtttcttcttgaccagtgacctgccactgtgggcactgtcattctacatgtcagtgagtgcagagtgctatggttaccatgcagactatctttgagctgactctgcaggccagtgaccagggttcaacttgctcagtgtcatcctgaacctgcatgtgatggtggatgaccattgcaamaatgcaaggacactatgccaggagttgcagccaagtggggccctctttgatgctgcaccactcacaatgcaacccagctatcccatcaccaaagtggacaccagctggggcataaaggctgactgtcctatcatgtgcttcaggccagctaatgtggctcttcaaactagggatgtgcacragctagatgcgtgccgtgtcactgtgggtaacagagatgcaacctgccaaggtttgttggtcaccgtggtcaatggtgaatcatcacgctgaaacatcacctggttgctgctcatagtttgcaggagttgctaccagacctcagcaatcgcccagcacccaacagcaggcagcagacagcacccaacagctggcgatggccgttgccttgatctccatgctgtttctcctcagtgtgactctggccatctctctgaacctgcaatgccccctatagctccattgcctggggctgttttcagctggatctctggtccaagcccggatatggagttgtctccaacttaaagaaaggaaatttgccctgttcctacaacgtatgtgtggttttagatatttttaaaatcttaatttctttaactcaagaaacagctttgarccaggtattctctgcagtgccagcaatgaagctttgttttatttttgtttttgtagaaacggggttcactatattgaccaagctggtctcaaactcctggcctcaagtaatctgcccaccttggcctcccaaagtgctgggattgcaggcgtgagccactgtgtgtgggcagcaatgaagctttaaatgttgcatttgattcaaatgtatttgtgtgatattttaacatttttattttatacttaccatccttttataaatcactcctgcgtgtttttggttgctgaaagtagggagctctacaggtttacttactagttcttatgtatattttaatttacctcattagctcacaatttctttggggaaaagtttatgcctattaatgtgtattctgaaaagttacattctctgttaaagagttacttccttgcaatattgaagatgatttattgcacctttaaatttctactctttggctccatgtacttgtctttgagaagctgagaaactgtagatttggttaagaactaaagttctctttccaaaaactattattgagacctttcattgttttctttctttcctcatttttaacttttctcagtcatggtgtccatgggttggctggccgaatttgttcctgaaattatcagactctggagtacagatagcatgcttctctaactttggggtaaagataagtaagtcactctaagcctgagacattttaattagtaaccctttgctaatagtgcagtgattaaaaaaaaaagaaggccacatcctcaactggttaaaaaatactgttaagagaaaaccaacttctyttggagaaaatattaagtgcgattatagaggaawacatattataagagcctatctaaaaataaagatgagaccatttttcttttcagctgtgaagaataatatcatagactttgtctctgaaatttgaaatctaaattatatattcatgtgacttttcaatgaaattccaagagcccagttttatttttttcaaaatatattgcctttggtgaatcttaagaattttttaaaaacccacataatgcaaagacacttcaaaaaaaaaaaagaggaaaaataaggatagggttaaaccatgctcttcaaaatcccaaggtttctgataaatattcaaatcataatgggaaggaaatgggatggtatgatttttttaaagtctagcttatattctaaaagattatttttccctctaatacttttcaccctccagtcaaaggggagctgctctatgtggcctgggaaattaccaagtggtcaaactttactacagaaaaagtggagagatgattttgtcctcattgtaatgttaggtttttactataattccctgaatagcaaacttggaaagcagataacatgggaatacttggattctcctgtatatttcaatttggtgacatttaggcacatttaaagaagtgaacatatagtttctctttttcatacatatattgtagaattatttccttgacaatagactaaaacttaagaaaataacaagttaatgagaaggttttcagtatttgctaggaatgcagtaactggttaggactgtgggcgccgctgttcactaatctggtagatacaggcagtacacacaggtcaggaggaggaaaaaaaaaaaaaagaaaaagaaaaaagctctcgtgcctcttagaacctccataaccgccagattgaaaactgactgtccaagactgcctaaatcctacttctggatgactctccagtcagaattctcctgaaaattgggttaatttcagctcagaaaagcagaaacgatacccttggtactggactggaagaaaactacgaagtgagagagccatgaagattcagaaaaagctgactggctgcagcaggctgatgcttctgtgtctttctctggagctgctgttggaagctggggctgggaatattcactactcagtgccggaagagacagacaaaggttccttcgtaggcaacatcgccaaggacctagggctgcaaccccaggagctggcagatggcggagtccgcatcgtctccagaggtaggatgccgcttttcgctctgaatcctagaagtggcagcttgatcaccgcgcgcaggatagaccgggaggagctctgcgctcagagcatgccgtgtctcgtgagttttaatatccttgttgaggataaaatgaagctttttcctgttgaagtagaaataattgatattaatgacaacactccccaattccagttagaggaactggagtttaaaatgaatgaaataacgactccaggtaccagartctcattgccttttgggcaagaccttgatgtgggtatgaactcactccagagctaccaactcagctctaaccctcatttctccctggatgtgcaacagggagccgatgggcctcaacatccagagatggtgctgcagagtcccttagacagagaagaagaagctgtccaccacctcatcctcacagcttctgatgggggtgaaccagtccgttcagggaccctcagaatttacattcaggtggtggatgcaaatgacaatcctccagcatttactcaggcacaataccatataaatgtccccgaaaacgtgccgctgggtactcagctgctcatggtaaatgccactgaccctgatgagggagccaatggggaagtaacgtactcctttcacaatgtagaccacagagtggcccaaatatttcgtttagattcttacacaggagaaatatcaaataaagaaccactagatttcgaagaatacaaaatgtattcaatggaagttcaagcccaggatggtgcggggctcatggctaaagttaaggtactgatcaaagttttggatgtaaatgataatgccccagaagtgaccatcacctctgtcaccactgcagttccagaaaactttcctcctgggaccataattgctcttatcagtgtgcatgaccaggactcaggagacaatggctacaccacatgtttcattcctggaaatttaccctttaaattggaaaagttagttgataattattaccrtttagtgactgaaagaacactggacagagaacttatctctgggtacaacatcacaataacagcaatagaccaaggaactccagctctatctactgaaactcacatttcactactagtgacagatatcaatgacaactccccagtcttccatcaggactcctactctgcctacattcccgaaaacaaccccagaggagcctccatcttctctgtgagggcccacgacttggacagcaatgagaatgcacaaatcacttactccctaatagaggacactatccagggggcacccctatctgcctacctctccatcaactccgacactggggtcctgtatgcgctgcgatccttcgactatgagcagttccgggacatgcaactgaaagtgatggcgcgggacagtggggatccgcccctcagcagcaacgtgtctctcagcctattcctgctggaccagaacgacaacgcgcccgagatcctgtaccccgccctccccacagatggttctaccggcgtggagctggcgcccctctccgcagagcccggctacctggtgaccaaggtggtggcggtggacagagactcgggccagaacgcctggctgtcctaccgcctgctcaaggccagcgagccgggactcttctcggtgggtctgcacacgggcgaggtgcgcacggcgcgagccctgctggacagagacgcgctcaagcagagtctcgtggtggccgtccaggaccacggccagcccccgctctccgccactgtcacgctcaccgtggccgtggccgacaggatctccgacatcctggccgacctgggcagcctcgagccctccgccaaacccaacgattcggacctcactctgtacctggtggtggcggcggccgcggtctcctgcgtcttcctggccttcgtcatcgtgctgctggcgcacaggctgcggcgctggcacaagtcacgtctgctacaggcttcgggaggcggcttagcgagcatgcccggttcgcactttgtgggcgtggacggggttcgggctttcctgcagacctattcccacgaggtctccctcactgcggactcgcggaagagccacctgattttcccccagcccaactatgcggacacactcatcagccaggagagctgtgagaaaaagggttttctatcagcaccccagtctttacttgaagacaaaaaggaaccattttctcaggtaaacttttgtgatgaatgtatcagctatctagagaaaaataattcttgatttaacttactagcgttcgctctttgctacagatagttcttctaacccatgtatctttgtagctttttattacaagtcctgcaaaatcacgattgagtctacacgttcatatgcaggtatatttataattgttcttgcactgaaaaggagactgtgatcataatgtaggtggttgggttgaaggtatgtgtgagatgccatctctgtttggaaagagcactgcattagaaacggcgatctagcttctaacattttcttacttgcctctgggctaaaaggtttgattagaaaaggctcaccaatatttaaatgactaacactattttcaaattttctttttataagtacctgctaatctacccctgaatttaatgtagatgtcatctgtcaggacactgtgatagtttatttggggacatttgaagaggtgaagattgtctaaagtagtatttttagttgtgttcatataagattatagagatctatataaactgcaattttaaattattgttgaatattttagccttttattctatctttattatcagatttttttggttttgagatggggtcatgctagagtgcagtggcatgatcatggctcactgcagccactacctcctgggctcaagcgatcctcccacctcagcctctcaaagtgctgatattacaggtgtgagctgtggtgcctgtactgaagaatacgtctatttaagtaatgtatgaagtaacaaaatgaacaacacaaaatttatcatgcaacttgagaaatatctttgaagcctcctgacttatacattatacctgtaatgaaatcagctaacaaaaatcaagtatatatcctattttaatgtgtgttaacttttcagaagaaaaaaaaagtatggtcggggagtaagtccatgctttgatgtatttactctgctccaataaaatacagagatacataaaatataagaggaaagcaaaagcaaagtggtgagctagtctaaagccatgtgagttatagtcttggacttaaaagcagaaattgaaggttaggaaactgcctccagcaatgtaatagggacagaagtgcttcagactagataaatatctggaccaggcttactgcctgaatccaaaataagcaatgaggcccttcagctggttaaaaaggaaaagaaagatgcattaacatgctgcctagctgggcgcagtggctcacgtctgtatttccaacaatttgagaggctgaggcggaaagatccttggagccctggagttcaagaccagccggacagggcggcctgcgactgtagtyccagctacgcggggcggggaggggcggggcggggcggggcargagctgacgtgggaggatcccttgagcccaggaagtcaaggcttcagcgaaccgtgatcgcgccactgccctccagcctgggcgacagagccacaccctgttaaataaataaatataataataaaagctgtttcccaattccggtggttataactttcttcgtaagctgtgtagaccaagagagagagacagacacggatgctggatagagacagcgaacaccaagtatctcatatgtgagctgtggtatccagaatatcactgctgtgcatcattaaagcgtcattaagagacctagttatggcctgggacctgaggtcagatagaaactatttcaaaaccattacaaatgagcactgaacccaggagggaaggagagagggatatagtgtagaagagaaaaaaacaaactaaaactaaaaacaaacagagctcttccactaaaaataaatatacaaaccaaaatttcaaaacacacttgtctcgtagaatttattgttactagtgagaaactttctgtcaacacactgttattttttaaggtaatctctgttttctctctggtaactattgaagactttctctcattcttgctgtgtgtctgttgcatttttatttttattttttgcttggtaccaagagtatactctcaattgataactaagttatctcacttctggactttctcagctcttataatcataattttttttctgtgtatatacaagtgagctacatttacctattaaaggacaaatattacaaaactggttgatttttaaaatccatattctaataatacacgtgcttaaaataaaaatacactgaaacagtgaaactaaatatatatgtacacacacaaaaaagaaagtcatgttaatgtaacaacaaagtcatatttaaggtaacaaacacaaattgtgattttaaaaaatgaactgattatagttgtaaaaagagcagatgatcaaaaggatataaaaatataagcttctattactgaaaaatatagcttagaaaataccrgaatatttaaacataattccataagaaataatagaccccacaggaagaaagttagttaacataaagaagatttgaacaacataatttagaagcttgatctattaggattctaatagatccgttctgcacacaacaaatatggaatagtcatccttgaacaagcagacaatctacaagtttattacctagtcattacaaaaaagggttcagcaaattgcaaagtaccaataatatacttgccttacaacacatacttaatcacaaagcaaacatttaaaaatagaaaagggaaaaagtttggatatttacatctacacccttaaataactcttggatttcaaaaatcacaatgacaatgaaaactactcagaaaaaaaggacttaaatattctttattaaaaattgtgagatgcaactaaaactaattaggagtaagtttatagacaaatgcaataatttttttaaaagcaaacaaaattatttaaaatacatgaatttagcttgccattcaagaagtaagataaaaaacatacaatgagtatatactaaaataaaatgatggaaaaaataacaaagagttacatttttgaaatgcaaccrtggaagagttctgaggatgaartaatggaagcagacaataaatgtaataaaaccagtggggagaaaatgaaaattctgtcaagtctaacgttaggactcatgtaagagagccaggcacaatggcacacctataatcccaggtactgagtaggctgaggcagtaggattgcttgagcccaggagtttgaatccagccggggcagtataacaagacccaatctctataaaacaaaaaaacacaaacacaaacacaaaaataaaaataaaaaacaaaagcaaaatataccatagtagctctacaagaaaacatggtgagttggtatcaattatttccaatatatttttcttcagtcttgtaagaggaatggatgaaagtaaaaatgagaaaatttcaataaggaaggagccaaaaggcaaacagattaaagtgtcaccagaaatgggcaattccacttatgccacatacaaaaattaattcaaaatggatcaaagaagcaatattcagaagcaataaaacccttttagttattatgtttaagaactaaaactatacaactcttagaagaaaacaggaggaaaccttcataacattgatttttggcaatgatttcttggatatgacaccaaaagcacaagcaacaaaagaaaaaaattgtatactggactttatcacagttaaaaactatatgcagcaaagaacaatatcaatagagtgaaaaggcagcccacagaawgagagaaaatgtttccaaatcatgtatctgagaatggatatccagaataaagaactcgaactcaacaacaaagaatcccaaacaattggatgttaaaatgagcaaaggacttgaatagacatttctccaaagatgatatacaaatggccaaaaccatatgaaacaatgttcaacatcactagtcattagggaaatgcaaatcaaaaccataatgagatactactccacattcattagaattgctgtcataaaagaaaagaaaagaaatgttaacaagaatatggagaaattggaattcttgtgcattgctggtgaatataaaatgacacaactgctgtggaaaatggtatggtgactcctcaaaaatttaaacatagaattaccatataatccagcaattccactctggttattacccaaaagaagtgaaaatagggacttcaacagatatttgtacacctatgtttatggcatcattagtcacaatagttgaaaagtggaagtaacccaagtgtccattgacagatgaatgggtaaataaaaagtggttcacacatacaatgggctgttatttagccttaaaaaggaagggaattctgttacatgctacaatatggacgaacttcaaagacatgatatcaagtgaaataaacctgttataaaatgacaaatactgtatgattcctcatatatgaagttcctagattagtcaaattcatagagaaaaaaggtagaatggtagttgccagggactgggtgaaaggcaatggggagttgctatttaataagtacagagtttcagttggggaggatgaaaaagttctggaagtggatggtggtaatggtcacaccagaatgtaatttgaatgtacttaatgtcacagaattgtatgcttgactatggtcaaaatggtaaagatgaaacaagagtaagaagacatccactgcattgtattttacacccttggaaaatgaatatcagaaaaagaacttgacaacctcaaacaattttgagtgactgattcctagtgtggtgaaaaaccccttccggctctagctttatcaaatagacctgctttctgtttctgtaatgttccatgctgtctcttaccttcaagcatttgttcagaggttctagaacacttcttcagcctttttcttgattcaatcctactttttatgattcagcttcaatcatgccctcaaaaagacttttctgaccccaaatctagactggatacccctcctaggtattcctccatcacccagtgtttcctacctcatatcacagcagttaccatactctattayactctctttactttcttatgtcctcctccaaccttcacgcttgagaccagggcctgtgtttatcatgttcaccatttctagctccagctgcaatcatgcaaagtgggaggcacatgtacccaattaagtgtctgatgattcaataatttaaaggcagattttgaaggtaaatgcaaagccatcaaccataaacgttcaaaatatataaccttagaagaaaacrtagctaacgtttcttaattgatcttactgcttctgattatacaataagagatggaagatgtttggagcaagggcagtggtggcattgattaatgccttgagcagtcaataatactttcctagcaactattatcaagatcatgttcatttataccattcttattaatcctgataaaaagattcctgttttgaaagatctaattctagggtatcttagagctgtaagattctttaaagcrccttgaaagtcaacaaaggcaaacaaacaagaagtaacttaggttttcctgagcaggtgcaraaattatttaggcctctgagcgtcgctgttgaccacctaaggagtaaaaggcagcgagacatccaatccagcaatacggctcccacagcacargggggtggaggtttggccctaaagcttcaggacaccaaagaaattcagtcgaacagcccaccagttctctccatagggacctgggtcccgtgaatgctggttatctcacaccctgaggaataaagattggaatccgcactggatgctggaagttgactcggagaaaattgcgacaggagggaaatggcggctctgcraaagttgccacactgcagaaagctggtcctgctgtgcttccttttggcgaccctgtgggaggccagggccgggcagattcgctattctgtgcgggaagagatcgacagaggctccttcgtaggcaacatcgccaaggacttgggtttggagcccctggcactggcagagcagggagtccgcatcgtctccagaggtakgtcccagctctttgctctgaacccgcgaagcggcagcttggtcactgcgaacaggatagaccgggaggagctctgcgctcagagcgcaccctgtctgttgaattttaacattctgctggaggataaattgactatttattcagtagaggtggaaataacagatattaacgataatgcccctcgctttggagtagaggaactggagctaaaaatcagtgaaaccactacgccaggattccggattcctcttaagaatgcgcatgatgcagacgtaggtgagaacgcccttcagaartacgcactcaacccaaatgaccacttctccctggacgtgcgaagrggagctgatgggaacaagtacccagaactggtgctggagcgctctctggaccgcgaggaagaggctgttcaccacctcgttctcgtggcttctgatgggggtgacccagtgctatctggcacctcccgcatctrcgtgaaggtcctggatgcgaacgacaatgcgcctgtttttacacagcccgagtaccgcataagcattccggagaatacgctcgtgggcacccggatactcacggtgaccgccactgacgcagatgagggctactacgctcaagtggtatattttctagagaaaagccctggagaaacctcagaggtatttgagcttaagtcaacatctggagaactgacaatcataaaagatctagattatgaggatgctacattccatgaaattgatattgaagctcaggatggtccgggccttctaaccagagcgaaggttatcgtcacggttctggatgtgaatgacaatgccccagaattttacatgacatctgctactagctcagtttctgaagactctcttccaggaaccataattgggctttttaatgtacatgatagagactctgggcagaacgcattcaccacctgttcactccccgaggatcttccttttaagttagaaaagtcagtagacaattactaccgactggttacaaccagagcccttgacagggaacagttttccttttacaacatcactctaaccgctaaagatggagggaacccctccctgtccacggatgctcacattttgctccaggtggcagacatcaacgacaacgyacccgccttctcccgcacatcctactccacctacattcccgaaaacaaccccagaggagcctctgtcttctcagtgacggcccatgaccccgacagcaacgacaatgctcatgtaacttactctttcgcggaggacactgttcagggggcacccttatcctcttacatctctatcaactccgacactggagtactctatgcactgcgctcctttgattatgagcagttgcgagacttgcaagtgtgggtgatagcgcgggacagcgggaaccctccactcagtagcaatgtatcattaagcctgttcgtgctggaccagaacgacaacgcgcccgagatcctgtaccctgccttccccacagacggttccacyggcgtggagctggcgccccgctccgcagagcccggctacctggtgaccaaggtggtggcggtgracagagactcgggccagaacgcctggctgtcttaccacctgctcaaggccagcgagccgggactcttctcggtgggtctgcacacgggcgaggtgcgcacggcgcgagccctgctggacagagacgcgctcaagcagagcctcgtggtggccatccaggaccacggccagccccctctctccgccactgtcacgstcaccgtggccgtggccgacaggatccccgacatcctggccgacctgggcagcctcgagccctccgccatacccaacgattcggacctcactctgtacctggtggtggcggtggccgcggtctcctgcgtcttcctggccttcgtcatcgtgttgctggcgcacaggctgcggcgctggcacaagtcacgcctgctgcaggcttcaggaggcagcttgacaggcatgcagagctcgcactttgtgggcgtggacggggttcgggctttcctgcagacctattcccacgaggtctccctcactgcggactcgcggaagagccacctgattttcccccagcccaactatgcggacacgctcatcagccaggagagctgtgagaaaaaggattttttatcagcgcctcaatctctactcgaagaagaaagagaagaaacgytttctcaggtaatctatcttttcacaacatacgtactagctagtttgctgaagtaattcacttacttgtttactatatctattttgttccccatatttccttgagggtagagtcaagttttaggaagtgagtcttggtgaattatttcttggtaggtcttagtgttcacaggctgtaagaggaagaagagacgtgagaatctttgtgcaatgaatgtaaaccaggagttaatagataagattatccaaagagcactgcattaggaactagggtgtctggtttcttatactttcttctccatccctgggcaaatcatctcatccacccagatcaacaattttttctttgttaaaaatataaagattggagtttatgtttactcaagtcctttcttcttttaagttatgactcttactctatatttgaatctgtatatgaacagtgaaacatgttagttggctagttctttctcattcagtcttaatacatttytttcagtttggcagcaaaattgttttccttaacttgcatgcccttccctgttaaaaatatggaaatttagaaatatacattccttacagtgtttcaggaaggtatgtcatattattttggcttagttttaaaaatcacattarcctctaagctatatgcttcttgaagaagtgactgacttatcatctgctctataataaagctgtagagtggtaataaacaggtttctccttttttttatctttctcatacgtgggaaccatactgtattttaatctttaaaataatatatatcctcaatatagttttgcttaaagaaaagatacaaaagattcatatcatacaattgcccagaaccaacttctttatacatctctcttctcaaggtttctactcacaatagctgctagaaatgttcccaatccctcacccaatcccagtgcccctctgatcaattttcttttcccattcctcttcctatattggcttttagtatgttggttatgtatttaataacagagaataataagcacactaatgttctatgtaactggcatcattttttatttttatttgaaaattatcatgtaccaattgagccttttattgaatgataccatatttctcaaagtgctgtgattctttccgttgcatttgatcaagaaaaaattttctgagacaaggtgttgttttggttactattacataattgtctatgagtaaaattggaactcactgtggaataatatgtcataatagctttacttgtaagtgaataataaagtataaacaggaaaattaaagcaaagttatttttagtgtgtgtagtaactccacaagaataaatgtcttatgcatagatatgtaatgcatcatgattgaaacgacaaatatattgtatttatatttctgtgcttggaaacttatggggaaagagattctggaacataaaagcttatttctactagtttcagttggttttgaaaaaacatccttacagtctagatttaaacaaaggaaacttctttcagtaccctgaaggtctgtgatttctctctcacacctaggcattgtcatgctgttctctcccacatccaggccttttcactgatccactcctctcatgtttcctgggaaagcgtttgctaacattaaaggcccaattgaaggcccccctaacccccttggcttctcccattatggtaattatctcagtacactgcaattccctgtttgcttttatatccttataatctctgtgaaggaagctactgtgtctatattgttcaccttaaatccccaaacatattgtctgatgcctaattatgtgtttgtttaatgaatattaaataacaacaaatatcgaaactaagttatcaggtcaccaagaacaaacttaaagaaatataatgtataaatatggctgatttctgtgtgtttcttttctttttttccttgtctcagctcttagagagttaagagtatagagagggaaaggtcaaagaggaggtggatatcttatcaaataaccctgataaatgtagtaagtataagaataaacacattatcaaggttcagtggtggaagaacaagtggtggtcatgtcttttaatagttgtgttggtccttacggccagttctttgttactgtgtgtttcttaaactgaacaattcaaaaaagttaactccactatgtttgaagcaatattggtggcattaaggttagygcatggattcccaagaaagataacttgaggtgacactgtttaacatatakcgattcaattatgttcaatcaacactagtcctcttatctctgrcaagaaggatttcagatcttggataattcaaaaataataatgtgtctgagaggatgcagtaaacggttaggcctcttagtgtcgctgttgaccactcaagaaggagaacgcagctggagaactagtccaccatttccttgctcctaaaatgcaaagaaccagcaaatcagactcagaagatccggggcggctgccaacctcacctcttagtcaaccagctgtttgacctgtgaattaggcccgtaaaagacttcgtttcttgagaaaataagattggagtccgtcgtaggaaactggaaccgaattcagagaaagcgattcaccgaaaaggaaatgaccaattgcctgagtttccgaaatggcagaggactggccctgctgtgcgcgctcctggggacgctgtgcgaaacaggatccggtcagatccgctactcggtgtctgaggagctagataaaggttccttcgtgggcaacatcgctaacgacctggggctagagccccgggagctggcggagcgcggagtccgcatcgtctccagaggtaggacgcagcttttctctctgaatycgcaaagcggcagcttggtcaccgcggagaggatagaccgggaggagctctgcgctcagatcccgctgtgtctggtaaaaattaacattctggttgaggataaattgaaaatttttgaagtagaaatagaaattaaagatattaatgataatgctcctaatttcccaacagaggaattggaaataaaaattggtgaactaacggttcctggaacccgatttccamttaaaactgcttttgacccagatgtaggcattaactccctgcagaactacaagcttagccccaatgactacttytctctggctgtgaatagcgtctctgagggrgccaagtatccagagctggtgctggagcgggccctggaccgtgagaaaaaagaaattcaccagcttgtcctggttgcctctgatggtggcgaccstgtccactctggcaacttgcacatccaagtgatagtcctggatgcaaatgacaacccaccaatgtttactcagcctgagtaccgtgtgagtgtttgggagaacgtgcctgtgggtacccggctgctcacggtgaatgccactgaccctgacgagggattcaatgctcaagtgtcttatattctagataaaatgcctgggaaaatcgctgagattttccatcttaactcagtgagtggagaagtatcaatattaaaaagtctagattatgaggatgccatgttctatgaaattaaaattgaagcacaggatggaccaggtcttctttcaagagccaagattctagtcacggttctggatgtgaatgacaatgctccagaaattacaatcacgtctctcacaagctcagtcccagaagagggcaccgttggaagagaaattgctcttatcgacgtgcatgaccgagattctgggcagaatgggcaggttgaagtttttgtcctgggaaatctgccatttaagttagaaaaatcaatagatcaatattaccgcttagtgacggccacatccctggaccgcgaacaaatatcagaatataacattagtctgagagcctcagatgggggaagcccgccactstccacagaaactcacatcaccctgcatgtgattgacatcaatgacaacccacccaccttccctcatttatcctactccgcctacattccagaaaacaaccccagaggagcctccatcttctcagtgacagcccaggacccagatagcaacaacaacgcccgcatcacttatgcattgaccgaggacactctccagggggcgcccctgtcctccttcgtctctatcaactccaacactggcgtcctatacgcgctgagatccttcgactacgagcaatttagagacttaaagctactggtgacagccagygacagcgggaaccctccactcagcagcaacgtgtckctgaacctrttcstgctggaccagaacgacaacgcgcccgagatcctgtaccccgccctccccacagacggttccactggcgtggagctggcgccycgctccgcagagcccggctacctggtgaccaaggtggtggcggtggacagagactcgggccagaacgcctggctgtcctaccgcctgctcaaggccagcgagccgggactcttctcggtgggtctgcacacgggcgaggtgcgcacggcgcgagccctgctggacagagacgcgctcaagcagagcctcgtggtggccgtccaggaccacggccagccccctctctccgccactgtcacgctcaccgtggccgtggccgacaggatccccgacatcctggccgacctgggcagcctcgagccctccgccaaacccaacgattcggacctcactctgtacctggtggtggcggtggccgcggtctcctgcgtcttcctggccttcgtcwtcgtgctgctggcgctcaggctgcggcgctggcacaagtcacgcctgctgcaggcttcgggaggcggcttggcgagtacgcccggctcgcactttgtgggcgyggacggggttcgggctttcctgcagacctrttcccacgaggtctccctcactgcggactcgcggaagagccacctgattttcccccagcccaacyatgcggacacgctcatcagccaggagagctgtgagaaaagcgagcctcttctgataactcaggatttacttgaaatgaaaggagattccaacctacttcaggtgagtttatttatttctttgattattaagaacaaatatgagaatgtggttattataaagctttaacacatatgtatttgagaaataaagccatgaggttgtcattagtcctttgactaaatatttgtccccctttctttctgggcctatagtaggactgcactccccggtctggttatggttgagtgggcttagggaaaaaataatacatcgtgagtgaaagtaaagtgtcacttcctagaggaatctgccactgtgagaattttcagatctctaagttactatttgaaattgtgactgctccttctacctgggtccttgagtaactatgatgagagaaacacaacactggtttgtatacctgtgataaataggcctttttcattttaaatccctgtgctttggagtttgtcattccaacctgtatagcttatcctgatacatacaagtaaaaatacatatgaataaaagatattttatgcccatgaaattaaatgatgtttgactccttccaagacaggtgacactctttttttctttctccttccttccttcctctctctttcctccttccttccttcctctctctctttcctccttccttccttccttcctctctctctttcctccttccttccttcctctctctctttcctccttccttccttcctctgkttctctctttctttctttctttctttctttctttctttctttctytcttgacagggtcttactctgtctggagtgcagtggcatgatcacggctcactgcagccttgacctcgcagactcaagtgatcctcccacctcagcctcccgagtagctgggactacaggcacgagccaccctcccagctaatttgtttttgtttttgtagagatggggcaattgctatgtttcccaggctggtctgaaattcctgagctcaagtgatctgcccacgtcagcctcccaaagtactgcgattagaggcatgagccaccatgcctggcctgttattcttttcatctcaataacataaaaattggagaacaaaaatgtagaggctgggtgcagtggctcatgctgtaatcccagcactttgggaggcygaggcaggtggatcacttgaagtcaggagttcaagaacaccctggccaacatggtgaaagcctgtctctactaaaaatacaaaaattagctgggcatggtggtgggcgcctgtaatccaagctacttgggaagctgaggcagaagaattgcttaaacccaggaggcagaagttgcagagagccaaaattgggccactgcactccagctggggcaatagagagagactccatctcaaaaaaaaaaaaaaagtagaggctggtcaaatggttttacctatagtgcctgttacatatgcctaawgtatatgcttatgtgtgtattcattttgatttcaacattttgcctgagggtggaaagctcacctagctaaattattatgagccttggagtggtatttcttgtccttgagaaggacatcaaaaacatgtaaaggaatatgtctcagcctctgcgggagatttccagacaatctcttccaacaatggaatagaagtcccttcttttgtcatgttctacaacttycttgagccagaaattgttggcttattctgcaatttatgaaattattttcactcatgaaatcatatgagagttatccaaaattagaccaaaatatgttttattagaactcaaacaaaagaatagattcctccctcaatatattaggaaaargcacatttaaatgtatgagacaacagggccagaacacaaaagctgtaagcagagtaaggtgtattctcactgaaacatggaaatacatcacagaatttaaaaggcccatagccaggggaggacttctgagcctaggactttgagacctacttgggcaacatagcatgaccctgtctcaaaagaaaaaggcacgtaacttttaacatatcatttttagaaaaaaaaatgtttatagtattagtatcactttccctgtaaggagaaaaaaaattaattagctgtgtcaggggaaatttggatgctcaaagataatttctaagaattctatatgaaacatagcctacatatgtgtcatgaaaatacactgagagtatggaacccatacaattccacctacttgtacaggtaatggaaggtctcagacatcccattttcactaaaaaggatttatttttatttttttgaagaatgggcaagaatccactacaacagaaagggaggagaagttcatagtaaaaggaatggaaagtataaaggcatgatgcaaggaaacaagtgaaaaggtatcttaagaaaacagataataggctgtttcgaatagagtatgagtatgggtgagcactgcaaaatagtagaataaattgttgagttggatctcatttggtaatgcatttgaaataaagggatttgctttgaaccaagactggttctaagcctggaactacagaataagttccaaaattgggtgtctaagaactctgaatacctctccaatatttaccagtggtcaagtcaaactcgttttgctcattaatggtataagtcggctggagctgagaattggcattatagagaatgtttttgagacagagtcttgctctgtcacccaggatggacttcagtggcatgatctcaactcactgcaacctctgcctcctgagttaagtgattctgctgcctcaacctcccgagtagctggcgttacaggtacccgccaccatgcctggataatttttattttttttagtagagatggcttgcaccatgttggacaggctagtctcaaactcctgacctcatgtgttcttcccaccttggcctcccaaagtgctgggatcacaggtcactgcacccagcctagagtatttaatatacattcatataaaaaagaagcactggtttcataaaacaaatgtacattatatgagattccacttcataaaagcatgtatgtgtaccccaacactaaattggcccttttaacaaaatatcagactttgtcctacttaactggaaagattatctatattttataaagaagagaaataacataatagtaaggctgtgatttcctcttttttgcaaaaactatttttgaaaagtattactgaattgataacatatatatggagagatttaaaatactagataagggagcttattccaatgaatttacagaaaggtaggtattttagtcaactaaaaatataaataaaaattatcaattcacttatttggatacagcagtcatgccagagtttataaatatagtgaaatcactgaagatttttttttacccccaaaactgaaaaaaatggcagtgtaccttgtgaattttttaaatgaaaaaagaatacgaaatgatgaaggcccttatctgatgatgacaaactagaaaactgaaatgtaaaggggaaaatgtgagtatgtgtttccctccagcaaattaaagacagggtacatagattcaagaggttgcgctttgaggataaaaagctgggccctgtgcagttttccaagacaacctctgggcgccgctgtcgaccaaaaggaagtgaaggcttctcaattctgcaggagcgtcaggcagggtgccttcctgctttgtccggtgcactgagcacagacgctgctcctgttcaccctcgagcgcctaactaataagtcctaagctcaaatcacagaagtccagggtgctgccatttctttttgaaaaacatcccagaggaaagaagctccgcggagagttcctgaaatgcagagagccagagaagccgaaatgatgaaaagtcaggtactgtttcccttcctgctgtctttgttctgcggggccatctcccagcagatccgatacacgattccagaggagctagccaacggctcacgggtggggaaacttgccaaggatctggggctcagtgtccgggagttgccaactcgaaaactgcgggttagtgcagaggattatttcaacgttagtttggagagcggggatttgttagtgaacggtaggatagatcgagagaagatttgcggaaggaaacttgagtgtgcactagaattcgaaacggtcgctgaaaacccaatgaatgttttccacgtggttgttgtaatccaagatattaatgacaatgcaccacgtttcgttgcaaaaggcattgacttagaaatttgtgagtcagccttacccggggtaaaattctctctggattctgctcaagatgcagatgtggaaggcaattcactgaagttatacaccatcaaccccaatcaatacttctctctgtcaacgaaggaaagtcctgatggaaktaaatatccggtattactgctggaaaaacctctagacagggaacatcagagctctcatcgcttaatcctgactgccatggatggcggggacccgcctctaagcggcaccacccatatctggatccgagttacggatgccaatgataatgctcccgtgtttagccaggaggtatacagggttagcctccaagaaaacgtaccgtggggaacctccgtgctgcgggtgatggccacagaccaggatgagggcattaatgcagagatcacctatgccttcctcaattccccaataagtaccagcctcttcaatctcaatccaaatactggcgacatcacaaccaatggcacattggattttgaagagacaagtagatatgtgttgagtgtggaagctaaggatggaggagtacacacagctcactgtaatgttcaaatagaaattgttgacgagaatgacaatgccccagaggtgacattcatgtccttctctaaccagattccagaggattcagaccttggaactgtaatagccctcataaaagtgcgagacaaggattctgggcaaaatggcatggtgacatgctatactcaggaagaagttcctttcaaattagaatccacctcgaagaattattacragctggtgattgctggagccctaaacmgggagcagamagcagactacaacgtcacaatcatagccaccgacaagggcaaaccagccctttcctccaggacaagcatcaccctgcacatctccgacatcaacgacaaygcacctgttttccatcaggcctcctatgtggtccacgtgtctgagaacaacccacctggcgcctccattgcacaagtaagcgcctccgacccggatttgggacccaacggcagagtctcctactctattctggccagtgacctggagccgcgggagctgttgtcctacgtgtccgtgagcccgcagagcggggtggtkttcgcgcagcgcgccttcgaccacgagcagctgcgcgccttcgagctcayrctgcaggccagggaccagggctcccccgcgctcagcgccaacgtgagcctgcgcgtgttggtgggcgacctcaatgacaatgcgccacgggtgctgtaccccgcgctggggcctgatggctccgccctcttcgatatggtgccacgcgccgcagagcccggctacctggtgaccaaggtggtggcggtggacgcagactcaggacacaacgcttggctgtcctaccacgtgctgcaggccagcgagcccgggctcttcagcctggggttgcgcacgggtgaggtgcgcacagcgcgtgccttgggcgacagggacgcggcccgccagcgcctgctggtcgctgtgcgtgatggaggacagccgccactctccgccaccgccacgctgcacctaatcttcgcggatagcctgcaagaggtattgccagacctcagcgaccgccctgagccctctgacccccagacrgaactgcagttttacctggttgtggccttggccttgatctcagtgctctttctcctcgcggtgattctagcgatcgccctgcgcctgcgacgttcctccagcctcgacactgagggctgctttcaaaccggtctctgctccaagtctgggcccggggttcctcccaaccacagcgaggggactttgccctattcctacaatctatgtattgcctctcattctgcaaagacagagtttaattctctcaacctgacaccggaaatggctccccctcaggatctgctgtgtgatgatccttctatggttgtatgtgccagtaatgaagatcacaaaatcgcttatgacccttctttgtcttcgcacgtgagtttctgcaaatctagttaaattttayatatggcggccgggcgcggtggctcaagcctgtaatcccagcacttaaccaggctgaggcaggtggatcacttgaggtcaggagtttgagaccagcatagccaagatggtaaaacccggtctactaaaattacaaaaattagttgggtgtggtggcacgcgcctgtagtcccagttactcaggaagctgagacaggaggatcgcttgagcccgggaggtggagattgtagtgagccaagagtgtgccactgcactccagcctgggtgatggragggaaactgtctaaaaaaacaaacaaacaaaaattatatattgcattttcttctcattggtgtataagtaattytgattttctttcattgttctagtgatggtatctactgcgggagggggtactagatagatggagattgctttcttgattgctcagtagtcttggcaatttaattttcaatctttactgttggcatttctgtatggttggcaaatcttgctaaagagacctgtttcctagatgttaacacttagtaatagcagtgccttttcttagttgatatgcaatactatattttcaagtcattttattcttagctctttataaatgtatttagagttcttcccacccaagttaaagttcatcaattacattaattatgtaattgatgtaattatgtattaatgtaattatgtaattaatgtaatcttcatcaattacattctagtttgtctttttgcagcaacatgtatgtttaatacagccttccaattattaagactcttaacactttgtctcatcacaagtagcaaatattgtccaattttatatttgcatcactaactttgagtcaatattattcccactctataatttcagtcaatgatatttcataattttcttaaccattcctaaattatttgttyttatgctctttctattttgtctctattaaaacaaagaatgtaatgaacatttgggtttataaagcrttttccatacttcttgtttctttagtgtagatttctgaggaattagttaaatctataaacatgttgagatttttttaatgcatactgtcaaatttatttccaaacatcttatttcacctctcaatcatccgcagtttgtgcggtctttgaggattgtgaaaaacacgtttaatctactctctcaaagtctgagggtttttaaattctgtatagctaatgcccttttgtatgagtcatttctactgctaattgttaagtgaggaataagcttaagaactgatgtactgctttatctcaaattttcacagattagtaaattactgtaagtattcataagaaagaaagcgatggcacatgcaatgataatccatgttcggctaccaaaacatttccttttactggctatttctaaaatgagagctaaagtaaagttagaaattgtaaaataatactgaatgtgtcatgtgaaaaaatcactaaactattatctgcactttatagttattcagtctaacttttctttttatttcttttttatttttaagatcagagttatttacccattgttttaggctttgcatttgaactggtcattcatgaaacattgaaaggtttcataaaarttactactctatgaaaggtattgttctaaagattgagaacacattgtgaacaagatagtcatatgcatagcttgtggccaagaatctactgtacacaaaattaaggagcaaattctcttcccaaacctattatcctatttgtcaatctcatttgtacagggtaaggctaactcttgaacagtaggtgagttttttgcaagggaattgaagcattgccccaggttctagagggtcaactcctgtgaggaaacttgttactgcataaattgggactaaagccagacctccaagttcctgtcccactgtcttttcacttatctgtctcatccatttttcaagtccacctttgtctttaggagagataattatgtccctcacacaatacgctatactgagaatgggctgtggggatgaacaatgtgaaaactgaaaagaggaagaacacatcttaggaaaaaaatcgtcatattttctctaagaaaataaataacttcataaagtttattgtacaggaagacttggatcattcttgaattttcattgcaaatcaaaaacaggaatttgactttattatcttgggagaaataggaatagaaaagtrtataaaaaataaactttttttaaccaagaataaattgcagtaacaggttaagactctgggtgtcgctgttcaccaatcagggggaaaagacaaaccagaaatttaatcagaatcacaagatttctgcagcacaaagcactggctctggagctttatgaaagcttcaagcggaagccctgagagctctggctgtgaatgcactttattttggacccagaagatcctggggctcctcaggcctcgacagagggaaaaccgaagcacaggcgactccgcggcggggttgtaatggcggcgcctcctgctcgcccagaccacacccggctgctccagatctgccttctcctgggggttctggtggaaatcagggccgaacagattctctactcggtgtttgaggagcaggaagaaggctcagtggtgggcaacatcgccaaggacctggggttggcgccccgggagctggcggagcgcggagtccgcatcgtctccagaggtaggacgcagcttttcgccctgaacccgcgcagcggcaccttggtcaccgcgggtaggatagacagggaggagctctgcgacagatctccaaactgtgtgacaaacctggagattcttctagaagatacagtgaagattttgcgggtagaggtggaaataatcgatgttaatgataacccacccagttttgggacagaacagagggaaataaaagttgctgaaaatgaaaatcctgggrcaagatttcctcttcctgaagcttttgatccggatgtaggtgtaaactccctgcagggttaccagctcaactcaaacggttacttttccctggacgtgcaaagtggggccgatgggattamgtacccagagctggtgctggaacgcgctctagatcgcgaggaagaggcggttcaccacctcgttctcacggccttcgatggaggtgacccggttcgctctggcactgccaggattctcataatacttgtggataccaacgataatgctcccgtgttcactcakcccgagtaccacgtaagtgttcgtgagaacgttcctgtaggcactcggctactcaccgtaaaagccactgatccagatgaaggagccaatggagacgtgacgtattctttccggaaagtaagagacaaaatatcacagctatttcagttgaattctctgagtggggatataacaatattggggggtctagattatgaggactctggattctatgacatagatgtagaagcccatgatgggcctggtctccgagctagaagcaaggtactggtgacagttctggatgaaaatgacaacgcaccagaagtcacagttacatctctcaccagctcagtccaggaatcttcttccccgggtacagtaattgcacttttcaacgtgcatgacagtgactcaggaggaaatggcctagtcacatgttctattccagataatctgccattcacacttgaaaagacctatggaaattattatcggttgttgacacacagaacactggacagggaagaagtctcagaatataacatcactgtaactgccactgaccagggaactcctccactgtctacagaaactcatatttcactgcaagtgatggacatcaatgacaacccacccactttccctcatgcttcctactctgcttrcattcstgaaaacaaccccagaggagcctccatcttatctatgactgctcaagaccctgacagtggtgacaatgcccgaatcacttactccctggccgaagacaccttccagggtgcacctctgtcctcctatgtctccatcaactccaatacagggatcctatatgctctttgctccttcgactatgagcagtttagagacctgcagctgctgatgacagccagtgacagtggagaccctccactcagcagcaatgtgtcactgagcctctttgtgctggaccagaacgacaatgtccctgagatcctgtaccccaccttccctackgatggctccactggtgtggagctggcaccccgctccgcagattccggctacctggtgaccaaagtggtggcagtggacagagactcaggtcagaatgcctggctgtcctacagcctactcaagtccagcgagccgggactatttgcagtggggctgcacacaggcgaggtgcgcaccgcacgggccctgctggacagagacgcgctcaagcagargcttgtagtggtcgtccaggaccatggccagccccctctctcggccaccgtcacactcactgtggctgtggccgacagcatcccagatgtcctggctgacttgggcagcctcaagccttcagcasacccagacgactcgggcctcacactctatctcgtggtggcagtggccgctgtctcctgcgtcttcctggcttttgtcacggtgctgctagcactcaagctgagacgctggcacaagtcacgcctgcttcacgctgaaggcagcaggttggcaggtgtgccygcctcgcactttgtgggcgtggacggggttcgggctttcctgcagacctattcccacgaggtctccctcaccgcrgactcgcggaagagtcacctgatcttctcccaacccagctatgcagacacgctcatcagccgsgagagttgtgagaaaagcgagcctcttctgataactcaggatttacttgaaacaaaaggagaccctaatcttcaggtgagtcaatcttataatagatcataccacactgaaatatagacaaagagttgtgtaaatgtctctcattttatatgtaatatatcaaataaagttgcctcttttaatattttattgctttaaagaaaactggtggatgaccttccaataatgatcaacagtatttaccacacaaaaatgttgtttattacttatcctttttggtcttcattcagttgtagtttcagccagaattttctaattttacaactctgagccacctcatttccttaaatttccttttctgtgctgggtgtggtggctcacacctgtaatcctaacactttgggagtgtgaggaggayggattgcctgagctcaggagttcgagaccagtctgggcaacatggtgaaacccagtctctactaaaatacaaaaagttagctaggcgtggtggtgtgtgcccgtagtcccagctaccctggaggctgaggcatgagaattgcttgaacctgggaggcagaggttgcaatgagctgagatcatgacactgtactccagcctgggcaacagagcaagcctctgtctccaaaaagtaaaataaaataaagtaaaataaagaataaatttccttttctcttaggtgttcctgaaaagatacaagagacctgtaaaatagaaggcaattgtgtaaattcacatttacaatattctttctcatgaagctattgttggatctggactgagggttttttaatttcctattttcacactctaccatgctttgcttgaagtttacttttccttccttgaaagggtattttccattataacaggcaacgtcaatttaagaatactggcaatttgtgagtttaacttttagatataactttaacaggatattttctcaatgaactggtatatttcaaatattttcttgttgctgttctgagatgcaccagaagtgactatgtgtgattcctctggtgcactcctgtgattatgagaaatatttccaagctaatttcagtcatatataagtagattctaggagtaactttaataatttttaaattgcttatcatgacatcactattgagactttcttgatttccaaggaaaatataagtttttggagtcttttctcttgtcatcatgtgagcctctttcaaaggttgagttamttgggttctggactgatatgatttacgctgcttagtaaggtggcctcatccctattgctacaaattgctttcagatatttctgtcatcatgtggctctgggwttattttatatgagggaaaatattttgtgtgtaggggatatacaacacttttgttctttgtgctttcatttaggttctgtgagaattcaaaattcatgaatgcatatgcttacacaaattagtgtaatttgataactggaagttgtagtgatagactgtggaatatgcctcaatttgacttacaaaggagagttttagtttctacatggttttgtattcatagaaagttgtggtgcaatacatagagtaagctggaatatgatatgatgcagttacctggcttggggagcagaaagcagaaataacaagtgaatgttgagagacaacttacatctgaggagagattgtttaaagtaattaagccataaaatataatttggaaatgctcaattggtctgaaactgtgtcaagcatattcaggtgttggcattaggaatatattccagaatgagagtgccacatgttttaaaggcctaggaaagcagtagataatttataacctaaaatcaaattttttaaaaaatgtgtttttgttagaatgggcagtgggtttcttttagcaaataacaattttgattaaacaaattgttgtatattcatattacggactactagataactatattatgggccactagataactataagaaataaataggaaagctctctatgtactgatatgatctttaagatataacaactaaaaaagcaatgtgcagaatatggtatgttgtatgcttacatttgtgtaaagaaggagacagaatatttataaaaatccgttgccctatacaagacatatctccrgaaggatacctaagaaactttaacactcatttcccctgtgaaagcatttctcctcatctaaagcagagatgaaaggaagaacctatgctgaatgcatcttttgaatttggaactatatgaatatttcacatattttaaaacaaatgaagactttataaattaaaaaagaaaagaaaagaaaaaagttcttagcaaatattgacaagccattagtgcagtttcctgagaaaacctctgagcgtcgctgttggtcaaaagaacgaagagaagcgtttgggagcctcttagaggggaacttcctgcacaaaccaaccacacagagaaggccagtatagattcggaaacagaaaacaaaagcaggaaaagtgaccttagcccggattctgccatccccggaaggcttattcctcctatgggcaaaggagcaaagggagccagaagatgaaagcgagctcagggaggtgcgggctggtgcggtggctgcaggtactgttgcccttcctgttgtctttgttccscggggctctcccagtccagatccgctattcaattccagaggagctggccaaaaactcggtcgtaggaaacctcgccaaggatctggggctcagcrtccgggacttgccagcccggaagctgcgggttagcgcggagaaggaatatttcacagtaaacccagaaagcggagacttacttgtgagtgacagaatagaccgagaacagatatgcgggaagcagcctctgtgtgttctggatttcgatactgtcgctgaaaatccactaaatattttctacatarcagtaattgtgcaggatataaatgataataccccgctattcaaacagactaagattaatttaaaaattggcgaatccactaagccaggtacaacatttccacttgacccagccctggattcagatgttggtcctaactcactacaaagataccaccttaatgacaacgagtactttgatctcgctgagaaacagactccagatggtcgtaaatatcctgagttgattctaaaacactctctggacagagaagagcacagtttacatcaattggtcctcacagctgtggatggcggagacccacctcaaagtggcacgacccaaatccgaatcaaagtcacggatgccaacgataaccctccagtgttcagccaggacgtgtacagggtcaccctgagggaggacgtgccgccgggcttctttgtgcttcaagtgacagccaccgaccgggatgaaggcataaacgcagagatcacctactcctttcataatgtggacgaacaagtgaaacactttttcaacttaaatgaaaaaacaggagaaatcacgacaaaggatgatttggattttgagattgcaagtagttacactctgagtatcgaagcaaaagatcctggagatctagcagcccactgcagtatccaagttgaaattcttgatgacaacgattgtgcacctgaagttattgtgacttcagtatctactcccctaccggaggattcgccaccaggaacagtgatcgccttgataaaaacgagagacagagactctggagaaaatggagaagtttactgccaagtgttgggaaatgccaagtttattttgaaatcttcctcaaagaactattacaaactagtgwcagacggcgctctggaccgggaggagatcccagaatacaatctcaccatcacagccaccgacgggggcaagccgcccctctcctccagcataattgtcaccctgcacatctccgacgtcaacgataatgccccagttttccaacagacttcctacatggttcacgtggcagagaacaatcctcctggcgcctctatcgctcaaatcagtgcctctgaccctgacttgggccccagtggccaagtttcctactccatcgtagcgagcgacctgaagccgcgggagattttatcctacgtgtccgtgagcgcgcaragcggggtggtgttcgcgcagcgcgccttcgatcatgagcagctgcgcgccttcgagctcacactgcaggcycgcgaccagggctcgcccgcgctcagcgccaacgtgagcctgcgcgtgttagtgggcgacctcaatgacaatgcgccacgggtgctgtaccccgcgctggggcctgatggctccgccctcttcgatatggtgccacgcgccgcagagcccggctacctggtgaccaaggtggtggcggtggacgcagactcaggacacaacgcttggctgtcctaccacgtgctgcaggccagcgagcccgggctcttcagcctggggttgcgcacgggtgaggtgcgcacagcgcgtgccttgggcgacagggacgcggcccgccagcgcctgctggtcgctgtgcgtgatggaggacagccgccactctccgctacggccacgctgcacctaatcttcgcggatagcctgcaagaggtattgccagacctcagcgaccgccsggagccctctgacccccaggcaraactgcagttttacctggttgtggccttggccttgatctcagtgctcttcttcctcgcggtgattctggcaatctccctgcgcctgcgactctcttccaggtcagatgcttgggactgttttcagcctggtctcagctccaagcctggacctggggttctccccaattacagtgagggtacattgccctattcctacaacctgtgtgttgcctcacaatcagccaagacagagttcaattttctgaacataaccccggaattggttcccgcgcaagatctcgtctgtgacaatgcctcttgggaacaaaatacaaatcatggagccgctggggtcccttttgcctcagatactattttgaaggtgagctttaattaatttattttcacttctgkttttattgtttcacctaatttgggtaggaagttccactgcgtatttctttgtctgtgagttagatttggccaatgttgtgccttaattgtcttaatcttatctaactgaattttaagtgttttctctctgaagtgtgagatttatttacccatgattgcaaacctttatcacatgagatattgcactgtatttctttttcttcctcatctttacattacttctctctgcagatttgttgctattgagactttaggcaattagtttcaccttcaggctctttgttattcaaattttagttttacttcctcttagaatcataatacttcagagtaaagagagtcttcattttagtaggctttggaaattgggaaacaaagaagaaagacttttgcataatggcatggcttgttaatcacagggcatgggtaggacattgtcccattgacttgaagaccaacactcagtaagctaaatgtcttggaatcacaaatgtatttctaaaggacaggcaatgtttgaggtctgaggtgtctgctagaaagagtgcatttaacaaatgtgagaaatcattctctaacatgcattttaacaaaytgctcttaagaaaaactacacattgagaaaaatcttacaacctatgttcacatcattttctacaaaatattacttaaaactttgcttttgaatttcctaattatatagaatttttattttcttagttttctatgaaagtgttattaaataaaatgactttctgaaatgtccatttttttcaatcaagaggtttttctatttctgttgtcatataaagatgatagcagtaaatatctgtctcaacatagaaaggtcactcagtacttctcgacaagtatctgctcatgctttcctgcatggatgatgaaataaaaccccatcctccacagttactatactggttgtcactggaactacaaatatttgaacatggtaatagaaaaacataaaaatgcatagttaacccaactcaaacgctgtctgagatagtggagagactttctcaaagtcctcacaagtaacaaagatctttatttcttctgcatatgacagctaatataacttacataaatcagtaggcctgtttggaaaggtgcatggagaactgggtttgtttccttggtattcttatatgcaaataagcacgttttcctaaatttatcctaataaggagatgaaatcttgaatcctacaaaggtaagaatttgaatgtcctaatttaatggactaaatatagataagaggtaaataaaggacataggctcccccgatgacgcattaaataaaatttttgtaaggtattgagatctaataatcatattgatctcagggattgtggaagtcttgctattcagaattaaagctgaattaacggtcataaacaacgctacacagttaaacattaaggatatggcaacattattagaaataaaattataactaaacttaggagaaataaaaatggaatttgrtgcagtcactggttaggactctgagtgtcgctgttgaccaaagtgggaaagaagctgccgcagaggcgacccgactctgctccctccatactaaacacacagaccagacaagctcctacgaaaagccaacgctccacgcccattttcgtcagggaatatgtacccatcggctttagataaataaggaaacagcaggctgaaccagaactaagagaaaattgggcagagagaaggcaatggcgagtccacctaggggctggggctgcggagagctgctgctgcccttcatgctcctggggacgctgtgcgagccaggatccgggcagatccgctactcgatgccggaggagctggacaaaggctccttcgtcggcaacatagccaaggaccttgggctggagccccaggagctggcggagcgcggagtccgcatcgtctccagaggtaggacscagctttttgccctgaacccgcgaagcggcagcttggtcaccgcgggcaggatagaccgggaggagctctgcgctcagagcccactgtgtgtggtgaactttaacatcttggttgagaacaaaatgaaaatttatggagtagaagtagaaataatcgatattaatgataacttcccgcgtttccgggatgaagagttaaaagtaaaagttaatgaaaatgcggctgcagggacacggttagtgcttcccttcgcgcgggatgcggatgtgggtgtgaactcyctccggagttaccagctcagctccaatctgcacttctctctggatgtggtaagcggaactgatggacaaaagtatccggagctggtgttggaacagcccctagaccgcgagaaagagactgttcacgacctcctcctcacagctttagatggcggagacccggtactctccggcaccacgcacatccgtgttacggtcctcgacgcaaacgacaatgcgcccctgttcaccccatccgagtacagcgtgagtgttccagagaacatacctgtgggcactcggctgctcatgctaaccgccacggatccagatgagggaataaacgggaaattgacctactcttttcgcaatgaagaagaaaaaatttcggagactttccaayttgattccaacctgggggaaatctcaactctacaatcactggactatgaagaatccagattctacctcatggaagtggtagctcaggatggaggcgctcttgttgccagcgctaaggtggtggtcacagtacaggacgtgaatgacaatgcccccgaagtgatcctcacctctctgaccagttcgatctctgaagactgtcttcccggaactgtaatcgcgctgtttagcgtacatgatggtgattctggagaaaatggtgagattgcatgctctattcctaggaatttgccttttaaattggagaagtcagttgataattactaycacctattaacaactagggacctggacagagaagagacttcagattataatatcactttaaccgtcatggaccatggaaccccgcccctctctacagaaagccacatccccttgaaagtagcagacgttaatgacaacccacccaatttccctcaagcctcctactccacctctgtcacagaaaacaatcccagaggtgtctctatcttctctgtgacagcccatgaccycgacagcggcgacaacgctcgagtcacctactccctggctgaagacacatttcagggggcgcccttgtcctcctatgtatccattaactctgacaccggtgtcctgtatgctctgagatccttcgactatgagcagttgagagacctacagttgtgggtgacagccagcgacagtgggaaccctccacttagcagcaacgtgtcgctgagcctgtttgtgctggaccagaacgacaatacgcctgagatcctgtaccccgccctccccacagacggttccacgggcgtggagctggcgccycgctccgcagaacctggctacctggtgaccaaggtggtagcggtggacaaagattcaggccagaacgcctggctgtcctaccgcctgcttaaggccagcgagccaggactctttgcggttgggctgcacacgggcgaggtgcgcacagcgcgagccctgctggacagagacgcgctcaagcagagcctcgtggtggccgtcgaagaccatggccagccccctctgtcagccaccttcacggtcaccgttgccgtggccgacaggatccctgacatcctggctgacctaggcagtatcaagacccccattgaccctgaggatctggacctcacactctatcttgtggtggcagtggctgcagtctcctgcgtcttcctggccttcgtcatcgtgctgctggtgctcagactgaggcgctggcacaagtcacgcctgcttcaggctgaaggcagcaggttggcgggtgtgcccgcctcgcactttgtgggcgtggatggggttcgggctttcctgcagacctattcccacgaggtctccctcaccgcggactcgaggaagagtcacctgatctttccccagcccaactacgcagacacgctccttagtgaagagagctgtgagaaaagcgagcctcttctgatgtctgataaggtagatgcaaacaaagaagaacggcgagttcaggttagttttctctttcggtaaggatgaccagaacattttcatttgtttcctttttcatgtttctgtcatattcagaatcagctagttatgtaaatagtggaacattatttgctgtattggagattaattttttttatataattcatgctttctccatttgttttcaaattctgttttgggaagtctagctgatatctgtagacttaagtgaaacaaataccttaaaggaaagtggttaaatataatcattttacccaaatattttgttatattggaactgcagttctattaatagaaaagatgttttatttattcaaattgttagatatattgttctcttttgagtgtctgcctagacaccattagtgaatgtgttttggaaaggataatgtayaggactgatattttagtctacctgaaatttgtttaaggaaataatttacagtatttacataaatcagtggaaaggtacagagaacttctgggtcataaatatcagaaaagaggccgggtgcggtggctgacgcctgtaatcccagcactttgggaggctgaggtgggcggatcacgaggtcaggagatcgagaccatcctggctaacacggtgaaaccctgttctactaaaaatacaaaaaattagccgggcgtggtggcaggcgcctgtagtcccagctactcggaaggctgaggcaggagaatggggtgaacccgggaggaggagcttgcagtaagccgagatcgcgccactgcactccagcctgggagacagaacgagactccgtctcaaaataaataaataaataaataaataaataaataaatwtcagaaaagtagataaaatttatattaatgataacatgtagcattctaaagtctggaaagtttgtgttaagccatgtagttattggatatgtgggcttgttgagagaagaaatcagtgtaaaggaaccttaaggttgggcttcgttctgtgatgtaaagcctccagagagttacatactgctgcactcaataaatgtaaatatgtcacacacctggcatcttctgttatagataaaccctttacttattagaatcaatacctactgcaatgttagcgtttctttaagtgtaggtgcaattcttctttattacttgagtttaaggttgtatttgaaaaaaaaagaactcaacttaaagatggttcaaaattttaaatttcatatctaacgtatgtgctcatcttaaattaatagatttgtcttaatgaaatactggcctatgtgcctcaaattccaggaggatgtgttatgtaatgaaagaactactatatttcccttctgcatctgatttgctgaagatgattttcagatgtttcttattaaaatattcttaatccttcaaattttgtacttttaaaaccttgagcatcagcttcaaataatgactaaataaggggaaaaggtaataaaatattacaaatgggatagtaagctacattactcaaccacatgaaaggttaattgacacattaaagaacctaagaccacttgatttttattttttaaacactgttaaagagcattcaagtatatctatatctatatacatatacacacacatatatatacacacatatatatacacacatacacacacacaaacacacatacatacacacatggacattctgaccaaaatgtaaaatgtacaaactcaccgaatagtgaatgcatccaaagagtaacaagagaatctatacagtaggtgtcgacattattcactcctatgtgaaaacttgcttttcmattttttttaaaagaaaatgttatatgcttcttagggtaaggtgtttgggaaaaaagtaaaggttatagatttgggtacatttcttctgagttaaatgttttgtgcaatggaaaaatatctttaaaccctctataaactactaacagactataaaatgcttgatccatacattttgaatgtatgtactgtatataccatatacttttaaatatctgaatctttagttttatatgtgttctgaagaataatttttcatactaattgaagtgttcatacaatgaacacttggcattgtgttggaaggcacttgctttggaatgttttggagcaaagtcttgagtcagttatatttttgatgtttgtataaaggtgacaatgagtgtctgtctagaattctggttactgtgagtagtttaagatgctataatgcttttccactataaggtgaattcggtgtggaactcattgcttattgctgcacacttgcctagttttagagtaacaatacattatgtaggctaaagataatttctttaggaagattttctggtttgaaaatggaattaaaactgtaagacacctgtcagaaacatggaaaatggcatgttattgaccagggaaaagtgtaaataacaaaaagttaggattatcagatggtaaactggggaccaaggaaaagtggacaggaagattacttatataattaaataatataattataaggacttacaattcactccccaatcctaataacgcatcattgttaggctacttgagaagaaacagtacatttcaggacaattgtgatgtagtatgaaaaaacatcctttgtaaaagtttttcatttgggccagggtggttcatgactataatcccagcaatttgggacgctgaggtgggaggattgcttaaagccaggtgttctagcccagcctgggcaacatagtgaaaccccacctctatagaaaaaaaaagttttcaatcatacttatttaattaaaagtagacacttggaaacaaaggaaaagagacyctcttgctttttactatacttctattttataaggtcaatcatttcctcattacctttaacttcttttggggggagataataaagataaaagaraagaaagtgaaacatagaataaaactaaaagctatgacattataacttttagaagttagaagtaaaggaaatagaatgcaataagaatacacrtgaagctgatatttcaagcctctttatactacgtcttctgccatcaccaaaaatagcttccatttgtatgattttctatgtattattttatttggccctcatttctactagagtaagcagagaagatattattatgaccattttatgaaaatggaaactaaaaacgtgacgggattgagcaagattatctctgccctttgacaagtaaaaggtacttgatttggatggataaagctcaaattaaaagaaataacagactaaagatatagtaagtatatttaatgttttttaaaagtccttttaaaatgggaagaaagtaycactatcagtacactgccgatttttctcctaactagctccttatttggagctgatttagtcaccattactgcagttctgcagcagaggcgccgggtgccgctcttggctagtgctgtgcaaaatattggctcctcccgctgcagccagctcggaagaaaagtgcactctctatcaggcttcctgcagcggagacacccattagagaacccaagcacaaagacaaagcaaatagttggtcctgctcggagaactcttgggattatttaaagatctcctctcctcggatttagaaaggcaaaggcgcagaragcgggatgggaaatagctccggatggargggcccagcagggcagaggcgaatgctatttctctwcctgctctctttgttagaccaggytctctccgaaccgatccgctacgctattcccgaggagctggacaggggctcgctggtagggaacctcgccaaggacctggggtttggcgtgggggatttacctactaggaacctgcgggttattgcagagaagaaattctttaccgtgagccccgaaaatgggaacttacttgtgagcgaccgtatagaccgagaggagatttgtggcaagaagtcgacgtgtgttctggaatttgaaatggttgctgaaawgcctttaaacttttttcatgtaactgtgctgatccaggatattaacgacaacccaccgacctttagccaaaatatcactgagctggaaatcagcgaactggctctcactggagccacatttgccctggaatctgcgcaagatcctgatgtaggtgtcaattcgstgcagcagtactacctcagccctgatccgcacttctctttgattcagaaggagaacytggatggcagtaggtacccagagctagtactgaaagcacccctggacagggaagagcagccacatcaccacctggtcctyacagctgtggatgggggcgagccctccagaagctgtaccacccagatcagggtaattgtcgcagatgcaaatgataaccccccagtatttactcaggacatgtacagggtcaatgttgcagagaacctgcccgctggctcctccgtattaaaagtgatggccattgacatggatgagggcatcaatgccgaaatcatctatgccttcatcaatattggcaaggaagtgagacaactgttcaagctggacagtaaaacgggggaactcaccactattggagaactggactttgaagagagagatagctacacaattggggtggaagcaaaggatggtggacatcacactgcatattgtaaagtacagatagatatttcagatgaaaatgacaatgccccggagataaccctggcttctgaatcccaacatatacaagaagatgctgagctggggactgccgttgccctgatcaaaacacatgatctagattctggatttaatggagaaatcctatgccaactaaaaggaaasttcccctttaaaatcgttcaagataccaaaaacacatacaggttggtgacagatggagccctggaccgggagcagatcccagaatacaatgtgacgatcacagctaccgacaaaggcaatccaccgctctcctccagcaagaccatcactctgcacatccttgatgtcaacgacaacgttcccgttttccaccaggcctcctacaccgtgcatgtagctgagaacaatcckcctggagcctccattgcgcatgtcagagcytcggatcccgacttgggacctaatggccttgtctcctactacatcgtggccagtgacctggagccgcgggagctgtcgtcctacgtgtccgtgagcgcgcggagcggggtggtgttcgcgcagcgagccttcgaccacgagcagctgcgtgccttcgagctcactctgcaggcccgcgaccagggctcgcctacgctcagcgccaacgtgagcctgcgcgtgttggtggacgaccgcaacgacaatgcaccgctggtgctgtacccagctctggggcccgaaggctctgcgctcttcgatatggtgmcgcgctctgcagagcctggctacctggtgaccaaggtggtggcggtggacgcagactcgggatacaacgcctggctgtcctaccacattgtgcaggccagcgagcccgggctgttcagcctgggcctgcgcacgggtgaggtgcgcacggcgcgtaycttgggcgacagkgaggccgcccgccagcgcctgctggtcactgtgcgtgatggaggacagcagcctctttcagccaccgtcatgctgcacctaatcttcgcagatagcttgcaagagatacaacctgaccttagcgaccgccccactccctctgaccctcaggcggagctacagtttcacctagtagtggcgttggccttgatctcagtgctcttcctcctcgcggtgattctggcaatctccctgcgcctgcgatgctcctccagacccgccactgagggctactttcagcctggtgtctgcttcaagactgtacctggagttctccccacctacagcgaaaggactttgccttattcctacaatccgtgtgctgcctcacattcctcaaacaccgagtttaaatttctcaatataaaggctgaaaatgctgcaccacaagatcttctatgtgatgaagcctcttggtttgaaagtaatgacaatccagaaatgccttctaattcaggcaatttgcaaaaggtgagtttcttcaaacctttccttccataaatataattgggtttcaattcattgatttagagataaaaagaatacagattaaatattccctgattacattattttattgattttctggtgtaragtagggtgtctaggaaattctttgtagaatttcctgtagaatatctgtgttgcagttgttctttcatagaaagcctccttttgatagtcttgaaacttttcttaatcctaatacactataatctgaaacatttttaatacagtattatctcacactgtcattttcagacatatctatccagaattagacccaaatcctcacaattaagtggtttacttagttttaatgcagtcaatcctaaaatatatgaaacattatgtatatcttaacacatttttaatgtaacctgtatataatatttttacttccctttgcatgtttttaaaagtatacacagatgttgcctatgtcagggcagtttttaacttctatgctaatcaaaagaaataatggcatctaaaatggcaactcttgtaatgggcactgtaatgaattggttcaaaatgtgtttgtgtagcatatgcctgtagtcccagctactcgggaggctgaggtgggaggatccyttgatcccaggaggtagcagctgcaatgagctataattgtgcccctgcactctagcctgggagacagagcgagactttgtctccaaaaaagtgtttgtggttgttggtacccttactgaaaatgggactagcataaatggtggtgaaatgtgatgataattcaaaatttacagaagattgtaatattatttctgttccccaaggtcctaagagatattttcataaaaatgaatggtaarcttcagagaacatttaaaattattcaaaataatctcttacactcttctaaatgcttcattatcttsgggagggaaatattatgagtgtcatctctgcagatttagcagaaataaaatcctctgtgtgatagtttcacaaaacgatgcagtattaagttaggactctaagcgtcgctgttgaccaacctgggcaagaaaatcaacggaaactcaagttacatcctccaacaacaaagcaaattagacgggaaagcaggaaagctgtgcagaaattctgacctgaaacgcttcgcatccggtctctgcttgttgaaggaccttcaccgctatttctgagaagagcaaaagtgatgcagatctgttcttcctcttcttaatcccagagaagttcctaataagccagtaatggcgcctccgcagaggcatccgcagcgcagcgagcaggtcctgctcctcacgctcctggggacgctgtggggggccgcggcagcgcagatccgctactctattcccgaggagctggagaaaggctccttcgtaggcaacatcgtcaaggatctgggactggagccccaggagttggcggagcacggagtmcgcatcgtctccagaggtaggatgcagcttttctctctgaatccgcgaaacggcagcttggtcaccgcgggtaggatagaccgcgaggagctctgtgctcagagcccgcggtgtctggtgagttttaacatccttgtcgaggataaactgaatctttatcccgtggaagtggaaatagtggacattaatgacaatacaccccgattcttaaaggaagaattggaagtgaaaattctcgaaaacgcagctccatcctctcgttttccactaatggaggtctatgaccctgatgtgggaatgaactcccttcagggatttaagctcagtggtaatagtcacttctcagtggacgtgcaaagcgaagcccatgggcccaagtacccggagctggtgctggagggcacactggaccgggaaggagaagccgtttaccgcctggtccttactgccatggatggcggcgaccctgtccgctcaagcgtcgcccaaattctggtaacagttctagatgtgaatgacaacactccaatgtttactcagcctgtctacmgtgtaagtgttcctgaaaacctgccagtaggcacaccagtgttggcagtgactgccaccgaccaggatgaaggagtccacggggaagtaacttattcctttgtgaagattacagaaaagatctcacaaattttctgtttgaatgttttgactggagaaatttcaacttctgcaaatctagactatgaggactcgagtttttatgagctgggtgttgaagcccgggatgggccaggtcttcgagacagagcgaaagtcttaataactatcttggatgtcaatgataatgtaccagaagtggttgttacatctggaagcagaacaattgctgaaagtgcacctccaggaacagtaatcgccctttttcaagtgttcgatcgagactctggcctgaatggcctggtaacctgttccatcccgagaagtctcccatttgaattggaaaaatcagttggcaattattatcgattagtgacaaatgcagctctagaccgggaagaggtattcttgtacaacatcactgtgacagccacggacaaaggaacaccacctctgtctacagaaacaatcatctctctaaatgtggyagacaccaacgacaacccgcccaccttcccccattcatcctactcagtctatgtccttgaaaacaaccccaggggtgcctccatcttctctgtgaatgcactggaccctgacgtggaccagaacgcccaagtctcctactcactggcagaagacaccctccagggggcgcccctgtcctcctacgtgtccatcaactccgacactgggattctgtacgccctgcgctccttcgactatgagcagttgagagacctacagctgtgggtgacagccagcgacasckgggacccgcctcttagcagcaacgtgtcactgagcctgtttgtgctggaccagaatgacaatgcgcccgagatcctgtaccccgccctccccacagacggttccactggcgtggagctggcgccycgctccgcagagcccggctacctggtgaccaaggtggtggcggtggacagagactcgggccagaacgcctggctgtcctaccgcctgctcaaggccagcgagccaggrcttttctcagtgggcctgcacacgggcgaggtgcgcacggcgcgcgccctgctggacagagacgcgctcaagcagagcctagtggtggccgtccaggaccacggccagccccctctctccgccactgtcacgctcaccgtggccgtggccgacaggatccccgacatcctggccgacctgggcagcctcgagccctccgccaaacccaacgattcggacctcactctgtacctggtggtggcggtggccgcggtctcctgcgtcttcctggccttcgtcatygtgctgctggcgctcagactgcrgcgctggcacaagtcacgcctgctgcaggcttcgggaggtggmttagcgagcatgcccggctcgcactttgtgggcgtggaaggggttcgggctttcctgmagacctattcccacgaggtctcactcactgcagactcgcgtaagagtcatctgattttcccccagcccaactatgccgacacgcttatcaaccaggagagctatgagaaaagcgagcctcttctgataactcaggatttacttgaaacgaaaggagaacccaggcaacttcaggtgagtttctttccgcctaagcgggaagagtaatctgatcttcccgcaacccaactaatcagacaggctcatcagctagatcggctgttatagaagcgaacctcttttggtacaggaagattcgtgattttgtaaagtggaagactcccttgttcaggtgagggtatcgtttttttttttttttttttttgagacggagtctcgctctgtcgcccaggccggactgcggactgcagtggcgcaatctcggctcactgcaagctccgcttcccgggttcacgccattctcctgcctcagcctccctagtagctgggactacaggcgcccgccaccgcgcccggctaatttttttgtatttttagtagagacggggtttcaccttgttagccaggatggtctcgatctcctgacctcatgatccacccgcctcggcctcccaaagtgctgggattacaggcgtgagccaccgcgcccggccgagggtatcgtttttattggttgacaggaaaattcaagattgtctttgattagtgcttagttttcttagccctttgcagagagtcacataattctaatgtttttcttttatatcraaagaatgttctgaagtcttaattttgtgggggaaaataatgcatgtcctagtttttctttacctttctcttcttggcaaactatttgtgtcttggattgagtacatctcgtttcttaggttttttcctactatgtgacatttgtaaggttctttctttttctaatgtgggaaaaaaaataaccttaatttaggtcagtgttaaagatcaagatcttggttttagctagcatggtggttcacgcctgtaatcccacctcttcaggaggctgaggcaggaggatcccttgagaccaggagtttgagaccagcctgggtgactctgtctctaccaaaaagaaaaaaaagtagccagatgtgtggcgtacrcctgtagtcccagctactcgagaagctctgataggaggattgcttaagtccaggggtatgaggctgcagtgagatataattgtgtcactgcaccctagcctgggagacagaatgagactttttctctctctctctcmaaaaaaaaaaaagattttgttttttctcagtgttacttgataactataaacgacagacgttcatacaagagatctttcacctttactacttaggaatcaaaaattatttttgaaaagataagaatcattggtaactgcagcaggggacaccwgatctttggtgttaaaagacctgaataacattcctgtaactatctgttatttacttgggccagttacaatcgccattatcttccaattaaaattaagatttaaaagacttctcttatcagagataggatccccctctgttgcccagtctggagtaaaaatccacctgtaactgctgcttatagagtgtgtatccagggcaacttgaatctatgttcctgggttgcaatcctaaagcttggctcawataagctctacttatattattttttaaaacaagactttccttatctatctgactcaaattctaagaaaataattttataactttttttcaaactctaaagcagcatagtgaacacgtatttgttgacatcaccattattataattattgggttgttaacaataactaagcaccgatgctgtgtgcctactacagtgtcttttgcatactgtgtgcctgatagtatttaagagtgaaaatggccgggtgcggtggctcatgcctgtaatcccaacactttgggaggccaaggcaggcatctcacgaagtcaggagttcgagaccagcctgaccaacatggtgaaaccccgtctctactaaaaatacaaaaattagccaggtggggtggcatgggcctgtaatcgcagctactcgggaggctgaggcaggagaatckcttgaacccatgaggcagaggttgcagtgagccaagatcgtgccactgcactccagtctgggtgacagagcgagactctgtctcaaaaaataataatgataattaataaataaagagtgaacatgaattttaaaacatgctcggtagtgtctgcttacaggacatatctctaaaaatagatgactgactggtgaatgggagaacaaatgttaatgaggttcaaataaaaatttaaatattttagcattttaacccagacaataaggctttcatcatataggaactctttattgaaatatttcaagaaaaaagggattatcatttagaagactgattagtcttatttattatgactgaaatgtgcaaacagaatcattgtttcatgaacagaaaacagcagagtttttgactgtcaatgatgttcgaatagaaaatggatcactaaggagataggagattctgttatcgacagtcttcaaaagtaagttgatggccctggaatgaatggagtacaggggattctctaatttgatgacttgttgaactacattatagtcaagatttttctccagtcatgagttggaagattctacaatctggtggtattatagaatggattggccacttgtgcatctgaatttgttatgmatgtgtaagaaaaaagcaattgagaagataccttgaaaataaatgagaacctcctttgtaacctgactttgtcagtcttcttaaagataacattgagttgatgtgtttttaaataagctgctaagagtaatatgtgtttttctgaaccaatattgtggtatttacatttaaggaattgttatagatttatttatttcaagtttccaaaggtatatacctaaacaagagatctaatcatacacatcttcaagctcattttcttgtatctttgtgatataatttgataaaataacattttaaacaacttgaatcttggmtattagtctcatgagttagatgggctgttatacatatgattatttcataaactctgaaagtgtgaatgttattttactatactaccaatttgggatgttaaactacatcttgagcatttgttgttatagggaaagctcactaactacttttcatggagatcaggctggtttattttattctcttattacctgtgaccatttcatttaaacaaataaaatatttctctgatggaaaaactaccaacttctactctcacaaaagtcattcactcatgtggactgaccaactgttaaacatcctggcagtcatggaatttgctaagttatggctaaatgaggttctttaatccacctgcaatacagatcattaataataagataggctatctgaggttttgagagttcagtatagaattttgaagcatcaggaaaaaaaactaccaaattattgtcttattcttattttatggtctgtgaaagcctcttttttttttttttttttttttttttttttgtcagagtcttgctctgtctcccaggctggaatgcagtggtgtgatctctgctcactgcaacttcctcctcctgggttcaagcgattctcctgcctcagcctcccaagtagctgggattacaggtgcatgccaccatgcctagctaattttcatacttttagtagagatggggttttaccatgatggccaggctggtctcaaactcctgaccttaagtgatccacccgcctcagcctctcaaagggctgggattacaggcatgagccactgagcccggcctgaaaggcattcatttctgatcaggcttctgttgaggtggcaattgtcaaaggggaaggagtaaaatctcagaggagaaacattggaagatacctatatctttgcttgagaatgaaaatctaaatggaacttcaaagaactgttttgttgtttgttttttagaaaaaaaagtcccaaaaaagaaaagagagaagataatcaattcgatgcccaggaagccaaatagactttacatagaattctttttaatgcaaccaaacaaatggtcaggattcttcccaatatctcagtcaacaataatatacactctttaaactatgaaatgatttcaatttgatacaatgagcttatgttagattttattaaacatatcttggcggtctagtaaagatctttaatatttaattttatgatgttcgataacttagaaaatgtgaatgctagagacaatgaagccatttactccatagggtatgtatgctttgtgttcggagtagtctataatttaatttaactagctcttatttccttttctccaaagaaggtaccaagacactataaattaattgagacttttttaaaacagtagaataagaaacaaatgtgagatgaaactatgaattttgaggcatcaggtaaaaatggatcaagacattgagagctataacctccaaacatgaaagtttgtttgaaaatatctacaagtgcttacattgtttaataatcatacactttgcttgcctcaacaagaagttcaaaagtactattaaacaaatagaatttaactccagtttacagaattcatctataatacctctattagttcctttaaacaaaatttatctactttgtgaatgcaaagataactatggattattttgatagatcaaaacagaatgtccttmaaagtgttccctgtattctggagcaatgccaccagaaagcagaaataggttacttaggagcctcccacaaaacgaagttaagctttcttagtgttagttctggattctcctcctggttccaccaactactctccaggacctagaagaatttacaaaccaagactgtttcttgccaggtctttattccagagcaggtcattctcttttattctgcaactatgtgaaaggagctttcttttctttctgctagcagagggtagcctcggatccatcaataatttagttttactctatcaacatcagtggagagacgagtacctctaaggatcctgtcaggacagtcctgcattttgctcaaatgctgtctagagatccctgttttctcaattacactagaatagagtaggatgaagatttgaattgcatactaggatgaagacttgaattgaattgcataatgaaaagaatcagccaatccattatccagtttcttatgaattcacagcccagtaggatctctgcagatttctgccttctgtagaaaatgggttgcttctatagctgattgctgcagccaagacaaacaacgatttctttctttttttctcacaagactgggagtgagaatatttggattcygacattgttctactactatataatcaataatcaggaacaaggcaaggcaattccctctttctttctttctttctttcttcttcttttttttttttttttttttttggcagagttttgctcttgttgtccaggctggagtgcaatggtgtgatctcggctcaccacaacctccacctcccgggttcaagcgattttcctgcctcagcctcctgagtagctgggattacaggcgcgcgccaccacgcccggataattttgtatttttagtagagacggggtttctccatgttggtcaggctggtctcaagctcccgacctcaggtgatccgcccgcctcggcctcacaaagtgtgggattacaggcgtgagcaacagcacctggccccccctctcattttttaaacggttaaaatgaaggtgttagaccgtctctaaggttctatacaatcaaaaatttattaaaataggtctatatattttacaacaattttgactttctgaatcttgcatcatggtgtctagaacatatgtgttcaattaatactgaattaattaaaatttatatacactgatgtaaatattttctaagtaaaatctttcatatgtatttaaataaaatttacctttttgccttcaataactgattttcccatgtgcaataacgtgtgagtcagtgcccaaaagagtcacttgaaagttgcaaggcaaagcagttttttaaaaattatctaagattatcaaacaccggtccatgaacactgttgcattaattcagtgtcttaaaatggatttttaattatcagggatatctagagcaaagaaatctaacagggaaattttgaaagatgaaacaattttctatgaaatcagtgtattgtgtgcatcaatgtggtgcagtaacttagtaaggactcacagcgccgctgttcaccaaccagggaaaaatggtgcgagasatcccacagaaaccacsgagttttacagcacagagaaacgacagattgcgataagccctcttccaggctgcactaaactcaagcctctatcctgctggattctgagctccccttcctaagacagaggggtccacccggayacacccgcattctgaagcacttcccgagatcggcgcctaagcaagagaagcaggacgactatggcggctcagccgaggggcggggactacagaggattcttcctgctctccatcctcctgsggaccmcctgggaagcctgggcaggacgtattctctactccgtgtcggaggagacggacaaagggtcctttgtgggagacatcgccaaggacctggggctggagccccgggagctggcggagcgcggagtccgcatcatctccagaggtaggacgcagcttttcgccctgaaccagcgcagcggcagcttggtcactgcgggcaggatagaccgggaagagatctgcgctcagagygcgcggtgtctggtaaactttaacatcctgatggaagataaaatgaatctttaccctatagacgtggaaataatagatattaatgacaacgttccaagattcttgacggaagaaataaatgtaaaaataatggagaatacagctcctggggttcggtttccgttaagcgaggctggggatccagatgtgggcacgaactccctccagagttaccagctcagccccaatcrccacttctccctggctgtgcaaagtggagacgatgraactaagtacccggaactggtgctggagcgggtgctggaccgggaggaagagcgggttcaccacctggtcytcacagcctctgatggcggcgacccgccccgatccagcaccgcccacatccaggtgacagtggtggatgtgaatgaccacaygcctgtcttctctctgcctcagtaccaagtaactgtccccgagaatgtgccagtgggtacaagactgctcacggtacatgctatcgacctggacgagggagtcaatggggaagtgacatattcttttcggaaaawaactcytaaacttccaaagatgtttcatctgaactcgcttacaggagaaatatcaactttagaaggattagattatgaagaaactgccttctatgaaatggaggttcaggctcaagatggtcctggtagtctgacaaaggcaaaagtactgatcacagttttagatgtaaatgataatgctccagaagtgactatgacgtctttaagtagctcaatccctgaagacacacctcttgggacagtcattgctcttttctacctacaagacagagattctggaaagaatggtgaggtgacctgcaccattccagaaaacctaccttttaaattagaaaaatcaatagataattattatagattggtcacaaccaaaaacttggaccgggaaacactctctttgtataacatcacactgaaagccacagatggtggaactcctcccttgtccagggaaactcacatattcatgcaggtggcagacaccaacgataacccacccaccttcccccactcatcctactcagtctacatcgctgagaacaaccccagaggggcctccattttcttagtractgcacaggaccacgacagtgaggataatgcccagatcacttattccttggccgaagacaccatccagggggctccagtgtcctcctatgtctccataaactctgacactggagtcctgtacgcgctgcaatcctttgattatgagcagttgagagaactacaactaagagtgactgcacatgacagcggggacccgcctctcagcagcaacatgtcactgagcctgttcgtgctggaccagaatgacaacccgcccgagatcctgtacccggccctccccacagatggttctactggcatggagctggcaccccgctccgcagagcccggctacctggtgaccaaggtggtggcggtggacaaagattcaggccagaaygcctggctgtcatacctcctgcttaaggccagcgagccaggactctttgcsgttgggctgtacacgggcgaggtgcgcacggctcgggccctgctggacagagatgccctcaagcagagcctcgtggtggccgtccaggaccacggtcagcctcctctgtcagccaccgtcacactcaccgtggctgtggctgacagcatccccgaagtcttggccgacctgggcagccttgagccctccgacggtccttacaactatgacctcacgttgtacctggtggtggcggtggccacagtctcctgcgtcttcctagccttcgtcctcgtactgctggcgctcaggctgcggcgctggcacaagtcacgcctgctgcaggcttcagaaggtggcttggcgaacgtgcccacctcgcactttgtgggcatggacggggtgcaggctttcctgcagacctattcccatgaggtctccctcaccgcggactctcggaagagtcacctgatcttcccccagcccaactatgtagacatgctcatcagccaggagagctgtgagaaaaatgattctttgctracatccgtagattttcaggaatgtaaagaaaacctgccaagtattcaggtgagcccagcccttcctttatttccatgaggaatttatttgcatgatatttctctattattttgcaaaacaaatgttttgaaaatagggatttaaaaaactttatagargtaaaaatgagtttaccagtttccttcagtggtgacactttaatatagaacacataggatatagtatttctttagtgaaagcctatggacaagattatgaatatgtggwctatcacattttataatttccacctactttccaatctatgttccaacctactttcttaactcatatattttatacattggaatgaatcgagtctttcatattgcacaaggttagcaggaataaaacacacctcagctgtcttctcaggattctctttagcattcaaatatgtaaaaggttctgaaagatttcttccatgtgaagatttttttctgtggctgattctgcctccatgtacctcagcttggtggtcctaaaaaatcttgattgcttcttgacctatttacagtataatcatttattaatggggtggtagtagaaggttggatttatgcctaaagaatgaaatgtgtgtgtatcacacttcactaagatctatatcaaagacagacatcaagtctaatgccacactaaaggccatcggacaaaaccaataaaatatgtcaaataaaatgtcattttaagtgttgtaattggcatttgtgacataggcaattacatgttttaacagagaattccagtatgytgttttagtggtacagccagatgaagtgtgtctgtgggctatcaaagtgggagattggggatactggctttgtttcaactgtctcacrtactcaaaccttagaccatcttatgtacacagatcctagaccagtagttgattttatttattaggtctactgaaaaattcagttggaaataacccaatctgggattaactacttccatattcttttgtataacattttagtaaagctcagtatatcaagtgattgtcatccagaaggggtggatgacaaggtaatcttgattccagagacctttgagtattaattaaaaacacacttttagccaggtatggtgttgcaagctgtagcccacctgcatgggaggctgaggcaagaggacagcttgaacccaagaattggaggcccacctagataatataacaagactctgtctcttcaaaaaaagacttctttttagactagtgttgtatttggtagtattttgcacatgatagactctgtacaatagtgtgggggatacattttttttttttgacatggagtctcgctctgtcacccaggctggatacattttacaagttctgcagtgttcacatttcagatgtacaatcacttggggtagaagacaatgttgctgacaccaacaatgttactgagggaagatcctatggcagaactacggttataaggtattttgtaaaagaaaatctcctgaccaaaatttattagatgcataaaattgtttttaagcaatggagagacataatcactaaactcagtgagctattgcaatcaaactttccagggattgtttccttcaattcagaggtcaccaaggaatgtaaaataagtgcagaggtaggaagcagtgcttcagtgcagcagatctcagtgactttgtgttttgaggctatgtattatccccctgataactttgaagatgaatgttgtatttcataaccagtaaaataattgtgtaatgaggagaggagtaggctactgcctgtgatcatcgaaatgagaatcacataatattcctgtaatgaaatcactgaaactattgggaagggggtgtatttgaagataagtataaattgcaccttctaaaaggcaattttggtattactgatactctccggaaaaagttgaaataaatcaacttggaggtacttagaaaagtggagaaaatgttaggaacaatgaaagaaagataaaatgtatccagtatatttctaatgagtaagtatggaaaattactgtactctgagacggtttaggccaagtctgtgttatggctatctttatatagatagtgcatgtttgaagattggggaaagcttatgtcaataaatgtttatgtacttaatctacatgatttgcctaaaaatcytcaaagttgggatgaaggcattcctaagagtacatttttagacgtcattaaatatacagacgtatccacgtagtttttgttctttcagttaggcacacaattataattattgcactggttaacttgaagcagcagaggctgtagtttcctagtgctgactctgggcgccgctgttggccaaagtggagagcttggcgctccagatctcctcgcgcagccgcagcgcgctttccagggcagccccagctcagactccccagcgccagcctttacaccgcttcctcctcggaaaaagaagaattttttcttgaactggaactgcaactaaagtccgttcggagatccaaaaatctgcaatacagaggttatttgtaacccggcgtctccaggctggtgagcaagctgaggagagcaagagggatggggagcggcgccggggagctgggccgggctgagaggctgccagtgctctttctcttcctgctgtctttgttctgcccggcgctctgtgagcagatccgctacaggattcccgaggaaatgcccaagggctccgtagtggggaacctcgccacggacctggggttcagcgtccaggagttaccgactcgaaaactgcgcgtcagttcggagaagccttacttcaccgtgagcgcagagagcggggagttgcttgtgagcagcaggctagacagggaggagatatgcgggaagaagccagcttgtgctctggaatttgaggctgttgctgaaaatccactgaacttttatcacgtgaatgtggagatcgaggacattaatgaccacacgccaaaattcacgcaaaattcctttgagctgcaaataagtgagtctgcacagcctggcacamgatttatattaggatctgcccatgatgcggatattggtagcaacacactgcagaattaccaactcagtcccagtgatcatttctcaytrataaataaagagaaatcagatggcagtaaataccctgagatggtattgaagacacctttggacagagaaaagcagaaatcctaccacttgactttgactgccttggactttggagctccacccctaagcagcactgcacagatacacgttctagtgactgatgccaatgataatgctccagtgttcagtcaagacgtatacagggtgagcctttcagaaaacgtgtacccggggaccacggtgctacaggtgactgccacggaccaggatgagggtgkcaatgccgagattactttctctttcagtgaagctagccagatcacccaatttgacctgaactctaacaccggggaaattactgttttaaatacattagattttgaagaagtcaaagaatattccatagttttggaagcaagggacggtggaggaatgattgcgcaatgcacagtggaggtagaagtcatagatgaaaatgacaacgccccagaagtgatattccagtctctacccaacctaattatggaggacgccgagctgggaacacatattgctttgctcaaagtccgtgacaaggattccagacacaatggagaagtgacttgtaaattggaaggtgatgttccatttaaaatattaacttcttcaagaaacacgtataaattagtgacagatgctgttctagaccgcgagcagaatccagagtacaatataaccgttacggcaacagatcggggcaagcctcccctctcctccagttccagcatcaccctgcacattggtgatgtaaatgacaacgctccggttttctcacagtcttcctatatagtccacgtggccgagaacaacccgcctggagcctctatttcacaagtcagggcttctgatccggacttggggcccaacggccaagtctcttactgcatcatggccagtgacctggagcagcgggagctgtcatcctacgtgtccataagcgcggagagcggggtggtgttcgcgcagcgcgccttcgaccacgagcagctgcgcgccttcgaactcacactgcaggcccgcgaccagggctcgccagcgctcagcgcgaacgtgagcctgcgcgtgttagtggacgaccgcaacgacaatgcgccacgggtgctgtaccccgcgctgggtcccgacggctctgcgctcttcgatatggtgccgcacgctgcagagcctggctacttggtgaccaaggtagtggcggtggacgcagactcaggacacaacgcctggctgtcctaccacgtgctgcaggctagcgagcccgggctcttcagcctggggctgcgcacgggcgaagtgcgcacagcgcgtgccttaggcgacagggacgccgtccgccagcgccttctggtcgccgtgcgtgacggtggacagccaccactctcsgccactgccacgttgcacctggtcttcgccgacagcttgcaggaggtgctgccggatatcactgaccgccccgacccctctgacctccaggctgagctgcagttttacctagtggtggccttggccttgatctcagtgctcttcctcgtggccatgattctggccattgccttgcgcctgcgacgctcctccagccccgcctcctggagctgcttccagcctggtctctgtgttaaatccgaatccgtggttccccccaactacagcgaggggactttgccttattcctacaatctatgtgttgcacatacaggaaagacggagtttaatttcctaaaatgtagtgagcagttgagttcaggacaagacatactttgcggtgattcatctggggccttatttccactttgtaattccagtgaattgacttcccatcaggtgagtttcctttaagtataatttaatgctcattgcctacccatttctccatattcacaagaaaatatacatatttgcaggaaaatatataatttttagatgtcatggatcattttaggaaagttgtagtcagttaaaaagctgtcatatcattctacaaaggaggagtaaagtaggagcaattgtgtggcccaacatttgtttgttttttagccaagcttagatttataaagcaatgagggtgtggttttaaccacaaagtgaaagtgttagacagttgttggctctctcctaaaaagtgaatgagatttttcctatacattttccttcttgttgactaatatatgatgaatacttttttcagcttggatataccataaatataaaaataataaagccaaagaatttaagctaaaattcaacacttttcttaactaatttaactggtatggtctccatagtagtccactgttttgtttcctgtgttaacttcccttttgtttcaaaagctcttagaataaggagtcaactggatttttatgtccatggaccccttgtgattatatgcagtgtacgctgtgtgtgcgtgtgtgtgtgtgtgtgtgtgagagagatccttttacttagaaaaaggtctactatgctcattagaagatcaaaagcagattctccttacttgtaacataggagtttcaggattaatctgtattcaagctcattctatatccttcatcaaagaaaagacaatgttttgtgtctgttgtccctctcacacacagccctaatatataatgtgtaactgccttatctgcagccctaaactaatatagctagaggtcttctaatcattctcctacctctaggaaagaaatatagtcttgaaaactgccaatctggtgtgcatacaaaatatatacaaaataccaaggaacattatatgagccttttgctaggtatatctaagcaactgcttcagttaatggccactttacaaattgctgaaagaaggaaacgtctttcgattcttttttttttctttttttttttttgagacagagtctctgtctgttactcaggctgtagtgcagtggcacaatgatagctccctccagcctcaaactcctgggctcaagcattccttctgcatcagcctcctgactagctggaactcaggctcatgccaccagacctggctaatttttctgttttcagtagagaaaatattttctttcactaatttaactggtatggtttccattgtctacccagttttccatatgcataagaaaatatattcacaggaaaatataaagttttcagatttcatgagtggttttaagaaagttttagtcagtgaaaaaactatcataccagtcttcaaaggaagggtgaaataagttcatctgctacgttgcccaggctggtcttgaagggaaacagacttttttgtagtcatacttatcctttggcttcttagtaagtattatatagtcattactttttgcagttttttagatcaaagtgttaatgtaggtaaagttaaytttagaatatatgtaaaagtcaagtctgctttaaatttaatcatctctttggtgaaagggatgggatggagctttgctttttatcatatattcatctgtacctttcaagtattcaaatagaaaaatayaaacaatgtaaataaaatagcaaaacaatgtaatatctcataaaactgcaatggtaaaagcatttatcctattgaaattccacaatttttatttgaaaatattatcgacatgtaattcaagtggcatttagaagaataatttaaaagcaacaactctatagaaagcttgtaaaatgattaagtagtttaaaccaaataaaacaatttctgagtcagtcatctccagtaggtctattttagtctcaagataaattcatttctggtgacaactgaagttcttagttatttgttagtatatattggagacatttacaataaagcttagagcacaatgggaaatgaaagtatcatgttttttttaagaccaaatgtattgcagaaatgtgagtaatttaatccgatgctacaatctgatcattctgatctaatctgatcatttaataacactaaataaaaccttcatctcacattctttggctgtttcttttaaaatatgggtttacggataaatcaaataaattcaaaacaaagtaataagcaaatgatttttttttctcagtaatctagtagagtattacatttagaagtaatctgtatctcagtgcagtaactatttaggactgtaagcgccgctgttcacctactggaagacaaatgcaaccgaaaacactcasatctcacacctcacgaagacccgcagatgccacaaactaactgctggactgcagcgaaacccgacccctgtttggaggcactccaggtttccggaggattgtcatctccatagctgcggcaagaaactaaataagacccatttatgcacagtgaagattctgagaggattctgcagcaaaacaacaatggccgctccacagagtcgccccagacgcggcgagctgatcctgckgtgcgcgctgctgggaacgctgtgggaaatcgggaggggacagattcgctactctgtgccagaagagacggacaaaggctccttcgtgggtaatatctccaaggacctggggctggacccccggaagctggcgaagcacggagtccgtatcgtctccagaggtaggacgcagctctttgctctgaacccgcgcagcggcagcttgatcaccgcgggcaggatagatcgggaggagctctgcgctcagagcccgcggtgtctgataaatattaacaccctggttgaggataaaggaaaactctttggggtagaaatagaaataattgatattaacgataataacccaaaattccaggtcgaagatctagaagtaaaaattaacgaaatcgcggttcctggagcacgttatccactcccagaagctgttgacccggatgtgggcgtgaactccctccagagctaccagctcagccccaatcaccacttctccctgracgtgcagactggagacaatggagccataaacccagagctggtgctggagcgcgccctggacagggaggaagaggctgctcaccacctggtcctcacggcctcggatggcggcaagccgcctcgctctagcacagtgcgcatccaygtgacagtgttgratacaaatgacaatgccccggtttttcctcacccgatttaccgagtgaaagtccttgagaacatgcccccaggcacgcggctgcttactgtaacagccagcgacccggatgagggaatcaacggaaaagtggcatacaaattccggaaaattaatgaaaaacaaactccgttattccagcttaatgaaaatactggggaaatatcaatagcaaaaagtctagattatgaagaatgttcattttatgaaatggaaatacaagccgaagatgtgggggcacttctggggaggaccaaattgctcatttckgtggaagatgtaaatgacaatagaccagaagtgatcattacgtctttgtttagcccagtgttagaaaattctcttcccgggacagtaattgccttcttgagtgtgcatgaccaagactctggaaagaatggtcaagttgtctgttacacacgtgataatttaccttttaaattagaaaagtcaataggtaattattatagattagtgacaaggaaatatttggaccgagaaaatgtctctatctacaatatcacagtgatggcctcagatctaggaacaccacctctgtccactgaaactcaaatcgctctgcacgtggcagacattaacgacaaccctcctactttccctcatgcctcctactcagcgtatatcctagagaacaacctgagaggagcctccatcttttccttgactgcacacgaccccgacagccaggagaatgcccaggtcacttactctgtgaccgaggacacgctgcagggggcgcccctgtcctsgtatatctccatcaactctgacaccggtgtcctgtatgcgctgcaatctttcgactatgagcagatccgagacctgcagctactggtaacagccagcgacagcggggacccgcccctcagcagcaacatgtcactgagcctgttcgtgctggaccagaatgacaacgcgcccgagatcctgtaccccgccctccccacagacggttccactggcgtggagctggcgccccgctccgcagagcgtggctacctggtgaccaaggtggtggcggtggacagagactcgggccagaacgcctggctgtcctaccgcctgctcaaggccagcgagccgggactcttctcggtgggtctgcacacgggcgaggtgcgcacggcgcgagccctgctggacagagaygcgctcaagcagagcctcgtggtggccgtccaggaccatggccagccccctctctccgccactgtcacgctcaccgtagccgtggctgacagcatccccgaagtcctgaccgagktgggcagtctgaagccttcggtcgacccgaacgattcgagccttacactctatctcgtggtggcagtggctgccatctcctgtgtcttcctcgcctttgtcgctgtgcttctggggctcaggctgaggcgctggcacaagtcacgcctgctccaggattccggtggcagattggtaggcgtgcctgcctcacattttgtgggtgttgaggaggtacaggctttcctgcagacctattcccaggaagtctccctcaccgccgactcgcggaagagtcacctgatctttccccagcccaactacgcagacatgctcatcagtcaggagggctgtgagaaaaatgattctttgttaacatccgtagattttcatgaatataagaatgaagctgatcatggtcaggtgagtttagttctttgcttgcttttaatttccagatgaattttatttggcataaattatgttttgaaaaacattgtgaagatagttgaaaataatttttaaggtgtatcacagagttttgggtttattttggtggtgttactataaaattgaactctaatagtcataggttattgtttcatttgcttttaaacgacttggaaaagattgttcaaccattttaagccttccagtattttattcctattatcactcattcacttaagaagtagctacccgtccatactggtaattttgctattgtttgtktgtgtgtgtgtgtgtgtgtgtgtgtgtgtgtgtgtgtgtgtgtatcccaaactagaacttcagaaaattatcaagaagtctaaagccttgttattagcttagcaaaagtaaaatatatctcagaatttttagggttatgtttagcatttgaacctgtaactaggctcttgtagatttcttcactttaaacctcttttctgagccctgtttctgtaccagtgcccttcaaaactttaatacttcttaccatccttcaaaacatgaacaaactttaaagatggatcttggtgggagatgagactggttactaaatattaagtatgtgagtcagtggtcacctgggctccatgcccatggagacatgaaatctaaagcctagaatgtccattgctcccccaaacaaaaaacaaaagcaaaaacattagatctgaattaaaatgtaattttaaactgttgaaagtgacttttgtaaaatatgtaagaacatatttcaatacaattccaattagctgtttcggttgtgcattgatgtgaagtggtgagaatgttgatattaagaaccaatgtttcaggtacacaagttctaaataagctgatcaattcaattaaagttattcagtcttggctggacacagtgcctcatgtctgaaatcccagcactttgggaggctggggcaggaggaccgcttgagccccgggggtttgaaactgcagtgagctatgatcatgccactgcactccagcctaggtggcagaactagaccctgtctctaaaaaaactattattaggccgggtgcggtggctcacgcctgtaatcccagcactttgggagactgaggtgggtggatcacctgaggtcaggagttcaagatcagcctggcaaacatggtgaaaccccgtctctactaaaaactacaaaaattagccaggcatggtggcatgcgcctgtggtcccagctactcgggaggctgaggcagaagaatcacttgaacccgggaggtggaggttgcagtgagcctcgatcctgtcactgcactccagcctgggcaacagggtgagactccgtctcaaaaaaaaaaaaaactaatattaatagtaaaaactcrgtataggctatccattattgtattcctgcataccttcttgtagcatttgaataaagctaatacctgaattgattgttgtaaggtagaagtagatgacccaataaatgtttgttattaatgaaaaggacatttcctaaggattgtgtagtgttctactgtatggtgcatattcagtggagtgggagttaacttcatagtttgtgtaccatttggatgcacatttgagaggacaacatattattggcactttgcaattttaaaaactcrgatgaaagttgccctggtaggaaagaaaatccttactctccctaaaaatgttggctagttgtttttattaatctgacaaatggactaaagaaggttgaccaatgtccacaaatttatgtaaatgaacttatgagcttcatttatccaattccaaagtcatttcagataggataataatgcaatccactagaatatccctttgtaccttgtattgcagaatagataagcatttccccaataactcttaagaatgaatttatgtactgtaaaagatatgacataagagaagtattttgagatatgaagaagagcaacgtagtagggtatatcatttcttagctacatcatatgggcagtatacttgaatgaatatttcctgaagtagaagagtaaagaaaaattatttttataaagaatgttaatatagtcaggaagaggagatgtttggggattggtataaaattgccacaactttacaaaatagttttaaatagtatagatttccctaatatgtgtaatataaaacactagaaatattggggagttggaaatcatagaaatgaacagaagaatgataaaattgtttccatagctaataaaaaatgaatttttgaaatcagtatagtatgaaggctctgagagcaagaactgtatcatattaattattatattgccagtgacaagggcaatacttagttctagctaagagttcaaggtatgtttgcagaatggtgaaagaatggaccaatgtatgcaggtttgtataaaaacccaacgtgatatttctaacaatttggaaaacagagaaagataccttaaagaagttgttataattttttattaagtatatggacgtaaaaacttggcttgttaagttaggcacacaaaaacaattactgcactggttaacttgaagcckcagaggctgtagtttcctagtgctgactctgggcgccgctgttggccaaagtgcagagcttggcgctccagatctcctcgcgcagccgcagcgcgctttccagggcagccccagctcagactccccagcgccggcctttacaccgcttcctcctcggaaaaagaatcgtttcctaaactggaactggaactaaagcccgttcggagatccaaaaatctacaatacagaggttatttgtaacctggcgtctccaggctggtgagcaagctgaggagagcaagagggatggggagcggcgccggggagctgggccgggctgagaggctgccagtgctctttctcttcctgctgtctttgttctgcccggcgctctgtgagcagatccgctacaggattcccgaggaaatgcccaagggctccgtagtggggaacctcgccacggacctggggttcagcgtccaggagttaccgactcgaaaactgcgcgtcagttcggagaagccttacttcaccgtgagcgcagagagcggggagttgcttgtgagcagcaggctagacagggaggagatatgcgggaagaagccagcttgtgctctggaatttgaggctgttgctgaaaatccactgaacttttatcacgtgaatgtggagatcgaggacattaatgaccacacgccaaaattcmcgcaaaattcctttgagctgcaaataagtgagtctgcacagcctggcacaagatttatactagaagtagcagaagatgcagatattggcttaaactctctgcagaagtataaactctctcttaacccaagtttctcattaataattaaggagaaacaggatrgtagtaaatacccggaactggcactggagaaaaccttagaccgggaacaacagagttaccatcgtttagtcctgactgccttggacggtggacatccacccctaagcggcaccactgagctccggatccaggtaaccgacgccaatgataatcccccggtattcaaccgagacgtgtacagagtcagccttcgggaaaacgtgccaccaggcaccactgtgttgcaagtgtcagccactgaccaagacgagggcatcaactcagaaattacttattccttctacagaaccgggcaaatctttagtctgaattcaaagagcggagaaattaccactcaaaagaaactggattttgaagagaccaaggaatattcaatggttgtagaagggagggatggtggtggactggttgcacaatgtacagttgaaattaatattcaagatgaaaatgacaatagcccagaagttacattccattctctacttgaaatgattctggaaaacgcggtgcctggaacactaattgctttgatcaaaatacatgaccaagattctggggaaaatggggaggttaattgtcaattacaaggcgaagtcccttttaagattatctcttcatccaamaattcgtataagttggtaacagatggaaccctagaccgagagcaaaccccggagtacaatgtcaccatcacagccacagacaggggcaagccgcccctctcctccagcataagcgtcatcctacatatcagagacgtcaacgataacgctccggttttccaccaggcgtcctacttagtcagtgtacccgaaaacaaccctcctggggcctccatcgcgcaagtctgcgcctcggacctggacttggggttgaacggccaagtctcctactctatcatggccagcgacctagagcctctggcactggcctcttacgtgtccatgagcgcgcaaagtggggtggtgttcgcgcagcgcgcctttgactacgagcagctgcgcaccttcgaactcacactacaggcccgcgaccagggctcgcctgcgctcagcgcaaacgtgagcctgcgcgtgttggtgggcgaccgaaacgacaacgcaccgygggtgctgtaccccgcgctgggtcccgacggctctgcgctcttcgatatggtgccgcgcgctgcagagcccggctacctggtgaccaaggtagtggccgtggacgcagactyaggacacaacgcctggctgtcctaccacgtgctgcaggctagcgagcccgggctcttcagcctggggctgcgcacaggagaggtgcgcacagcgcgtgccttgggcgacagggacgcggcccgccagcgcctgctggttgctgtgcgtgatggtggacagccgccactctccgccaccgccacgctrcacttggtctttgctgacagcttgcaggaggtgctgccggatatcactgaccgccctgtaccctctgacccccaggctgagctgcagttttacctagtggtggccttggccttgatctcagtgctcttcctcctggccgtgattctggccgttgccttgcgcctgcgacgctcctccagccctgccgcctggagctgcttccaacctggtctctgtgtcaagtctggacctgtggttccccccaactacagtcaggggactttgccttattcctacaacctatgtgttgcacatacaggaaagacggagtttaatttcctaaaatgtagtgagcaattgagttcaggacaagacatactttgtggtgattcatytggggccttatttccactttgtaattccagcgagtcgacttcccatcctgagttggtgagtttcatttatgtctattctttttcattacccacccaattttctgtatttacatgaaactatcgtacattttcaagtccaatgagttgtcttagggaagtcagagctgctcagaaagctgtcctaccattctttaagaggagcagtaaattgtgagtttttatgtcgcataaaagaagtagccttatagatttacaaagtagtgagagtttgctcttagcttcctmtctagcaaaaacatttggtgcgtttttttgtcctctttctcaaagctaatgaattttacctattcgttgtctcattctttaacatgtttatattttattgtatgtagataaaccattaaatttaatgtatgtaatcatttaattcatcttttaaagcaaagaaactgctagtagatgtctttcttcactgatttcactggtagttttcatctctttcttatgttcctcatatatgctttcttattcctacctaatggatttatgattttttgaatctcctaaaattttattaaaaatactatatgttggctgggtgcagtggctcatgcctgtaatcccagcactttgggaggccgaggcggttggatcacatggtcaggagttcaagaccagcctgggcaatatggtgaaaacccgtctctactaaaaatacaaaaattagctgggtgtggtggcgggcgcctgtaatcccagctactcaggaggctaagacaggagaattgcttgaacctggcaggtggaggttgcggtgagccgagatcactccattgcattccagcctgggcaacaagagcaaaactccatctcaaaaaaaaggaaggagaaggagaggaagaagaagaaaaatactacatgttatgtgtatgagagagaaagagagagactgattcactgaacttagaaggtccaaatcatccaaataattttctaagtttatccaggttttcttggatgcaaaatccttttccacctctatataattaccagaagaaacttacaaaaaaaaggaaatgctattgcctgaatttctcttgctcggaatcctgacatattcttgaagaaggggaaaaagacaccggatttgtcttatcgtttggagctttaaatataaatgactggatgttttctcaacatccttgtaggatggaaggtgaatacaggattattccatttttaagacaaaaactactagtcttgtgtacatacaaagctcccattacatggtataagtcttttgcttggtttcccttagtatgtgattcagtaaatgggttccttacaaagtgctgagatttcttataataccacttacttttaacctttcagtagttttctttgttgtatattttgtgttctttttcccaaattattatataagtttaagtgatgcttagaataatgtttaagaccactttaaaattgcataatttattgatgaaggattaaaatagaaacttgcttttcagtgtatatgcatttgaatcattgaaacacagtctgtgcatgcattacatattcacattaaaaaactaagcatttttgaaatagcagaaaagtttaagcaattacaaaaatgtgaaaatttccaactttaatcctgttaatatttagcaatattaggcgagaacatctgtaactattgctgaattaatattacttttataatacaaaaatttaaaataaacgtttttccaggaattttatcatcaaaataaaccccagaaaataatttcaaagtggataatctatccttatatatgtattaatacaattatatattttacatttacaaatatataggtataaaaattaaaaatgaatgtacttccaaacaagattgcacataaaaattacttcagaaaattgttaagatacacagaaaaaattgaagcatcataaaaaggaaattataatagtttacatatctagaaatagagtgcaaagttctaccaagaataagaataaattaatattaagcaatggtttgtgattttataatacacttacagaaattttattccactttatttacaactcagatatctaaaaaatagattkcttttgaaatacaaatgcaagaaacaattggagaaatctaaaatcataattagaagagagtagtgttttctttatcagccatctgatataatgttacacatcagtgggtgtagtaacggcttaggactctgagcgccgctgttgatcaactctaagcgaaaatcaggactccatccggatttccagttctgcggctacacaaaacccggcagataccacaaacctgctcccaggctgcagcaaaactcagcctctttcttctaaggaaaagatcaccatactttgcagggyggaagaaagaacctgatgaagcagcgcgcacagagatccttttgagaaaattccaaagcgaggcagcaatggcagctccaaccaaatgccagctccgcggaagattagtcctgctatgctcgctcctggggatgctatgggaggccagggccagtcagattcgctactcagtgcctgaagagacagaaaagggctatattgtgggcaacatctccaaggacctggctctggagccccgggagctggcggagcgccgagtccgcatcgtctctagaggtargacgcagcttttctctctgaacccgcgcagcggcaccttggtcaccgcgggtaggatagmccgggaggagctctgtgctcagagcccgcggtgtctggtgaactttaaagtcctggttgaagacagagtgaaactgtacggaatagaaatagaagtaactgatattaacgacagcgccccaaagttccaggccgaaagtctggaagtaaaaattaacgaaatcgcggttcctggagcacgttatccacttccagaagctattgatccggatgttggcgtgaactccctccagagctaccagctcagccccaatcaccacttctccctgaacgtgcagactggagacaatggagccataaacccagagctggtgctggagcgcgccctggacagggaggaggcaactgcycaccacctggtcctcacggcctcggatggcggcgagccgcgtcgctccagcacagtgcgcatccatgtgacagtgttggatacaaatgataatgccccggtttttgctcaacggatttaccgagttaaagtccttgagaacgtgcccccaggcacctggctgcttactgcaacagccagcgacctggatgagggaatcaacggaaaagtggcatacaaattctggaaaattaatgaaaaacaatctctgctattccagcttaatgaaaatactggggaaatatcaacagcaaaaagtctagattatgaagaatgttcattttatgaaatggaaatacaagctgaagatggtgggggattgaaagggtggacaaaagtgctcatttcggtggaagatgtaaatgacaatagacctgaagtgaccattacatctctgtttagcccagtgagagaagahgcmcctcagggaacagtaattcttcttttcaatgctcatgaccgagactccgggaagaatggtcaagttgtctgttctatccaggagaatctatcttttacattagaaaattcagaagaagattattacagattgttgacsgcccaaattcttgaccgagaaaaagcctcagaatataatatcacggtgactgcaacagacagaggaactccgcccctgtccacagaaattcacatcaccctgcaagtgactgacatcaatgataatccacctgctttctctcaagcctcctactcagtctrcctcccggaaaacaacgccagaggtacttccatcttctccgtgattgcctatgaccctgatagcaatgagaattctagagttatttactccttggcagaggataccatccaagggtctcctctctccacctatgtctctattaactcagacactggygtgctgtatgctctgtgctcctttgactatgagcagtttagagatttgcaaatgcaggtgacggcaagtgacagtggaagcccaccacttagcagcaatgtgtcattgagactgtttgttttggaccagaatgacaatgccccagaaatcctgtaccctgccctccccactgatggttctactggtgtggagctggcaccccgctctgcagagcctggctacctggtgaccaaggtggtggcagtggacagagactcaggccagaatgcttggctctcctaccgcctattcaaggccagtgagccagggctcttctcggtggggctgcacacaggtgaagtgcgcacagctcgggccctgctagatagagaygcgctcaaacagagccttgtggtggctgtacaggaccatggccagccccctctctcggccactgtcacgctcacagtagccatagctgacagcatcccagacatcctggctgacctgggcagtcttcagatccctgcagacctggaggcctcagaccttaccctctacctcgttgtggctgtggcagtcgtctcctgtgtcttcctcaccttcgttatcaygctgctggccctcaggctgaggcactggcactcctcgcatctgctgcgggctaccagtgatgggttggctggtgtgcccacctcacactttgtgggtgtagatggggttcgagctttcctacagacctattctcaggagttctccctcaccgctgactcaaggaagagtcayctgatcttcccccagcccaactatgcagacacactcatcagccagcagagctgtgagaaaaatgascctttstgygtctctgttgattccaagtttcctatagaagacacccctttggttccggtgagttcattttttttctttctttcttttctttttttgttttttgttttgttttgtttttgagacagagtcttactctgttacccaggctggaatgcagtggtgtgatctcggctcattgcaacctccgcctcccaaattcaagcgattctcctgcctcagcctcccaagtagagtagctgggactagagtagagtagctgggactacaggcctcccaagtagaataactgggactacaggcacgtgccaccacgcccggctaattttttgtgtgtttttagtagagacggggtgtcaccatgttggccaggctggtcttgaattcctaacctcaagtgatccacccacctcagcctcccaaagcactgggattacaggcgtgagccactgcgcctggcccttaactttctattatagttagctttctctttaactgtctgtacttaaggtagtataagttgatatcagtgtgtttctcatcacttttcactgggcctaattgttgctccaacactgaaaggaggcatttattagttatatttgctgatataactttcatgttctcataataattaacctgctgtcaacgtaaaccatacttcatggggtagctctcagcctgcattgatgtgggctttttgggtagggttgcttcattggttgcagtggactcatatcataaaattcttactcctttttttttttttttaagagatgggggtgtcattctgttgtccagggtggaatgcagtggtgtgggtaaagcttactgcagtctcaatctcctgggcttatgcaatcctcccacctcagccttcacagtagctaggactgaggtgggagggctagcaagctatgttgcccagactggtctcaaacgatcttcctgcttcagtttcccaaagcactgggtgaggtgtgaaccacctcacccagcaaattcttactcctacgatcatttattcaggtcatactatgtttgtaagggtaaactgataaaaaggtaaatgtattcttcttagagaaacagctgaaagcccagatttattgcttctattcttccatttctatgacaggaaaacacctctttgaggttatatttttcagatcacaagtgtgtaaagtctgtttgtgtttacagatattttctgacgaagattcaaacttcagttatccacttccaaaccctagtaaaccaattttttccctttaatggtgaaagttgtcacatcttttattctcatatcttcaaaggtcttaatttcctaatgctttaatgttaaattatggagaatagtaggacattcttcttttctatagtatatgcttgctcaagagaagtttctaagactggacactgtgaaatgacaaaacaaggaattaaaaatatttctctcacttatatattatttctggctcaattctccaacttttgagtctagaaatgaacttgcatatcagatataatttaagaaaatattctcaggaactgctgggawgattctaaaactattttactgtttttagctataaggaagagaataatgtattatttaatgttattttaaacatagtgttgtttcaaatagtaaataacatttcacaagacatttgaaaataagctttgaagttgactcaaaattctatgctaaacatgtgatccatagatacactgatgactgctggcatttctgtggaaatgaagaattgttttatttgtttgtaattatttgggtttcagttgctttatttttaagaaaaaaaagctgaagtgtctgggaatcctttatgacatacagacattttaattatttcaaacacgttttcccccttaagtgggtagcaaaaaaaataaagcatacttcaggctcatatttttaaccatgcaacaagaaaattgttacaatttctgttctgaggagtagccttcatacttagtatttataaatattgaaatgtatgttaatttggggaaaacataacagatatccatgaaggcttgtatgtcatggtaggtagttactattcgataccacaaaaatgtctcttgcccttaaaaccagaacacgaggctcaccagacagatgactgaatggagtatggaaaatctttatttctgtttttcttaggctatgtaggacttaacttattgtgcattggtaacagattgtagaacataagctgaaagataaaattcttgaccttaatgtctcatcttaaaaagaagcattggttgacattctatatctcgtattacttaaaaataatgggggagcgcagtatatattaaacaaagattggctttgtggtgatcattgttgaaggtggggtgatggctatgtgaaggttcactatatatactccctactgttgtataagtttgaaattgtgcataatagatttatttaaaacacaaagcatagaaatatctactataatattatggtgagagcaaaatttgagggggatgtacacctgcattttcgaagaatatatacatttcggagaccgaattcaaaatgaaaaaccgggctgctgtcccgcacggagcctctgggcgccgctgtcggccagtgcagagcaagcgctgacgccggggatccgtcagcctctggcctgggattccctgcgcagccaacaacagaaagaagaaaaccagctcccacacagagcctcccggctgcgcagacctttcccagcacagcggattgccagctccgagacccgggactcctcctgtcctgggccgaatgctcttttagcgcggtagagtgcactttctccaactggaaaagcggggacccagcgagaacccgagcgaacgatgggagggagctgcgcgcagaggcgccgggccggcccgcggcaggtgctatttcctttgctgctgcctttgttctaccccaccctgagtgagccgatccgctactcgattccggaggagctggccaagggctcggtggtggggaacctcgctaaggatctagggctcagtgtcctggatgtgtcggctcgcaagctgcgagtgagcgcggagaagctgcacttcagcgtagacgcggagagcggggacttacttgtgaagaaccgaatagaccgtgagcaaatatgcaaagagagaagaagatgtgagttgcaattggaagctgtggtggaaaatcctttaaatatttttcatgtcattgtggtgattgaggatgttaatgaccacgcccctcaatttgataaaaaggaaatacatttagaaattttcgaatctgcatccgctggtacacgactatcgcttgaccctgccacggatcctgatataaacataaaytcaattaaagattataagataaactctaatccttatttttcattaatggttagagttaattccgatggtggcaaatacccagagttatctctggagaaactcctagaccgggaagaacagagatctcatagcttgatattgactgccttggacggaggggacccaccaagaagtgccaccgctcacatagaaatttctgtcaaggataccaatgataaccccccggttttcagcagagacgaatatagaattagtcttagtgaaaatctgccccctgggtcccctgtgttgcaagtgacagccactgaccaggatgagggggtcaatgctgagataaactactacttccgaagcactgcccagagcacaaaacatatgttctcattggatgagaaaacaggtatgattaagaataaccagtcatttgattttgaagatgtagaaaggtacaccatggaagtggaagygaaggacggaggtggtctctctacccagtgtaaagtaatcatagaaatccttgatgaaaacgacaacagcccagaaataatcatcacttctctctctgatcagattttggagaattcacctccaggaatggttgttgccctcttcaaaacacgggatctggatttcggaggaaatggagaagtcaggtgtaatatagaaacagacattccattcaagatttattcttcttccaataactactacaaactggtgacagatggagccctggaccgagagcagacaccagaatacaatgtcaccatcgtagccactgacaggggcaagccgcctctttcttccagtagaagcatcaccttgtatgtcgctgacatcaacgacaacgccccagttttcgaccagacgtcctacgtggtccacgtggscgagaacaacccgccaggagcctccattgcgcaagtgagcgcctctgacccggatttggggctcaatggscacatctcctactctatagtggcgagtgacctagagcccctggcggtgtcgtcatacgtgtcagtgagcgsgsagagcggggtggtgttcgcgcagcgcgcctttgatcacgagcagctgcgcgccttcgcgctcacgctgcaggcccgcgaccacggctcgcccacgctcagcgccaacgtgagcctgcgcgtgttggtgggagaccgcaatgacaacgcaccgcgggtgctgtacccagctctgggtcctgacggctccgcgttcttcgatatggtacctcgctctgcagagcccggctacctagtgactaaggtggtagcggtggacgccgactcgggacacaacgcctggctgtcctaccacgtgctgcaggccagtgagcccggactcttcagcctggggctgcgcactggggaggtgcgcacggctcgagccttaggcgacagggacgcagcccgccagcgcctgctggtcgctgtgcgtgacggtggacagccgccactctctgccaccgccacgcttcatctggtcttcgcagacaacttgcaagagatactgccagacctcagcgaccgccctgtactctctgacycccaggctgaactgcagttttacctggtggtggccttggccttaatctcagtgctcttcctcctcgccgtgattctggccattgccttgcgcctgcgacgctctctcagccctrctacttgggactgcttccatcctggtctctgtgtcaartctggacctgtagttccccccaactacagtgaggggactttgccttattcttataatctgtgcattgcacatacgggtacaaaagagtttaatttcctaaaatgcagtgtgcccctacatkccaatgaagacatggtttgcagtgtttctcctggagccttaattccacctcatggtggggaggatttgacttcacatcctgagactctgacttcggtgagtttctcttttttgtgtgtgatttatctaatagtctactagtttctcatattttaggcatactactttattttcatatctagaatcatatgtttaaaatccatagctttttacaatattttctcaatgttttttcaattatagttttcactatgtatttggttcataagttgctctatctttttgtaaaataatgtcaccagactgaagatattttgtctttgtcttttttttttttttttttttttgagatggagtctcgcactgttgcctaggctggagtgcagtggcgtgatctctgctcactgcaacctccgccttctgggttcaagcgattctcctgcctcagcctcccaagtagctgggattactggtgcccctcaccacagctaaattttttgtatttttagtagacatggggtttcactatgtcgaccaggctgttcagaaactcctgtcctcgtgatcctcccaccttggcctctcaaagtgctgggattacaggcgtgagccacaatattttgtcaagttctgactatcgaacagaagcagtggtcttggcatctaagaaaacaaacaagtaacctatctattcaaatttgcgaagacttagtgaatttacgatatcttatttatatatttttaaagcctaaaaatattcagaagacaggcccagtggctcacacctataatcacagcactttgataggctgaatcggaaagtatcacttgagcccaagaattgagaccagcctgggcaatatagggagaccccccatctctactaaaacaacaacaacaaaaaaaaacattagcagagtgtggtagcattcccctgtggtcccagctacttgggaggctgagctgggtggattgcttggtcctgggaggtcaaggttgcagtgagccctgatcttgccactgcactccagcctgggcgacagagtgcgaccctgtctctaaaataaataaataaatatgcaggcagggccaagtgtgctgtaatcccagcactttgggaggtggaggtggagaatctcttgagcgcaggaatttgagaccagcctgggcaacacagggagactccatcgctacagaacatttaaaaattagcagggtgtggtggcacatgcctgtggtctcagctactctggtggctgtggtgggagaatcgcttgagcccaggaagtctaggctgcagtgagctgtctaggtgacagagtgagaccctgtctcaaaaaaaaaagacatttctaagaaataaatgaaatactattgcctttgcactcagtctctgtctctgattctctgatagaagatttttgaagaaaaaagataaaatctttgaagagttctatacttggaaggcatagtgacataaacacttctgaacatcctgttctctgtgtgaaagaagtgaacttctataccctttgcatttgagggaacaattgctactgggttgatgggcacacacagttgaagatatgtgaaccactggactttggcctctgatacaaactgcctaagagaagagattatttatactggtattaatgctctgatgaaaacaggtcatttgacataaacacttacttgttaaaaacctatatcactacatctaactttgttttctaaaacttttagtacttcaaattctacgtatttcttttctcattacaatgcaaacagtttaatttgcaactgtaatatatgttcattttagtttgtgattacctgcttaatcatttaaataggtccatttaacttgtatccctgtaagataaagtatgttttacacaaaaaggttaattaaggctcagtaaaactattctagaagagtactttaaaaacctcttacacaatcctaagctaaataagtttaatgaattaagtagttacaattataaagcttcagagtgaattatctcatgagtttatttaatataatctttgtatgaatgtatactaaataaaattggcctattcaaatcacaattttaaattataagacttttctgaatttacctagacactaatatgacctaaaataagtattatttaccttttattaaagtgtgtacatttctgttgggaaaacgtgttgcaaatatatatttaaccaaacattatcttgaaatatttacaatattttcactccactttatcacacctcccctaagaaacctacatatagtaaattatttaaagataggagtggagaaaccaaagaatctatgtaaaatataataatccaacagaatagtttactttccattgcatgtatcacttgggtgcagtaacttcttaggactctgagcgccgctgttcacctactaggagagaaaacgcagccagagctcaatccggattctcagggcttcaactacacaagccccacaaaccggctgctgggctgcagggaagctcactccagaatttaaagtgcccaggctacagagacaccctgaagccacagaaagacaaaggaaccggttgaaacacacaacgtgtccagtgaggactttgcagaattctgtaaccagactacaatggccgctcaaaggaatcgctcaaaggaatcaaaggattgcagcgggctggtcctgctctgccttttcttcgggattccatgggaggctggagcccggcagatctcctactcaattcctgaggaattagagaaaggctctttcgtgggcaacatctccaaggacttgggtctggcgccccgggagctggcggagcgcggagtccgcatagtctccagaggtaggacgcagcttttctctctgaacccgcgcagcggcagcttgrtcaccgcgggcaggatagaccgggaggagctctgcgctcagagcgcgcggtgcgtggtgagttttaatatccttgtggaagacagggtgaaactttttgggatagaaatagaagtaactgatatcaatgacaatgctccaaaattccaagcagaaaatctagacgtaaaaattaatgaaaatgtcgctgcgggaatgcgttttcctctcccggaagctattgatccggatgtgggcgtgaactccctgcagagctatcagctcagccccaataagcacttctccctaagagttcagagccgtgccaatggcgtcaagtacccggagctggtactggagcactccctagatcgcgaggaagaggccattcaccacctggtcctcacygcctccgacgggggtgaccctctccgatctggcactgtccttgtcagtgtgactgtcttcgatgcaaatgacaacgcgccggtcttcaccttgccagaataccgagtgagtgttcctgagaatttgcctgtgggcactcagctgctgacagtcacagccaccgacagggacgaaggtgccaatggagaagtgacatattcattccgaaaattacctgacacgcaattgttgaagttccaactaaacaaatatactggagaaataaaaatatcagaaaatctagattatgaagaaaccggtttctatgaaatagaaatacaagcagaagatggaggagcatatcttgcaactgcaaaagtgttgattacagtagaagatgtaaatgacaacagtccagagctgaccatcacgtctctatttagtccagtgactgaagattcacctctgggaacagtcgtagcccttttaaatgtgcatgatttagactctgagcagaatggacaggtaacctgttccattttggcgtatctaccatttaaattagaaaagtccattgacagttattacagattggtgatacacagagcccttgacagggaacaggtatcctcttacaatatcacagtgacagccacagatgggggaagtcctcctctatcaacggaagctcactttatgctacaagtggcagatatcaatgacaacccacctaccttctctcaagtctcctactttacctatatcccagagaacaacgccaggggtgcctccatcttctcagtgacagcgctggacccggacagcaaagagaatgcccagattatttactccctggctgaagacaccatccagggggtacctctgtcctcatacatatccatcaactcagacactggcgtcctgtatgcactcagatccttcgactaygagcagtttcatgagctacagatgcaggtgacagccagcgacagcggggatcctccactcagcagcaacgtgtcgttgagcctgtttgtgctggaycagaacgacaatgcgcccgagatcctgtaccccgccctccccacagacggttccacaggcgtggagctggcgccccgctccgcagagcccggctacctggtgaccaaggtggtggcggtggacagagactccggccagaacgcctggctgtcctaccgtytgctcaaggccagcgagccgggactcttcgcggtgggggagcacacgggcgaggtgcgcacggcgcgagccctgctggacagagacgcgctcaagcaaagcctcgtagtggccgtccaggaccacggccagccccctctctccgccactgtcacgctcaccgtggccgtggccgacagcatcccccaagtcctggcggacctcggcagcttcgagtctccagctaactctgaaacctcagacctcactctgtacctggtggtagcggtggccgcggtctcctgcgtcttcctggccttcgtcatcgtgctgctggcgcacaggctgcggcgctggcacaagtcacgcctgctgcaggcttcaggaggcggcttgacaggtgtgtccrgctcgcactttgtgggcgtggacggggttcgggctttcctgcagacctattcccacgaggtctctctcaccgcggactcgcgaaagagtcacctgatcttcccccagcccaattatgcggacacgctcatcagccaggagagctgtgagaaaaacgatcctttgyrtttgttagatgattcgaagtttcctatagaggataccccattggttccagtgagttttattttcatttttacttttgttaaaaaaaaaaagattggtttttactttgaagtttgcggcatgatggtggaaagtgtaaatgctaaaacactgatgagtagaatttgatgtttattaaggttttktttttktttttttttttttttttttttactttctggtaaaattcacctagtctcaatcaaggcctatatatcataaggctttgttatgattagctttgcagaaccttgtagtttatagtgttgttgagtacaatattgacaattcctaagacagacttccatacagaagtgcctgtcaatttatatttcctcctgggtggtcacatattgaaactccagccccttaagcaaccctcttgttctgaaggcaggtctggtaagaataggtaagtatcagaaagaaatcacctctggaaacacaacccaaatccaagaatactcaatgcagttcttcccaaggagaagggcaataggcctttttcaaactacattttatatatttttcaatctatactttgtggtgatagttgcagttgaatatactaagtttttcattaatattgaattarcaatttatttataacaatgtatgcttagatttttccagccctatttataactgrtaacactgcagtatcctttttgcatacaattctctaatttcacactgctatgtggaagatatagcattttaatttaactttcattgctcaatagggatcctgaggaggctatagagggtgaaattaagaatatttgggattctgcttttgtcttttttgttaaattttctagtgactaaggctgaaagtaaatatgggttgggaagacagataaatttgtacatgttcccgagaacaggagcaagagatatatgacaaagctatttcagtggctctttaatgtrtaaggaggcaaacacctgaaactctgaaaactctgaaattgagaggcaaaataaacttagagtcaagaaagaaatgccatttctgcagatcagaatataaacaccaaccacagctgtaaaaaagaaaagaatatatgcaacgaagggaaattatataaacaaaggatcattggaggtactgatgagttcatttagttcaatgaaaatagtgacgtattaggtagatctcttaattttattactagtattctactaaatgtggtagtataaagtcaaaaagcattccgaagtttctcaagacccttataattccatgatttttttcaggtcagtcaacatttgttgaatgataggtctgtggaaggaaagcacactctttagggtcatagttattaactattaaaccattgaaactattattttatatttgtgttaatgagagtcaaaattattgtgcattcatctcaaataattctattattttgaaaaatacaggtttttttttwaaaaaaaactgctcttgacattgtagctattgtgagaaaatattttgattataattatttaaaagcaatacaggacaccctggatgatggtaatgactagggcaatggttgcattccagtacttaagtatgaaataaggaattattactttctgggtgaatataggctagaattgaagacaaaaaaatttgttgcttatcttcagtacttccagcttcatagataattactcttaaaaggaacaagaatgactgcctctggatggaggaattggatagcaatgggccgtgggataggagacctataaaccttcatgctatattattttgtgcctttttaaattttgaagaaaaaatattcatttattcaagatatatgtaaattcagtaaataaaaagatatgatagttatgaccaagtggaaatatatttcctgatgtaaaaggaatcactgaggaaaaagattaaaatattttggctgtcaactcgtagtttaaaaaaaattccttgaaagaggtagagaaaagtcaagttgcagtcccacacagagcctctgggcgccgccgtcggccagtgcagagcaagcgctgacgccggggatccctcagcctctagcctgggattccctgcgcagccaacaacagaaaagaaaaccagctcccacacagaggctcccggctgcgcagaccttgcccagcacaccagattgccagctccgagacccgggactcctcmtgtcctgggccgaatgctcttttagcgcggtagagtgcactttctccaactggaaaagcggggacccagcgagaacccgagcgaacgatgggagggagctgcgcgcagaggcgccgggccggcccgcggcaggtactatttcctttgctgctgcctttgttctaccccacgctgtgtgagccgatccgctactcgattccggaggagctggccaagggctcggtggtggggaacctcgctaaggatctagggcttagtgtcctggatgtgtcggctcgcgagctgcgagtkagcgcggagaagctgcacttcagcgtagacgcgcagagcggggacttacttgtgaaggaccgaatagaccgtgagcaaatatgcaaagagagaagaagatgtgagttgcaattggaagctgtggtggaaaatcctttaaatatttttcatgtcattgtggtgattgaggatgttaatgaccacgcccctcaattccggaaagatgaaataaacttagaaatcagtgaatccgtcagcctggggatgggaacaattcttgagtctgcagaagatcctgatattagtatgaattcgctgagcaaataccaactaagtcctaacgagtatttctcattggtggagaaagacaatcctgatggtggcaaatatccagaattagtattgcagaagactctggaccgagaaacgcagagcgctcaccacttggtactgaccgccttagatggtggggaccctccccgaagcggtactgctcagataagaatcctggtaatagatgccaatgacaaccccccagtgttcagccaggacgtgtacagggttagccttcgggaagacgtgcctccaggcacctccatcctgagagtgaaggccactgaccaggacgagggcatcaactcagagatcacttattccttctttggtgtggctgacaaagctcagcacgtgttctctctggattacactacaggaaacattctaactcagcagcctttggattttgaagaagtagaaagatatacgataaacatagaagcaaaagaccgaggatctctctcaacacggtgtaaagtaattgtagaagttgtagacgaaaacgacaacagcccagaaataatcatcacgtcactctctgatcagattatggaggattcccctccaggagtggttgttgccctcttcaaaacacgggaccaagactcaggggaaaatggggaagtcaggtgtagcttaagtagaggtgttccatttaagattcattcttcttctaataattactacaagctastaacagatgaggccctggatcgggagcagaccccagagtacaacgtcaccatcgcagccacagacaggggcaagcctccgttatcctccagcaaaaccataaccctgcacattactgacgtcaatgacaacgcgccggttttcggacagtcagcctacctggtccacgtgccagaaaacaaccagccgggtgcctccatagcgcaagtcagtgcctctgacccagacttcgggctcaacsgccgtgtctcctactctctcattgccagcgacctggagtcacgaacgctgtcgtcctacgtgtccgtgagcgcgcagagcggggtggtgttcgcgcagcgcgccttcgaccacgagcagctgcgcaccttcgagctcacgctgcaggcccgcgaccagggctcgcccgcgctcagcgccaatgtgagcctgcgcgtgttggtgggcgaccgtaacgacaacgcaccgcgggtgctgtaccctgcgctgggtcccgacggctccgcgctcttcgacacagtgccgcgggccgcgcagccaggctacctggtgaccaaggtggtggccgtggacgcggactcggggcacaatgcctggctgtcctaccacgtggtgcaggccagtgagcccrggctcttcagcctggggctgcgaacaggcgaggtgcgcatggtgcgtgctttgggtgacaaggactcggtccgccagcgcctgctagtcgctgtaagagatggaggacagccacccctttcagccactgccacgctgcacctggtgttcgcagatagcttgcaagaggtactgccggatttcagcgaccatcccacaccctctgactcccaggctgagatgcagttttacctggtggtggccttggccttgatttctgtgctctttctcctcgcggtgattctagctattgctctacgcctgcgacagtctttcagccctactgcaggagactgctttgagtcagttctctgctccaagtccggacctgtgggtccccccaactacagtgagggaacgttgccctatgcctataatttttgtgtgcctggggatcaaatgaatccagaatttaattttttcacatctgttgatcattgtccagccacacaagataacctcaacaaagatagcatgctactggctagcattttaactcccagcrttgaagcagataagaagattcttaaacaggtaagtatttaaaaatgtatttaatcctttttatattacaatatgccaatatattccaatatagtggtattattttaagattctagataacttcttcatagagttcgcaaaatataggtcaaatttatggttatcattattaaaacaaaagtttaaattaaatgcctcagtcttcctactattcaaagacattttaaagcaaactacatgggtaatctccggtgacatttttatgaagtaaaatacctttcggttaaaaatataaaatacaggtatatttttacggcatggtattttaattgaaaccctgatgctactcaatttttctcaagtatttcatcttcatttactcaataaaggaaccttgtaagaattatagttaggcatcctacctgatgattttatcgggaccgtattatttccacttccagaaatgtcgttcctttcagtcggttaaaatcaattggaaccaactacaacctacaagttttcagctccagtaatattttgaaaactttttaaaaattaagcaagcccttttaataattactcctttcgcaggtgttcttggtaaagttttaacgtcacataatgtaagtattgtgtatcatcgtttttaagctctacaaatacgtgtgattcacaaaggtgagcgtaatcatttcttctggaatttcttagtcgttgcaataataagaatgggctctaggcgccgctgctcaccaatcagggaatgggaagctgcgcgccattgagtccctccctcccccgcctctaccacacaaagcggaatgagatggataytcacagatcctgacactggagacttagaagtattttccttcgctttctgatatattttggatrtagtcggcctaggacttcatagatacataagccgattcacaaccaaccagctcgagaaaccgcggaatatcggcttagagcctgccatggcgaatcggctacagcgcggggaccgcagtcggctgctgctgctgctgtgcattttcctggggacgctgcgggggttccgggccaggcagatccgatattcggtgccagaagagaccgaaaagggctccttcgtgggcaatatctccaaggacctggggctggagccccgggagctggcgaagcgcggagtccgcatcgtctccagagggaagacacagcttttcgctgtgaatccgcgaagcggcagcttgatcacggcaggcaggatagaccgggaggagctctgtgagacggtgtcctcctgtyttttaaatatggaacttctcgtggaagacaccttgaagatttacggagtggaggtggaaataatagatattaatgataacgcccccagcttccaggaggacgaagtggagataaaagtcagtgagcacgcaattcctggggcgcgatttgctcttcctaatgctagggatccagatgtgggcgtgaactccctmcagagctaccagctcagccctaataattacttttccttgcaactgcggggcagaacggatggggccaagaatccagagctagtactggagggaagcctggaccgagagaaagaggctgctcacctgctcctcctcacagctttagatggaggcgatcccatccgaaagggcgcagttcccattcgtgtggtggtcctcgatgtaaatgatcacatcccaatgtttacacagtccgtatatcgcgtgagtgttccagaaaacatcagctccggaactcgggtgctgatggttaatgcaacggatccagacgagggaatcaacggggaagtaatgtattcatttcggaacatggaaagcaaggcttctgaaatattccaattggattcacaaactggagaagttcaagtacgggggtctctggattttgaaaaatatagattctatgagatggaaattcaaggccaagatggtggaggtctctttaccaccacgacgatgttgatcactgttgtggatgtgaatgataacgctccagaaataactatcacctcttctattaattcaattctggaaaactctcctccaggtacagtgattgctcttctaaatgtgcaagatcaagattctggagaaaatggtcaagtctcctgttttattcctaaccacctgccttttaaattagaaaagacttatggaaattattacaaattgataacaagcagagtgctggacagggagttggtccagagctacaatataacgttgacagccacagaccagggaagcccgcctttgtctgcagaaactcatgtctggctgaatgtggcagatgacaacgataaccctcccgtttttcctcactcctcttactctgcctacattcccgaaaacaaccccaggggtgcctccatcttctcagtgaccgccctcgacccggacagcaaacagaatgccctggtcacttactctctgacggatgacactgtccagggggtgcctctgtcctcctatgtctctattaactccaacactggtgttctctatgccctacaatccttcgactatgagcagtttcgagacttagaactgagagtgatagcrcgtgacagcggggacccgcccctcagcagcaacgtgtcgctgagcctgttcgtgctrgaccagaacgacaatgcgcccgagatcctgkaccctgccctycccacagacggstycactggcgtggagctggcgccccgctctgcggaacctggctacctggtgacyaaggkggttgcggtggacaaagattcaggccagaacgcctggctgtcctatcgcctgcttaaggccagcgagccgggactcttcgcggtgggggagcacacgggcgaggtgcrtacagcgcgggcactgctggacagagacgcgctcaagcagagcctygtggtggccgtccaggaccacggccagccccctctctcggccaccgtcacgctcaccgtggctgtggccgacagcatccccgaagtcctggcggacctcggcagcctcgagtctctggctaactctgaaacctcagacctctcgctgtacttggtggtggcggtggccgcagtctcctgcatcttcctggtctttgtcatcgtgctgctggcactcaggctgtggcgctggcataagtcacgcctgctgcaggcttctgaaggcgggttggcaggtatgcccacgtcacattttgtaggcgtggacggggtacaggctttcctgcaaacctattcccacgaggtctctctcattgcggactcgcagaagagtcacctgattttcccccagcccaactatggggacacgctcatcagccaggagagctgtgagaaaagcgagccactcttgatagctgaagactcagctatcattttaggcaaatgtgacccgacaagtaatcaggtgagatttatttctctgcctcctaattgttggtgtcttggcacaagtcttttaaggagatgttttttgagcctgttatgaaaactgtttggggggggggtggggcggcatatatttagttcatatatatttagagcaatacatgtgagttttactttgcctttcatgagattacgataatctttcagaacgtttttgtgaaagtcatttttcaatcttggcatattttcttttgatttcaaaggggccattcaactatgctggtttggtttgaagtaagttgaattttagtattatttttctattatcagtgtatgaggctctcaatttattatatatagatacaaattaatgattcacaaacactttttatttccatttcaattttgctgtgccttcactgatttgtagttatattccaccattatttgctattactgctaatgttcaaattttgatcctgttgatttaatagcatgctccctctagctctccttctcatctatctatctatacacatgcacacacacttatacacgtaagcttttctctgagcaattttattttgattcttggtggctggtaatatgcttagatcctgttgactatttcaactttgtctcatttcttcatcctatcaacacagacatattgactggcttttaactactggatttccttgggagataaaatttagatcacattttttcttaagctctagatgtcttttccattactatggtgaagttacattgactgttctgaggaaataattgaattattgaactggtattatttccttttattcttttactttggtgtctgtgtttgtatgtatggaaggttttttaatgtagtaaatccatatatagaaataacttgattttgattcagtgcttctcaaaaacctattttcaaatgtgctaaagatgtctacagatttattcaaatagagtagtttgtgaatatataaatagattgaaggtatttggactttaattaaactgatttagctagtatccttctggctatttttttgttcattttcagtgtagttgggagtcatagattccttctttctttctttataaggtcattcttatggcaaatagtacattcagttcttttattcagaccaacttgttattgaagcttgatagttgcctgacatacatgttatctgaagcaatgtctaggaaagccaaatgaggaaaggagacttatctagggtttttgatcacaggaatcatttccataatcaattcagtcaacactctcacatcacttctaggtatttgccccaaattacttggatatttatgttccctttcaagtttagttttctcatttaggaatttaccttatgtcattagttgtaaactgactatctagggctcggacaaaaataatttcaactgtaggaaaggcaagtcttccaacagatgcctacatttttcttgaagtcaagaaaaatgttcaggtattttgagcatctagggataggatttatacttgtggaattccaaactgagaaaaatgatgtaaggcattgtactttgactggaattagttaaataaaaaggatatgaggtatttggctgggaaaaggagattgttccatattataaaacctcatctaaactaacttcccaagatcgtggagaacaaaaaggaagggttggctttgaaatgtgatattaagagggttatgttgattcggaggtagtgataaagttctgttaaggtataacatatagtcccattaaatagaggataaaaataaaacaccatcacatttcatgttattaattcctatggcaacctactaggctatacctttatattctctttatgatgaaacatgaaacaataatccttttcagaaacctcttttataagtgataagaagggtttggctaactttattctgaatatgccctatatagctttcagtgctcctccagttttctctgataaaactaggaggaaaattatctgcacatcagattgaaaataatactgcatatcatttcatagtggtcaaaattttcccataccacttgatggggatgttttcccacaaggtttttgttctacaacaggagagaagactttgcctagttcttccaatatgtgcattgcttctgcttagaaaaaaacaaacttttaaattctctttgctgggttaatgactgttctatagattcccatctctaaggaatcttctttggtagtaaacactggaaaacagtcactacsaaaactcataaaatgtctagtttcctatacattagtccaacacatcagtctaattctgaatcccattgaattagcaaaggcttccggctgcagttttctaaatagactcagagccctgctgttggccaatgtgctgcaagaactggagcctgggatctaccaggacgatattctgttcagtcacagaagcaagtcggagagtggccaagacttgggctttctgctcctgcaaatctgattccatacggattggggtgccctcaaactgggagcattgagttttcyatgtatggaagtaaatattttaaaagcactttgtgaaacattttctcttaacgtcggagactgcagcaacgcatgggaaggatgggaaacagggtgaagcagagaagcaggacccggcagtggcaagcactcttccctttcctgctgcctttgttctgcggggcaccctcggagcagatccgctactctattccagaagaaacggtccagggctccgtggtggggaaccttgcggaggacatgcggctgcatgttcaggatttattgacctgaaaccttagagttagtgcagagaaacaatactttaccgtgaacacggagaatgggaacatacttgtgagtgacagaatagatcgagagtcactgtcttcaaaatcctctgtgtcatacccttagagattgtagcagagaatcctctaaatgtttttcacataaatgtgatgatagaagatataaatgataacccacctcattttccccaaaatagcattgttttacaaatcaatgaactagcaattccaggcattcggtttggcctggaatctgctatagatgcagatgtagggcctcactctctccagagttaccagctcagttctaatgaacatttctctctgatgatggacaagactaaaggcaagaacgctccagaattagtgctggagaagcccctgggccaggagcaacagagctctcatctcctggtcctggaagcaatggacatgggtgacccagtcccaactggcactgctgcaattcaaattgaggtcactgatgccaacgataatgccccagtttttagccaggatgtatacaaagtcagccttagagagaatgtgcccccaggcacctctgtactaaaggtgacagccactgaccaggatgagggtgtcaatgcggagatcacctactctttcaaatccctacgagatgatattggaaatatgtttgtgctagaccatcaaaatggggaaattaaatccaaagacttaatagacttcgaatttcgtagcagttataccatgagagtagaagctaaggatggtggaggcatgaccagcgaatgtaaaattatactagaaatcctagatgagaatgacaatgccccagacgtggtttttacttcagtgtccagttctgtaactgaggacgcagaaccctggacggtgatcactctgttcaaaacacatgataaagattcgagagaaaatggggaggttacatgcctcataaacgaaagagttccttttagaatcgaatcttccgccaataatgactataagcttgtaacagatgggaccctggattgggagcggatcccggagtacaacgtcaccatcactgccactgacaagggcaagcctccgctctcatccagcacaagcctcaccctacgcattggtgaagtcaacgrcaatgctccggttttccaccaagtctcctacgtggtccmcgtggccgaaaacaaccttcccggagcctccmtcccacaagtcagcgcctctgacctggacctagggctgaatggccaagtctcctactccatcgttaccactgacttggagctgcggrcactgtcgtcctacgtgtccgtgagcgcacagagcggggtggtggtcgcgcagcgtgccttcgaccacgagcagctgtgcgccttcgagctcacgatgcaggcccacgaccagggctcgcccgcgctcagcgccaacatgagccggcgcatgttggtgggcgacctcaatgacaatgtgccgcgggtgctgtaccccgcgctggggcccgatggctccgcactcttcgatatagtgccacgcgccgcagagtccggctacctggtgaccaaggtggtggcggtggacgcagattcgggacacaacgcttggctgtcctaccacgtgctgcaggccatcgagcccgggcttttcagcctggggctgcacacgggaacctgctggttgctgtgcgtgacggaggacagccgccgctctctgcgccgctacgcttcacctagtcttcgcagacagcctgcaggaggcactgccagacttcagtgacagtcctgtgccctctgattcccaagcaaagctgcagatttacctggtcgtggccttggccttgatttctatgctcttcttcctcgcagtgattttggcggtcgccttgcacctgcgatgctcttccagcccctctgcctggggttgctttcaccctggtctctgttctaagactagaccaggggtttttcccaactacaatgagggaactttgctttattcctgcaatctgtatgttccctcggattctagaaaaagaagatttaattttctcaccatgacaccagaaacagtccccccacaagatctttctaatgaagtttctctggtagcaagcttcactgaagagaataacaagataagctctaactctgttgctcctactcacgtgagttccaatgaatgtctttcatttacaaatggatgaggtttaattttcaaaccaatattttggcaagaaaatcttaaacatattatatctactattgcttcaggtttgtttgcccactcttaatatttcctgttcctttctgtgtgggccagtaacttcattattagctttcatgtatttttgaaacattttcaccatttttacgggagactttttttttttttggacggagtctcgctctgtggtccaggctggagtgcagtggcatgatctcggctcactgcaagctctgccttccgggttctggccattctcccgcctcagcctcccgggtagctgggactacaggcgcccgccaccacgcccggctaattttttgcatttttagtacagacggggtttcaccgtgttagccaggatggtctcgatttcctgacctcgtgatctgcccgcctcggcctcccaaagtgctgggattataggcgtgagccactgcacccggcccggagacattgtttatacacacacacacacacacacacacacacacacacacgtgtgaaaagtgggtattatgatactgctgtcattgagatattttaattgaggaataaatttttttcctgtgatgtttcttgggacatcaatatttgagtatataaggctttttctttaatccattaactataaattttgaagaaaatgcatgagaaaatggagaaaatgtgttttttttttwwaaaaaattgagattaaggtctcattatgttgcccaggctggactcaaactcttgggctacagtaatcctcccacctcaatctccagagtagctgagactacagttgcctgaaactgtgcctggcagagaaaaaagcttaaaaaaataagaacatggtaatgatttgataatattcagttacatttacttttgattcttgtaattcaagtaaactcaattttatgtctgatattttctcacagctacctatatatttcttcccaatttaaaatatattattttattttatgcctagcaaatatctttacagtataaatatttacgctcatgaaagtacgtagccagttatttcttagggagaattttttccctatattttgatgggcttccaaaagtattaccagtaattctcagtaattacaattaggtcagttacccaggaaaaggtaagtctgtaacattctttggactaccaattttcttttactaagtttcctgaacaataaatatttttgaaatataatgtattaatagaattctggagtacttccattatttccagtcaatgcaagttggaatgcttctactttatgctaaaaatattaatgtttctttttcacttgggttcttgttaagtgtgattctgataatgtatacaatcacatatcatttttaggtttccataatatcatgaaaatttgatttttaagygttacatgtcaacaacctggtaaagtaatccttccattcaggatcattcaaggaatctatttaaaaatattttccccaaattatagctgaatcagaaagtttaaattattatattatatgatttgtcaaaaagagaaactcctagggagacatctccataataggtgtgttgggggaacagtaatctcaaagcagatgcactaacattataagattaaaatcattgtttatagaaacttccaattcatttaaaagctcattggggaaaaaaaagctcattgggaaaaaaaaaaaaagctcactaaagtttctattaaagcgaatacggtagatttccatccccttttgaagaacagtaggtggagctatttaagatataaaaacgaaatatcctttctgggagttcaagattgtgcagtaattggttaggactctgagcgccgctgttcaccaatcggggagagaaaagcggagatcctgctcgccttgcacgcgcctgaagcacaaagcagatagctaggaatgaaccatccctgggagtatgtggaaacaacggaggagctctgacttcccaactgycccattctatgggcgaaggaactgctcctgacttcagtggttaagggcagaattgaaaataattctggaggaagataagaatgattcctgcgcgactgcaccgggactacaaagggcttgtcctgctgggaatcctcctggggactctgtgggagaccggatgcacccagatacgctattcagttccggaagagctggagaaaggctctagggtgggcgacatctccagggacctggggctggagccccgggagctcgcggagcgcggagtccgcatcatccccagaggtaggaygcagcttttcgccctgaatccgcgcagcggcagcttggtcacggcgggcaggatagaccgggaggagctctgtatgggggccatcaagtgtcaattaaatctagacattctgatggaggataaagtgaaaatatatggagtagaagtagaagtaagggacattaacgacaatgcgccttactttcgtgaaagtgaattagaaataaaaattagtgaaaatgcagccactgaratgcggttccctctaccccacgcctgggatccggatatcgggaagaactctctgcagagctacgagctcagcccgaacactcacttctccctcatcgtgcaaaatggagccgackgtagtaagtaccccgaattggtgctgaaacgcgccctggaccgcgaagaaaaggctgctcaccacctggtccttacggcctccgacgggggcgacccggtgcgcacaggcaccgcgcgcatccgcgtgatggttctggatgcgaacgacaacgcaccagcgtttgctcagcccgagtaccgcgcgagcgttccggagaatctggccttgggcacgcagctgcttgtagtcaacgctaccgaccctgacgaaggagtcaatgcggaagtgaggtattccttccggtatgtggacgacaaggcggcccaagttttcaaactagattgtaattcagggacaatatcaacaataggggagttggaccacgaggagtcaggattctaccagatggaagtgcaagcaatggataatgcaggatattctgcgcgagccaaagtcctgatcactgttctggacgtgaacgacaatgccccagaagtggtcctcacctctctcgccagctcggttcccgaaaactctcccagagggacattaattgcccttttaaatgtaaatgaccaagattctgaggaaaacggacaggtgatctgtttcatccaaggaaatctgccctttaaattagaaaaatcttacggaaattactatagtttagtcacagacatagtcttggatagggaacaggttcytagctacaacatcacagtgaccgccactgaccggggaaccccgcccctatccacggaaactcatatctcgctgaacgtggcagacaccaacgacaacccgccggtcttccctcaggcctcctattccgcttatatcccagagaacaatcccagaggagtttccctcgtctctgtgaccgcccacgaccccgactgtgaagagaacgcccagatcacttattccctggctgagaacaccatccaaggggcaagcctatcgtcctacgtgtccatcaactccgacactggggtactgtatgcgctgagctccttcgactacgagcagttccgagacttgcaagtgaaagtgatggcgcgggacaacgggcacccgcccctcagcagcaacgtgtcgttgagcctgttcgtgctggaccagaacgacaatgmgcccgagatcctgtaccccgccctccccacggacggttccactggcgtggagctggctccycgctccgcagagcccggctacctggtgaccaaggtggtggcggtggacagagactcsggccagaacgcctggctgtcctaccgtctgctcaaggccagcgagccgggactcttctcggtgggtctgcacacgggcgaggtgcgcacggcgcgagccctgctggacagagacgcgctcaagcagagcctcgtagtggccgtccaggaccacggccagccccctctctccgccactgtcacgctcaccgtggccgtggccgacagsatcccccaagtcctggcggacctcggcagcctcgagtctccagctaactctgaaacctcagacctcactctgtacctggtggtagcggtggccgcggtctcctgcgtcttcctggccttcgtcatcttgctgctggcgctcaggctgcggcgctggcacaagtcacgcctgctgcaggcttcaggaggcggcttgacaggagcgccggcgtcgcactttgtgggcgtggacggggtgcaggctttcctgcagacctattcccacgaggtttccctcaccacggactcgcggaagagtcacctgatcttcccccagcccaactatgcagacatgctcgtcagccaggagagctttgaaaaaagcgagccccttttgctgtcaggtgattcggtattttctaaagacagtcatgggttaattgaggtgagtttatatcaaatcttctttcttttttttttttaattgctctgtctcccaagctggaatgcagcggtacgatcatagctcactgcagcctcaaactcctaggctcaagcaattatcccacctttgcctccggtgtaacagggactacaggtgcaagccacctactgtctgcctatctatctatctatctatctatctatctatctatctatctatctattwctttcttgtacagacaggagtctcactatgttgagcaggctgatctgaaacttgggctcaggctagcctcctgcttctccctcccaaactgctgggattacaggcgtgaaccacagtgccccgcccttatcagatattcttttctggctgggcgcggtggctcacgcctgtaatcccagtactttgggaggccgaggcgggtggatcacctgaggttgggagtttgagaccagcctgaccaacatggagaaaccccgtctatactaaaaaaatacaaaattagccgggcgtggtggtgcatgtctgtaatcccagctacttgggaggctgagtcaggagaattgctttaacctgggaggtggaggttgcaatgagctgagattgtgccattgcactccagcctgggcaacaagagtgaaactctatctcaaaaaaaaaaaaaaaaaactttatcctctagtttcatccattgatgacacttgctttaatcacttattacaatcacctccaaatgaagattttataattccattgtttcttctacagttgttaattggctttctaccttgaagaagagttttatattctctatatatgtttgtttctatgattctggaagcatggttttctattttattcaatggcctgtaatctgttaatatcaattatttattttgatgctgaaattgtcccaggattggcctttgggactccctttaggctgatttctatgtcctttctgttacagcaagcttgggattatatccaagatttgtaattccaatgtacttacttctgtcagtgtaaacaaagtacgatttctggactagatgacttgggcattgtgggggaggtggaaattagaggtattctctgtttttcctgtaggatcttgcatttcttcctcttgctgcttgtctctttgtgtcgggaacaggccccccaaaatctggccataaactggccccaaaactggccataaacaaaatctctgcagcactgtgacatgttcatgatggccgtaatgcccatgctggaaggtagtgggtttaccggaatgagggcaaggaacacctggcccgcccagggcagaaaactgcttaaaggtgttcttaaaccacaaayaatagcatgagtgatctgtgccttaaggacatgcccctgctgcagataactacctcaatccatccctttatttccgcccatctcttcgtttcccataagggatacttttagttaatctaatatctatagaaatgatgctaatgactggcttgctgttaataaatatgtgggtaaatctctgttcagggctctcagctctgaaggctatgagacccctgattccccacttcacacytctaaaaaaaaaaaaatttttttttctgagcttggagaaatatatcccttagtacacttggmatttataaagcagacatcaataaatttatatatatgtgacagataccaacaacaatccagtccccttccctcataccttatttatgtacatatattttatataatagatataatttattaacaatttataaaattactttgttaatactctatatcattttctagctgaatttatcaatgataatgctcttttcccacttttatttttttcccattgaccatgcagcagttttgtgtagaccgtctgataacaactgatctgtttatctaggggggagaaatctaattcaatggaaaatataaataaaattgtgataaacttttgtaaatagagtggcttttaactacacttgagatggctagcaaattcataaagtgaatttastttctttcaaagttcagtaattctttctggccattagggatatgtccatttatactttctcagtatcccaagtcatttcatggttttaaatcattcatgaacttccaaatatagtgaatttatttcttctgcatttaaaattttatcacttaaatatacaatataccgtattgccatgacgaaaaatggtaaagactatttttcacttctgttatgcatttcattaatacgatatctgtatgtgtttccaagttagacatttcttttgcccatttcctacactaatgatactaatgatgactttgtggaatattcagaattaacaaaatgtgttttgagtgctttttttagtactggggcaaatttgcagtaatatcgcctgctttttacattaaattccccataacttttacaactatgggaaaatttctgaaacgtgcacagattccaagtgttttctgagaactttatgcttattgtagagtggttacagacactgaatgctaaagtgtattactctttgaaaakcattgcttgatttcttttggtgaattctgtaaaggtgyagggaaacataacgtcccaattattttttctttcttctttgtttgctgcctatctactttgaaagatacaatagttaaaacccagaaaagagattggaaaccccttagagaatgaaagacatccaagggctctaaaatgcggcagttgctgcttctgagaccaaaaaagggggcaaaatatagagtgtgtggttctacttgtgtgattttttgaaagaaagtatttgaatttatctaaaaatactaaatttgtatttacattagttttcaaatagaatttaataagtacagtgttctataggtaatattgagagaaatagaggacaatgaaacctctctcctccatcatcttgtatgaactaccaaaatgtttatcatatggacagttctcatatatagtcaaatagaaagaaagacataataggaaaayaaatgacttgggaaactaagctaacatggtctaattattctgacctctgctcacctaacttgatttaggaacaaatcattgagagttagagcatgaatagtcaagactgttagaccatatctcaaatatcagtgacttcaatcaactatgtttccagtttaagctgaataggctttattaaatagttgttgaatgaatggataaacaaataatgtactctggggattacctgataccaggattctgaattttcagatgtatcatagaaggatagcagctttgcaattaggtaaattgttaactgtgtcacctttagcaagttatttaatctctttgagcttcagcaaagtaggaataatcatatctaatttgaaaggtcgtggtgatggctagggctaacaaaaatctgattcacaacatgcaattaattaacagtagccatttttagtggttgaccaaaaaaaggatttatattttcaatgccagcacactcgatgttctgttgggaaaaataataatgatttttgtgtgcttctccatatggtataatggaatgatttgtggatggaaataaaactgttctaaaatttttgtgacagctggtttaaaaatcttaagtgcctaggcacattcttgattgagaagccacagttttaggccataaaagatgggggaaagatttttatatgagacaattttgtgagtgttactttttctttgtctgaaccatagtgaaatctaaacaaggatcttgtgaaacttattttaaagaagcagtttacttcaatgggatcttagataatttcaccagaaaatggatcaccgaaaccagaaggctggtgatcattatttggtttgggccatataagaattgaaactaacggcttagctttaggatttttaggacacttgttgataatttaggattcataattaacatatgtgttgattgttttctgagactaactgggcaatgggtttggatgtgtttacatttattctgattccagtcataaaattatgtcaaggactttccttgtctttttatgtgtatgacagatgtgtatgtatccatttcatctaacaagttaaagcgttcagctataatttaaaatttgtagcttcactgttttatagtacctaaaattggaatgtaatcagtcagaagacattcatccactgctttcattccagaagtattatgctttttgaagcagcaatagcataggaatgttgaggagactatactatacttttatagcatatttaatctcgtagatcacttttcaatgaattataaggctgatgacaaatgagcaaattgtatcagttttctttatgacatgtaacagagtatagctgtgatcatgaattggatagttctggtgtaaaaatctgctttatccccatataagatgtcaggttcagaaaagcaaacacatagtttcgaagrgatgttgatcaaactgatgaggctaaatctcaagaaagagacacagttaccctctaatgttacactttgagttcacctttttttttttttttgagacagagtctcaatctgtcgccaagctggagtgcagtggcactatcttggctcactgcaacctctgcctcctgggttcatgctattctcctgccttagcctcccgagtagctgggactacaggcacacgccaccacacccagctaatttttgtatttttagtagagatggggtttcaccatattggccagaatggtcttgatctcttgatcttgggatgcacccaccccacctcagcctcccaaatagctgagattacaggtgtgagccaccatgcccgaccactttgagttcacttttaagaaaccatacttaatggaaaattaccagtaacagggcatactgtttaggatgcattcctaaaatattaatggcaaaagatagccagcctatggcaaagctaattggaaaaaatattttataaaggatgagacttctggataccatatgggaagggctctggttcaggaaaatgtttttaaaaaactgtcattgaagagaccatagaatcaaacaaaataatttaatctgtatgtaaaagaagttggtaccaccataatttttcttatacatgtcatataaggatctactctgtgtattgtcattgagggcagatataatttcttagttcatcattaactctctgaagtatttcacacagtagtttgtacaccttctaagtactcaatacaatgcttgagttcaattattggaaagtggtctcttggagaaaaaagaatcatagtgcaaaaccaattattttacatggacttttcctctatatctaagccctaataagaggcagctgtctgatatacatacatacatacatayatatatatatatatatatatatatatatatatatatatatatacacacacacacacatatatgtatatatatatttggagtaggggatggagtcttgctctgtcacccaggctggagtgcaagtggtgtgatctcagctcactgcaacctctgcctcctgggttcaagcgattctcctgcctcagcctctccagtagctgggattacaggcgcctgtcaccatgcccagctaattttttaaaatatttttagtagagacagagtttcatcaagttgkccaggctgctcttgaactcctgacctcaggtgatccacctgccttggcctcccaaagtgctgggattataggcatgagccaccgcaccctgccaactgtctgacttatcttaaaaggctaaggacctggtttgtttgtcaaattttgaaaatagatgcctcagttcataagatttccatattgtgtggcaggcgcctgtaatcccagctactcaggaggctgaggcaagagaatcacttgaacccgggagacagaggttgcagtgagctgagatcacgccactgcactccagcctgggcgacatagtgagactctgacaaaaaaaaaaaaaaatccatatgtgaaaattcttagaagcttcctatacaatttcagctgaagattcagccaacagttcattctgagactgtgttccatggaaaaagtaaagcccaggcatggaagtgggaatggaaagaaagattctaagcctacaaatactcaaacatcaagaagaaataaaaataagtcatcacttcracttcatgtgctaacatcactgaggttataaattcccaggaatattttattgcgggagcaagactgcactgctgcctttcagcttgcaaattccartgagaaacgtctttctctctgctctcaactaactctacagaacgctgtcctctcatttcttcaggctgcagttctagagtagggactcagagtgccactgttggccagtctggaaacagagataaatgagccaatccccagacattccggcttggtggcttttctaatttcatggaatgcaaatccaagagcagacccacaacattcctattatggctcctagttctacaaattataagcaggaacggaacggatttacaggcaatgagttcagctccttcttggctggagattctataatccaagaagagtttgaaaaggggcttatttgggctggagcagcagcaactctaactgtggaaaaggtggggaatggtgctggactgacagtctgggtagaaccaaggcgactactgcctcctttcctgctatttctatcctgctgggcattctctatgatgcagatccgttattcagtcctagaggagctggccaagagtttggtggtgggaaaccttgccaaggatctgggactcagtgtcgaggacatgcccacttgaaagcttcgggttaatgctgaggaataatacttcattctaagtggggaaagtggagacttacttgtgaatgactgaatggatcaggagcagatacgccccccaattatagcttgggccataacgctttgaaatagttgaaggccaggcatggtggctcacacctgtaatcccagcactttgggaggccgaggcgagcagattacgaggtcaggagttcgagaccagcctgaccaacatagtgaaaccctgtctctactaaaaatacaaaaattactgggcatggtggtgcaggcctataatcctagctactcggggggccgaggcaggagaatcgcttgaacccgagaggcaatcgcaccactgcactccagcctgggtgacagagcaaggcgccatctcaaaaaaaatgaacaaacrgtagttgaaaattctttaaatgtttttcacattaatatggagattcaggatatgaagaatcatgcaccacggttcagcaggaatgttattaagttacgtatctctgagtttacccagctggaacaagatttgcaacagaacctgcagaagatcctgatgttgagagaaattccttacaaaattatcaccttagcagcaactctatatttctctttgaagtaaaagtgaccaacagtggaaagacatatgttgatcctgtgttagagaagctgcttgactaggaaaagcagagctcccatcccttagtgctagcagccttagacggccccccaacaaagcagcatcactcaactcctgatcctattggttgaagccaatgacaaccctgtgttcatctaggatgtgtacagcgtcggccttcaggaagatgtgcatccgggcactcctgtgctgagagtgagggccaccaaccaggactagagtgtcaaggcagagatcacatatggcttcacaacccagagtacccatatctagtttggccttgatcaaatagtggagaaatgaaaactttaagtacattggacttttaaagatttttaatttccatggttttggtagcaagtgacagagagggactcattgtccagtgtacagttgagaccgaatttctagaagataatgacaatatcctagaggcgatttttacttctaattccacaatgattcccaaagattctgcaccttggacagtaatcactgtccaggatttaaatcacaagatctttaaatcacaagatctggattcgggagaaaaygaggtcacatgtctgatataagaaaatgcrccttgagaaaaatcttcctccaataattaactacatgcttgtaacaaatggggccgtggaccaggaacagacccaaggtataacatcagcatcactgccactgacagaggcaaaccaaccctctcgtccagcccaagcatcaccctactcattggcgatgccaacgacaatgctctggttttctaccaggcctcctacgtcgtccacgtggccaagaacaatcttcccaaagcctccatagtgtkcaagtagacacctccaacctagacttgggacccaacagccaagttccctattccatcgtggccagtgacctggagccacaggcgctgtgattctaggtgtccttgagcgcacagtgcgccttcgaccaagagcagccgcgagccttcaagctcacgctgcaggcccgcgaccaggactagctcgcgctcggcgtcaacgtgagcctgygcgtgttggtggacgacctgaatgacaacgcaccgcgggtgctgtaccccagctctggagcgcaatggcttcgcgctcttggatatggtgctgcacgcygcggagcctggctacctggtcaccaaggtggtggctgtagacgcagatgtgagacacaatgcgtggctgtcctaccacgtgctgcaggccagcaagcccaggctcttcagcctggaatgcgcaccgacgaggtgctgacagctcgcacgatgggccacaggaaagcgactcgccagcgcctactggtcgcggtgcactgcggtggacagccgctcctctcgctaccgccacgtcaccaccactaccgcccctcgtcgccgacagcctgcaggagactctgccagacctcagcgatcactctgcaaagctacagcctgaatccaaaattaatttatatctggtgattgccttagctttaatttcctttttattcttcctgattgcattgtttgtgctggttttaaagtgccgaagaccccaaaatgatcctgtctgagtctttcccacggatgtctatcccgcgctaagccccaggtttctgggtaactgtagctctatgatgccatattcctaccaggtgtgtgcttctcctacgaatccagggctgagtgaacttcttttttgaatccctacccctcaggactcaatagcagtttcactgcagaaagccccttggggaaggggatgattgtgattattctaattgcttgggcagaatccactctccaaggtgaaaaattcttgatgaaactaagttcagtcacaagcaggttttcttctagcattaaatattttcagagatctcagtaaaaagcatttctagcagcaagaccaaaggcctaagatgagaaatatttggcatggtgagcttgagggacagtagtcaggcagacaagagtatcagacatgccagagcatttggggcctgtaggtaaggagcatgttttgattatatatatttgtatgtgtttgattatattttataattttactttgatattcaaattgtactgatccaaaaataagggagggacaaatcttggccattgtagtatgagagatgtaaatttacaactcagaatccctgcttatcacttctccttcagcacacaactgtttcattttctatttaagaaacttcctctcactgcaaaaagacattctggctgataaagttagcctataatttcagtaaatctaagaatatgactaatggaagttgccagacctaaactttgaaaattattgttccactgaagagcgtcttatgactgagtgttccagtctccttctcaagctgaaccttgcttttcaaaccagattaagaacactatcataagttatactgcattttrtttccctacccatgtccactgcatcattctctatagtacaaagagcttgtctcgccaggcgcatctataatcttagcactttggggcgccaaggcgggtggatcacttgagcccaggagtttgagaccagcctggacagcatggcaaaaacccatctctacaaaaaaaaaaaacaaaaattaacaaggtttagtggtccatgcctgtggtctcagctacttgggaggctgaggtgtgaggatcacctgagtctggggagattgaagctgcagtgagctgtggttgcgctcctgtactccagtctgggtgacagaattagaccctgtcccaaaacaaacaaacaaataaagagcttctctccttatgacttatttaaagcttgggaaattgttccaattcaaatgctttaaatggacttgagctaaaacagaatgtggtatatgaaatgttcttataatcaggtgattgtaaaaattgatccagataatgttagcatagcattttactgaactagtagtttacaaacacttcaaaaattatagaataacatttgcatataaaattcctcatacatttycctatcagtgaattggaagcttacaatatacaatattaccaaaaagacaaaaaaaatgaaaaggaaacagttacctttggaaaacataattaggtaaaatgggtaatatggaaagtctgaaaactgaaaaaattactgataagtcaagagaaaaggaatattagtaggaaaattcataaaagtgtgtctgactactcacagcaggtttccttattggtatgtattctgtggtccatctaagctatgttaattttattttaaatgctacctgggtattggcttytaaaaggaattcagtaaatcagataatttggcatcttcaatctagattctgatgctcacctgaaaagtctgctaaggattggaaaccaagaaaagtgaagtatctcaacagatatgtgtcacttgtgtgtactggattttttttttttttttttttttttttttttttttttgagatggagtttcactcttgttgcccaggctggagtgcaatggcatgctctcggctcactgcaacctccgcctcccaggttcaagtgattctcctgcctcagcctccctagtagctaggattacaggcatgtgccaccacgcccagctaattttgtatttttagtagagacggggtttctccatgttggtcaggctagtcttgaactcccaacctcaggtgatcttccctccttggcctcccaaagtgctgggattacaggcatgagtcactgcgcccggtcgcgtactggatttatattgtgtaatactttgctctagcagtatagtaggtgagacagtgactgtgtctagtgagcaaaaggcacttatttgacacttttgactcttcctttctacttaccttatttaaaattgatttttgcatgtggcatgatgcaccagttcattgaggtaggggttgaagttatttcccatttttttcaataccatttattaaaaatattttcctctttctgttgaatttgcttggtgcctttgttgaaagtcatttcactgatatatgtagttctatttctatattcttgatcatgtttcatttgtctattcttttactaatagcacactgtctcaattattgtagctttatagtaagtcttgctacaaagtcttactacaggacaaagcttgtaggatttttgaatgggatggcattgcatctatacctttatcagggaaagagggaaggagggaggaggatcatcttaacaatattgacacttcaaatccatgaacrtggtatatatttccatttaattaggtctttaatttctctcagctatgttgtatagttttcagtgtagagaggtcatgtatatttctcattaaattgtccctacatatttgatgttttctaatgttattgtaaatagtatttttaaaattgtatcttctaattgttcatttctagtttacagaaaaatgaaaaactatgtttttatgtattctatatgcttttgaaaagtaagaggtgcaaagtgctctattcttacactatattgtgtgagaatataagtcgaaaccactctgcataagttcaggcttccattctcttcagtttgtaggttgagagaacccatccagaaacagtaaacattggtgtctgcccaagtctggtcctgggtggttcattcattcatttacataacaaatatttattaactgtctgctatatgcaaggcactgacctatggactaaggatgcagcaatgaacaaggcatatatgattcctgagttaatgggccctattctaatacatgatattttacaggtctgataaaagccaacaaggagaaatacaaaagcactaagagaaagcttatagtagggaagcttcgcctaatctgaaggtcaaggaaggctttctttttttcggaaagtgatatttagagagatgaatagattaataggatgagtagaagttatctaggtaacaaggaaagtaaaaaagaaattgtcaggcagaggaaatagcatgtgtaaagatctttttaaaaaataaaaggtgtgactcaagcaatttaaaagggctagggaggctagaaacagaaaataaatagatgaaactaataaggcagggagagccttgtaaatcacacttaaaattctggattttgttctaaatacccttgtacttaggagctattaaaatattttaaacaaggcagtgacaagatatttgaattattaagcttactctggctgctatatggagaattgatttatgagggttataaatagaaataggaagataagataggagactatggcaatattcctggtaagaaatggaagaagagctggcttggattaaaggggaggcagtggatgtagaaataaatggatgaattatagatatatttaggaaatgggttcaataagacttaataatggaataggtggaatataaatttcatgagggcagggggtgttttgtttattattatattcctaggtgtctgaaaatattgttgtgttgcctggcaagtggtagatcttcagtgaaatattattaactgaataaatacaatggataaatggggagcagggattaagagtgattcctgggtttccacattaaggaactggatggacaaagctaccatttgatgagaatggaagactaaagaatgatagatttaagagaaatcgagttgagttccagccatgttcatttgaaggatctgagaaacagtgcagatattcagtgtgtgattagacatatggtcatcattcttttttttttttgagatggagtctcgctctgtcacccaggctggagtgcagtggccctatctctgctcactgcaatctctgcctcccaggttcaagtgattcttctgcctcagcctcctgagtagctgggactacaggcgtgcaccaccacgcctggctaatttttgtatttttagtacaagacagcatttcaccatattggccaggctggtctcgaactctgatctgcccgcctcggcctcccaaagtgtggggattacaggcgtgagccaccgcgcccagccggttaccattcttttactctgagttcttccattgtgatcatctagtcagatgggtagatccttataaggctgagcataataagcttcctgatagctctacactggtatgttttggggttcatggctgagctacttttgtgttttatttatcttcctgatctctttttcactgtaagaaacatccagcacccagggaaatttgctgtctaattcatactccactcttcagactagtcctagtgttcagttttgttttgttttttttctgtgtctggaattctattaaaatgtgtcaggctgttttaatttttgttgtttaattttctttcacatgattatatgtgctccatggatttttttgtttgtttgttttttgtttttgtttttgtttaagcgkggtcttgctcttgtcgcscaggctggagtgcaatggcttgatctcggctcactgcaacctccgcctcccgggttcaagtgattcttctgtctcagcctcccaagtagctgggactacaggcacatgccaccacacccggctaatttttgtatttttagtagagacgggtttcatcatattggtcaggctggtctcaaactcctgaccctggtgatctgcccacctcggccycccaaagtgctgggattacaggcgtgagccaccgcacccggaggaaatttttaacctcagtttttcttcaccatctgtaaaactgcatagaaggaatgtttaggataaaagatgcataacaatcataacaaaattgttgggttttaatgttatgagtacacttggaggattctatgtccacacataccttaaacatcctatagagtccttagcattttaaagttgaaaccaacagtatgaatgatggtagaattttcccccccaggaagttagaactgttccatatcttgatagagggatgggttataaggatgtacacattttccaaaactcattgaacttaagagtcttgcatgtgactgtatataaattatactttaattgaaaataaatttaagaaaataaaattggctgggcgtggtggctcacgcctgtaatcccagtgctttgggaggccgaggtgggtgaatcatctgaggtcaggagttcgagaccagcctggccaacatggygaaactctgtctccactaaaaatacaaaaattagctgggcatggtggcggacacctataatcccagctactcgggaggctgaggcatgagaatcgcttgaacccaggaggtggaggttgcagtgagccaagatcatgccattgctctccagcctgggcaacatgaacgaaatgccatcttaaaaaaaaaaaattaaaagaaaagaaaattagcctcccccaccctcactatacctcagactcacccctgaaagatcactactattcatccctggttatgtacacttacaaacattttctgtgtgtatgcgaatgtatgtgtggggttttctttgcacaacaggatcattttacagtatatatactgttgtgcaacttgctctttccacttaatatctcaaggaatcttttctttgaatctttatagccatgtacctcaatcttagtagttttctttattttatttttgaataggaaatacatttacatggttttaaaaatcaaaacaatatactatgtatatattgagaagtctgacttccatccctatcctactcctattccacccttgcttcctcctgtcccctgtaggtaaacattttataactttattaagcatcctgtcagcatttcttatgcaaatatgtacatatatttttatttccccattttttttacaaaaagataaaatactatacaccactttatatcttcctttcttcacattatatcctttaaaaatatttccatattggccgggcgcggtggctcacgcctgtaatcgcagcactttgggaggccgaggcgggaggatcacgaggtcaggagatcgagaccatcctggctaacacggtgaaaccccgtctgtactaaaaatacaaaaaaaaaaattagccaggcgtgatggcgggcgcctgtagtcccagctactctggaggctgaggcaggagaatggcgtgaacctgggaggcggagcttgcagtgagccgagatcgtgccactgcactccagcctgggcgacagagcaagactgcaactcaaaaaaacaaacaaacaaacaaaaaagaacttccatattaatatatagaaagctgttttttttaacagttgcttagcattcctttggattattaaccagtctcataaatgagcgctattgaatagccctgtacctacatcagtttttacatatgcagtatatctttgggatgaattcccagaaatggaattgaaattgctgggtcaaagagnaaataggtgtaattttcttaggtattttcacaagaagtgttaattctaactttctgttttgaaatgatttcaaattttcaaaggagttgcaagaattgtacaaagaactgtatctccttcacccggatgcaccgggtgaattatatgtattatataattgtatctgtaggccaggtgcagtggctcactcctgtaatcccagcactttgggaggctgaggcaggtggattacttgaggccaggagttcaagaccagcctggccaacatgataaaactccatctctactaaaaatacaaaaattagccaggcctggtaccccatgcctaagggtgaggcatgagaaatgcttgaacctgggaggcggaggttgcagtgagccgagatcgcaccactgcactccagcctgggcgacagagcaagactctgtctcaaaaaaaaaaaaaaaaaaagtaaaaaagttttttaaaaagatgtatctatatatacatatttacatacacacccaagtgtgtatgtatatatgtttgtgtgtatgtacacaaacacattatttttatatgatatgatttttttatgacatgattatttttatgacatttgagagtaagttgtagaaattatgtttctttattcctaaatacctcattgtgtatttcctaacaaggacattcttttatataattaaattttaataataaaaatcagaaaatttaacatcaatgcaatataattatttagcctatagtccatatttaaattctaccataccttatagtatattttactatacctcatagtaattttttttagtccaaaatatcacacattgcatttagttgccatgtctctttttttttttttttttttgagacagggtctcactctttcgcccaggctggaatgcagtggtatgatcttggctcactgcaacctccgcctcccaggttcaaatgattctcctgccttagcctcctgagtagctgggactacaggcatgtgccaccacactcccaccacacccagctaatttttgtatttttagtagagacaaggtttcactatgttggccaggctagtcttgaactcctgacctcaagtgatctgcccacctcagctaagtgctgggattacaggcgtgagccaccatgtgtggcctagttgccatgtctctttaatctactttaatctgaaacagttcctcagccttgtttgtttatatgaaactgacatttgtaaagactagaagccatttgtcttgtataatgcctttaatttatatttgttttatgtttcctcgtgattttatatatagagtttgtttgtttgtttgtctgtttgtttgttttgagatggagtctcattcttgtcacccaggctggaatgcagtggcgcagtctcggctcactgcaacttctgcctcccaggttcaagcaattctcctgcctcagcctcctgagtagctgggattacagatgcctgccaccatgcctggctaatttttgtacttttagtagaaacggggttttgccatgttgcccaggatggtctccaactcctgacctcaggtgatccgcccgccttggcctcccaaagtgccgggattacaggcatgagccaccgtgcccrgacctcatgattgtatttatttatttatttaatattattattattatttttttttttttgagatggggtcttgctctgtcacccaggctggtgtgcagtggtgcgatatcggctcactgcaaccgctgcctcccagattcaagcaattctcctacctcagcctcccaagtagctgggattacaggcatgtgccaccacacccggctaatttttttgtattttttttagtagagacgaggtttcaccatattggccaggctggtctcgaactcctgaccttgtgatccacccaccttgacctcccaaagtgttgggattacaggcgtgagccaccacacccagccttatgattgtatttagactagacatttttttggtagtatattatttagccattgctgtgtaacaaattatcccaaaacttagtggcttaaaagaagcatttattatctcataaattttgtggatcaggactgggtatagctttgctgagtgcctctgcctcaaagtcttacaaggcagcaattaaagtgtcacctaaggctattgtcttatctgaagggtcaacagaggatggatccgcttctaatctctctcacatagttaatggcaaaattaagttccttgtggattgttagactaagggttccagttccttgctggttgttagcttgaggtctacctcagttccttgccatgtggacctccatagggcaaccagcttctgttagagcaagtaaaggagagtgccagagagggcaaatgtgatgaaagccacaatctttttataaacctaattttgaaagtgacatacaaggctaggcatggtggctcaaacctgtaattccagcactctgagaggccaaggagggtggactgcttgagcccaggagttcaagaccagcctgggtaacatgacaaaaccctgcctctactaaaaatacaaaaattagctggtctggtggtgcatgcctatagtcccagctactcaggaggctgaggccagagaattgcttgaacccaggaggcggaggttacagtgagccgagatcacaccactccactccagcctaggccacagaatgaaaccctgtcaagaaagaaaggaaggaacaagggagggagggaggaaggaagggaggtagggaggcagggaaagaccgagaaagtgacataccatcatttttgctgtagtttgttcattagaagcaaaatcacttggtccagcccacactctggggagatgattttctaactccatttgtaataacttattctacttttattagttggcattatacagtaagaaagagctttcttttctcttcttatttattcatatatggctcatgtgttttttccaatgagttatattctattactaacattttttattttgacctcaaattgttttagatgttaccaataagaacctcttcaagctggttcttgtgtccttttgccataactctctcattttcttgaaccctttcttactttctgatataagaaaatattagagactcatactttccttgttccagttctgagatgaaccatttatccaaaagccttgcttcattttagtagggaatagtatttagaaactaagatctgggtgtgaggtatgctcactgctaatgggctgtcactgtttctaggccttgtcagcagacggagctaggaaaaacacacataaacacacccatatttatatttgtacacacactccctcaaaatcgtgagttcatattgatacctccagttctggttcttcctagccttccccctttccatctttgtatttttattttccaacagtaagaaccctggctcccagtgctatgaatatatttactcatttgctccatccactgcactccagcctaggccacagaatgaaaccctgtcaagaaagaaaggaaggaatgagggagggagggagagaggaagagagagaaggaagaaggaagggagggagggaaaactgagaaagtaacataccatcatttttgctgtagtttgttcataagaagcaaaatcacttggtccagcccacactctggggagatgattttctaactccatttgtaataatttattccacttttattagttggcattatacagtaagaaagagctgctgaagatttgcttgcaattggttgtctttaaactgagggtatattgtcaaagtactgtgctgaaaagttacctgtagtatagttatgtgattcattaaaataaagtttgtttctattatgtgcagttttagagttttgccacactctggttgattagtatattttctgttgcttttttgttttgttttgttttgttttgtttttgagatagggtctcgctatgtcacccaggctggagtccagtggtacaatcacagctcactgcagcctcaacctcgtgcacttaagcgatcctcccacctcagcctcccaaatagctggggctgcaagtgcacaccaccatgactggctaattttttaattatttatttatttatttatttattttagagatggggtctcactatgtttccccaggctgaccctgaactcctggggtcaagtgatcctcctgccttagcctccaagtgctggtattacaggcataagccaccacacctagcctagtattcttttttgaatatgtaaaacattaacataaagtcaaaactattaaaaaaaggtgtactcagaaaattgtcaytcctcccctataccttctgcctcattcacaccacactctgtagataatcgatttcattagtttgtggtttatcctcactgtgtttctttttgcaaaacgcaaaaacaaaacctatacatatttatattttcttatgtcctcttctttcttacacaaaaggtaacacactatgtaggtagtcctggctttgaacagtttcactataaaaatatttgttactacagcttaaataacataagtctcctaaaaataattcaaattttagttaccatggtatattaactttgagtagttccataaaggacaaacttggctgctagcccttcagtccacagagcactttgaaaataacagatgagcaaaataatgtggccaatcacatgacttctttcaaagtatgtcagtgatcagtcactgtgtgcctataatttagttcatgcacagacagcaaagcatgtagttgtgttgccttccagtgataaacccacataacattttagaaaaatgtattaagaattggccagcaaagataaaagtgcagcaaagaaacaaaagtgataatgttttcagtgaaatttgaattgaacataaatggagttatagaagaaatagctgaccatgggaatgttcacactgctactttcaagaatctctagaagggcagctaaaggagcttagtgaaggtgaatttattgacatgaatgagaaaagtaattgygatgaaaaggatgaagatgtcccagagaaagtaatgccagcaaaaacttcacattaaaggaactctcagatatttcaaagcattgaaacctccaagaataaataaaatgttggaagttgatccaaacttagaaaggagtatggcaacttgtcaagatgaagaaaaggtgcttattcctttttatttatttatttagagacagagtttcactcttgttgcccaggctggagtgcaatggcatgatctcagctcaccgcaacctccacctcctggattcaggcagttctcctgcctcagcctcccaagtagctgagattacaggcatgtgccaccacgcccggctaattttgtatttttagtagagacagggtttctccatgttggtcaggctggtctcgaacccccaacctcaggtgatctgcccacctcggcctcccaaaacactgggattacaggcatgagccaccatgctccacctgcttattccatattatatgttataggatgaaaagaggccaaactaatcttgacatgttttttacaaggaaataatcctccatggttctaatttttttttttttttttttttttttttttgagacagagtcgcgctctgtcacccaggctggagtgcagtggcacgatcttggctcactgctagcaccgcctcccgggttcacgccattctcctgcctcagcctcccgagtagctgggactacaggcgccggccaccacgcctggctaattttttaaaaaatatttttagtagagacggggtttcaccgtgttagccaggatggtctcgatctcctgacctcgtgatccgcccgcctcggcctcccaaagtgctgggattacaggcttgagccactgcgcccggtgggtctaatgttttaaattacactgkgttaaataaatrttagtttgttgkktttttttttagtttttttatttctctacaaatttacaaccaataagagtttttaatgctttgacaaaaaatgttaaaggtcatagtacaatcgcatttcttcccattgattattaacatcactttacatagtttcatcttgcattarcaattttgtgtgtgtgtttgtggttttaaggagcggagagtttaataggcaagaaggaagggagaagacagaaggaaggagctcccccttacagagacagagggagcggggctccaaaagaggaggtccccatctaccgcggataccagccaggtatatatgcagaggctggtggaggtgatgtctgatttgcatagggctcaggggattggtttgaccaggcatatcattcacgtagcccgagaaaaagctggccctcccaccccagccttttaatatgcaaacgtagggcgccatggatgttctaaacacgtggagatatgtggggggcagccatgtggccaggaacttgtggggcaagggcaagaaggctgtgggaatcgccaagttgaatggacctagtttctaatggcctgcatttgcatatcaaaggttgctggcctggctcctagagccggggctttaaaagaaacttttccggagatgctttaaaaaatgaaaacttcccaaggaccccttttcctgtctatctgcataaaataatttctttyattatttatttatttatttatttatttatttatttatttatttatttatttattttgagacggagtctcgctctgtcgcccaggctggagtgcagtggcgcgatctcagctcactgcaagctccgcctctcgggttcatgccattctcctgcctcagcctcccgagtagctgggactacaggcgcccaccaccacgtccggctaattttttgtattttcagtagagacgggatttcaccgtgttagccaggatggtctccatctcctgacctcctgatccgcccgcctcggcctcctaaagtgctgggattacagaataatttcttaataactcctaccacattcctccctgtggcgatatcaaactaactgctgttaggaggctttgggcgaccattgcttctggctacttcctgctgaaaaggggcgtctaatggagracagcagctagggctcctcctggggttgatctaagggtcctcggaagaatggcgtccatgtgtggttcagtttacagcaccgtttggagtttgattgcttctaggcgagaagaaacaattcaagttatagtattgagtatacagagtccaaatatcaatacaagacatataagcaagagagtgcttaataaaggggttaaccaattccataaagaagactggaagtaattaaagagggattgtagccactcggggctgaagcccacattttccctgagcctgtcaataattttgatttgatttttaagtccctgtagatttkcctcttctttactacaggtgttaatcccaaagaagcatgtttcatttaaaaatgcattactggccaggcgtggtggctcgcgcctgtaatcccagcactttgggaggctgaggcgggagcatcatgaggtcaggagtttgagaccagcctggcctacatggcaaaaccccatctctactaaaaatacaaaaaattagccatcgtggtagygggcgcctgtaatcccagctaattgggaggctgaggcaggagaatcgcttgaacccgggaggcagaggttgcagtgagccgagatcgcaccactgcactccagcctgggcmacagagcaaaactccatctcaaaacaaaacaaacaaacaaacaaacaaaaactgcattactaaatccaataaaaagtcctagtagactcagtgatagtaaaactttcatgcttcctttttgccagtaactattatccctgctataaggatactaattaagcaaaatacgacagcaatggaaactctgtccaatatttcagttagaaggtgctaccatggataaccytattgcaaatagtagagtgaggaaagcagttcccacaaatgtggtgtggtaggtaatttccatctaaaattttacttgccaacatatagaattcccctctgtgggcctacgaagttccttggttttattttcccaaacaaagaaacctccgggttacaggtaccttacttactttcattacctggcacaatttgcaaaataattgcccagaactagcatattgattcacattttcacattacccatccctttttcccccccaccaagctgcagaagatcaccacttgattcacaggaataagcagggccagggttagtctaaaatgtaggcaaaaagcttaaaaacaattaatgagactagggtttaatgacaaatgtatgataagctttggagcaaaatttttctctccagtcctcatttttggtaaaaactaattatgaatgaactttaatcttatacttggcctgattatttgcatgaagtgcagcaagaatggttatttctacataggacttttggattggctttgatgaaacactgttccacaaggaatttcagattagacttttaaagctgagcccagacatgggtttgtatcctctaatacctgtgagttgggttatcctctcctcttgaggtcccaagataaactcagagcttccagacctgttagaaagtgacattcttcactgaccacaggttaggaaccctgtgtggggactgtgtagacaaggtgtgaggccagttctccccaaggggcttttattggctctgcatgtcaagsttgattccttaaagggaaacacaccctttcagttaaagccttggcaaaataaccggtttttccaattgtgttctgttgacaaaraaaaatggattcttgctgcactgatgcgaacaactatattgccgtaagttaagagtacttacagatagtctccaaattttagaggaaccaggcagagaaaaatgaacatgctccaaattttgttcacwgtagtataccttacttgattattaaaggccataaatagtttaaaataagtttcctttcccagtccatgcaycaaaatgatacrgctctgatgagtggaggaacaacagggttcctggtcctcatgctggtttagataaaatgacacagacacaygtggagtggttttaaggagtsgagagtttaataagcaagaaggaagggagaagagagaaggaagacgctcccccttgcagagacggagcgggggttccaaagctgaaagaggaggtcccccacattaacaatttttaaaataccgtacaactgcagaaaatgaggactgcctgtacatactgtttgacactttgtttttttttttaacttatcaactttattttgtttgtttgttttggttttgggtttttgtttgtttgtttgttttggagacgagtctcactctgtcagccaggctggagtgcagtggcacaatcccagctcactgcaacctccacctctcgggttcaagcaattctactgcctcagcctcccgagtagctgggattacaggtattcgccaccacatccagctattggttttggtttttgagacagggtcttgctgtgtcacacaggctggagtgcagtggtgtgatctcagctcactgcaacctctgcctcccaggctcaagtgatcctcccacctcagccttccaagtagctgggactacaggcatgcacaccatgcgcagctaattttttctattttttgtggagacggggtctcactatgttgcttaggttggtcacaaattcacagcctcaagcagtcctcctgcctcaccctcccaaagtgctgggattacaggcatgagccaccacatccagccttaccagctatattgaagtataatttatataacataaaatttgccttttaaaattatacagtgcaatgcattttgacaattgtttacatctgtgtaaccaccatgcaatcaaaatatagaacatttctataaccttcaaaagttccctcatgcccctttgcaatcaattcactacttctccagctccaggcaacaactggtctgcttcctgtcactataaattagtgttgcctctttcagaatttcatctaaatggaatcctataacatatactattttgtatccatcttcttttactccaaagttcttgaaattcattcatgttcctgtgtgtatcagcagcgtgttccatttgattgttgagcagtattgcattgtgtggatatatcacaatgtgttcattcattcaactgttggtggacatttgagttgtgtccagtttagtgctattctgaattaaagtgatgtgaacaatcatgtacaagtatttttgtaggcatattttttttatttctcttggataaataccccaaaacagaattgttttgggggtcatatgaaatgggaagtatatgcttaactttataagaagctgccaaactatttttcaaaatggtaatatcactttacattttcatgagcaatgcataaagcgttccgcttgctacattttctcaccaatgcttcctattgtcaattttttaaattttagcaattctagtgggtgtgtgatactatctcattgaagtttcaactgtttttccctgttgactagagacactgagcaacttttcatgtgttgtctatttgtatatcttcttgaagcattcgttcatctttaactgagctgaacgccttcttaaaattgagctatggragttttaaaatatatccttgtagctgggcgtgatggcaggtgcctgtaatcccagctactcaggaggctgagacaggagaatcgcttgaacccaggaggcggaggttgcagtgagccgagactgcaccactgcactccagcctgggcaacagagtgagacttcatctaaaaaataataattatacatgtaattatatatgatttttatatatgkaatayatatattcttgatgtgagctctttgtcacatacatattttgtggatattttatcccagactatgacttgtcttttcattttcttagttgtgtcttttgaagagcagaagatgtaattttgataaagcccaatttattttttcttttatagtttgtatttcttatgtcctattcaaaaactccttgcctactgaaaacttatgatgattttctcctatattttyttttaraagttttatagttttaccatttataattkggtctatgaatccttttgagttgatgtttatgtatggtgtatggtgtgaggtaacaatgaagattcatatttttttccaaaggaatatccaattgtctctttggaaaaatatgctgagaaggctatcttttccccaccaaataatcttagcaccttaatcaaaaatcatttggccatggacatatgtaggtgtgggttttttctgggctctctgtgttagatggataratagacagatacagatatataactgtgtttacacatatrtaactgtaaacacagttatatatctatatatccaccaacagttgaatgagaataaactattgttataagcatatatacacattgtatatatatgtgtacatatacatattgcatatgtatgtatacatatatacacacaaagtatatatatgtatgtatacatatatacacacttaaagtaatggcctccagttcgatccaagttgctgcaaaggacattatttcatgccttttcgtggctgagtaatattccatggtgkatatatatatatgtgtgtgtgtatatatatgtattatgtatatatatatgtgtgtgtgtgtgtgtgtrtrtatatatatatatgtgtatatatatataccacattttctttatccactcattagtcgatggggacttaggttggtttcacatttttgcaattgtgaattgtgctgctataaacatatgtgtccaagtgtctttttcatataattacttattttcctttgggtagatacccaatagtgggattgctggattgaatggtagatctgttttttgctctttagagaatctccatactgttttccatagaggttgtactaatttatattcccagcagcaatgtgtaagtgttctcttttccccacatccacaccaacatctattgttttttgactttttaataatggccattcttgcaggaccaaggtggtagctcgttgtggttttaatttgcattttcctgatgattagcgatgttgagcattttttcatatgtttgtgggccatttgtataccttcttttgagaaatggctattygtgtcctttgcctactttttaatgggattgtgttttatttttcttggtgatttgttagttccttgtagattctggatactagtcctttgtcagatgtgtactttgcaaagataatattttggatgttatatttccattataatttagttcaaagtattttctaatacaccttgcaatttcttctttgacccatggattattttaaagtttgttattttgtttgtttattttgagacagagtttcactttttttgcccaggctggagtgcagtggcacaatcccggctcccagattcaagcgattctcctgcctcagcctcccaagtagctgggattacaggtgcccaccaccacacccagctaatttttttttcttttttttttgagacagagttttgctcttgttgcccaggctggagtgcaatggcacgatctcggctcactgcaacctctgcctcctggkttccagcaattctcctgcctcaacctcctgagtagctgggattccaggcatatgccaccacgccaggctaattttgtatttttaatagagacggggtttcttcatgttggtcaggygggtcttgaactcccgacctcaggtgatctgcccgccttggcctcccaaaatgctgggattacaggcatgagccactgcacccagtccaattttttgtatttttagtagagatggggtttcatcatgttggccaggctggtcttgaactcctgacctcaggtgatccgcctgcctcggcctcccaaagtgcagggattacaggtatgagccaccatgmccagcctaaagtgtattgtttagtcaccaaatatgtaagtattacccaaatatatttgtcactgatttctaatttaattgtattgtgatccaaaaatatacattgtatagtttctattcttttaaattcgttaacatttcttttatggcacagaatatggtctatcttggtgagtgttgcttacacacaactgtgtaactgaaaactgtgtattctgcttctcgtggttgttgtatcctataattgtcaactagatcaagttagtaagagtgttgttcaktgatcttttcttcttcagtgtttactgtatttgctaatcccatccagtgaagtttccatttcatatattgtatttttcacttttagaagttccatttgactctttcatttccatcctcaattatcttcatatttttctttaaatttttgagcacatttataatggaggttttaaagtccttgtctgctaattttgtcacctctgtaattcctatgatgattttcttcctggcttggggtcataatttgttgcttatttgcatgtctaataatgtttttattggacagcagacattgtaaatgttatatttttgagtgtttggattttgtctttctttaagaactattgcagtttgttttggaaggctattatgttttttgcagatcaggttgatcttttcaaggcttgtttttaagctttgttaggacaggtctgtagtaacttttgccttgggctaatttagacctaccacttaattctgacttttttgattaatctgagtgttcagcagggtctctttattatggctaaatgaaattcaaacattttccagccctatgtgaccatcaagaattcagctaatagctccctggcagttcttcgcccagctgcagaaaagtgtcagtgcactctatgtatgctcagattattatttagccaaagacttggggatccatattaatattcctggagttctttgtgtagctccattctctttagtactctatcccataaattctggctgcctcaatctcctaatctccccaaactctaatatctattcctcaactcagcaaaaccatggtgttattcttggatttcccctttcctgccccacagtctgaaagttgtctccaggcaaaaaaaatggagatcctagtttgcggatcctcatttccttctccttttttttttttttttttttttttttttgagatggagtctcgctctgtcacccaggctggagtgacgtggcgtgatctcggcttactaraaactccggctcccgggttcatgccattctcctgcctcagcctcccgagtagctgggactacaggtgcctgccaccatgcccggctaattttttgtattttgtttagtagagacggggtttcaccgtgttagccaggatggtctggatgacctcgtgatctgctcacctcggcctccaaaagtgctgggattacaggcrtgagccaccgcgcccggcctgcttctcttctcttatgggttagaatcctgcactgtcttttgaacaaatgtctaaaagcttttatcacacattttgatccacttcccagttgttatagtggtatatctggtttcacatgactgaaaggaaaagttttcaccttgctttttgtactaataatatatcctggaaatcattctatataaatttatagaaatcttcatttttaaaatagcttcataaaactccattgtaaaaaccaggtgcagtggctcatgcttgtaatcccacactttgggaggccaaggcgggtggatcacctgaggtcaggagttcaaggccagcctggccaacatggtgaaactccgtctctactaaaaatacaaaaattagctgggtgtggtggtgggcgcctgtagtcccagctacttggaaggctgaggcaggagaattgcttgatttcaggaggcggagattgcagtgagctgagattgcgccactgcactccagcctgggctacagagcgagactccgtctaaaaaaaaaaaaaagcaaaaaaaaaaactccattgtatgtgcacatatcattatctgttcaacccatctatgacttgtcatttaggtagtttccatccaatatttttgcaatataaaaaatgctaatgaagaacctgagatatatatatatctatatatatagatatatatgtttgttgttgttgttgttatttttgaagtatgtacgtataataaattcctaatagtgtgattgctgcatcataaggtaaaggcatatgtagttttgttaaatatagctattccccatcttgcattcctacaaatagatgagaatgtccattgtcccatagtctcctttgcagagtatattgtcaagctttttaattgttgccaacctgatgggtaaaaagatatctccaaataattttaattaaaatttctcttattatgaatgaggttaaatagtttttcatatgtttaaaagccagtttatatctttttgtttttttagagacaggaatcttgttctgttgcccaggccaaattgcagtgatgcagtcatagctcactrtagcctcgcactcctgggctcaagcaatcctcctaccttagcctcccaagtagctaggactacagatggatgccaccatgtccagctaatttttttatttttttgtagagatgtgaggtctcactatgttgcccaggcttgtcttgaactactggcttcaagtgatcctcccacctcagcctcccaaagtgctaagattacagccatgaaccaccacaaatgaccctatatatttttttgaattgtctgttcatgtcttattttcatttttctagtagttttttttttaagtgttttagcctaaatttgtaaaaagtttaggggatatatgaagggactctaaatgtttatgaagaaatttaattaaaagataaaaataaaaatataagctttatttttcaacatgagctccatcaagttcaaggcacttttgtaagcaatgatactagccatttagttcacccctaaagaactgagagtcctgggaatttagccatgtcaatgcagtattttttatattggttactgaagaaaaaatgggtgccctttaaagttgtaagattaggaacaaaaacaagtcagaagaagccaaatcagcactgaaaggtgggcacttaatgattacccaagaaaactctcaccaaattgcccttgcttcatgagaggaatgagcgggagcattgtcgtggtcaggaaggattctggggaagttttcccaggcattttttctgctgaagctttggtaactttctcaaaacactctcataataatcagatcttatcactctttggccctccaggaagtcaaccagcaaaatgctttgaacatcccaaaaaagcgcttgccatgacatttgctcttgaccagtctgcttttgcattggtcaaatgccaccacttccacctcttgtgctttgttttcaggatcagactggtaaagtcatgtttcatctcttgttacagtttttttttttttaagaaacccttcaggatcttgatcacatttgtttaaaatttcaactgaggctgggcccagtggctcatgcctgtaatcccagcactttgggaggccgaggcgggcaaatcacgaggtcaggatttcgagwccatcctggctaacatggtgaaaccccatctctactaaaaatacaaaaaattagccgggcayggtggcaggcacctgtagtcccagctactcgggagggtgaggcaggagaayggcatgaacccaggagacggagcttgcagtgagctgatatcatgccactgcactccagcctgggcaacagagtgagactccagctcaaaaaaaaaatcaagtgaaaactctggtcttaaactgcagctgatctattttatttttattttttttcagacacagccttgctctgttacccaggctggagtgcagtggsmccatcatggctcaatgcagccttggcctcgtgagctcaagcaatcttcccacctcaggctcccaagtagctgggactacaggcacatgctaccatgcctggataatttttttgcagctaatctagatgtaatggttttggcacccatctaatggaaagtttgctcaactttaatttttcagtcagaattgtgtaagctgaaccgagatgtctatggtgttggctattgtttctgctgttaattgtaggtcttctttaattagagcacagacaagatcattttttttcctcccaaattgatgtagatggtcttttgctgtgggcttcatcttcaacattgtctcatcccttcttaaaacaagctagctacttgtaaactgccgttttctttggagcattgtctccataaacttttcacaaaacatcagtgatttcaccgttcttccactcaagcttcatcataaatttgatgtctgttcttgtttccattttagcagaattcatgttactctgataggggctcttttcaaactgttatcttattcttcttagtgcctcaaactagatcctattcagacatggtataacaagttagtatgggtttattttggtgcaagaaatattttgaaatccacacatttttttcataatatgcattttccatgaagtttttgaaaactccttgtattaggaatattagtcctttgtccagtaaacagactgcaaatattttctcacagctcatcatttaccttttggcatttttttgcaatgcaatttttttccctttgtttttgttttttgtgtaatgaatcaatkttttcttttttttttttttttagaccaagtctcactctgtcacacaggctggagtacaatggtgcaatctcagctcactgcaacctctgcctcccaggttcaagtgattctcatctctcagcctcccaagtagctgggattacaggcacatgccaccatgcctggctaatttttgtatttttagtagagatggggtttcaccatgttggccaggctggtctcgaactcttgacckcaagtgatccactcacctcggcctcccacagtgctgggattagagacgtaagccactgcccccggccaaatcaacgttttcttatattgcatttaggttttaagtcatagttagaaagcctttccccacacctaggttatagaaacattcattacttttttcttccagtgctagtacttgcatggtttttggtttccacatttagatccctgatctaattggagtttattcttttgtgtgctgagatatggatctgattatatcttttttcccaaatggctatccagttgtcccaatgccatttattaagcacttcatctttgtcccagtgatttgagatagcatctttatcatgtaccaaacttctatagtgccagaagatttttattttttttagacagggtctggctctgttgcccaggctggagtgtagtggcacaatcccagctcgctgcaacctccgcctcacatgctcaagtgcccgcacctcagcctctcaagtagctgggactacaggcacatgccaccacaccaggctgatttttatatttttttgtagaatgagatttcaccatgttgcccaggctggtctcaaactcctgagctcaagaaatccgcccacctcagcctcccaaaatgctaggattacaagcatgagccaccacacccggctgccagaaaattttaatgatcagaaaaccacaattctttcttcctctgttatatgttgaagtaaaatacttcatttagaaaactaagccgggcacagtggctcacacctgtaatcccagcactttgggaggttgaggcaggcagatcacctgaggttaggagtttgagaccagcctggccaacatggtgaaaccctgtctctgctaaaaatagaaaaatttgctgggcatggtggcgggtgcctgtaattccagctacttgggaggatgaggtaggagaattgcctgaacctgggaggcagagrttgtggtgagccgagaccacgccattgcaccccagcctgggcaacaagagcaacggtaaactccatctcaaaaaaaaaaaaaaaaaaagaaagaaaaaagaaataactcagccatacaaggctacccatttggtgagaactaataataagttagatagcaaggtaatagcaaaatgtgggtgcaaaattaaagcaagttatttctgaggagaatgtaggtctcatggaagattttcatgtggacaaatttagtaaattttttgcaggtagtttcctgacatatttaacatttgtgatatagtaaacaataagaaggtactaaaggctgggcgcggtggctcacgcctgtaatcccagcactttgggaggccgaggtgggcggatcacaaggtcaggagatcaagaccatcctggctaacacggtgaaaccccgtctctactaaaaatataaaaagttagctgggcgtggtggcgggtgcctgtaktcccagctactcgggaggctgaggcaggagaatggcgtgaacccgggaggcggaacttgcagtgagccaagatcaagccactgcactccagcctgggcaacagagcgagactccatctcaaaaataataataataataataaggtactaatatgatccagactagaagagaatagcactaaaatgggagatggggtaaacctgtggttttttttaccttaggcttttgacttccaaaattattgtttttgctgggtgcggtgggtcactcctgtaatcccagcactttgggaggccaasgtgggaggattgcttgagcctaggagtttgagaccattctaggcaacaaagcaagaacctgtctctaaaaaaatttaaaaattagccagaaatggtggcacatgtctgtagtcccagctacttgggaggctgaggcaagaggattgcttgagccttttgaagttgaggcttcagtgagccatgatcaccccactgcactccagcttgggcaacagagcaagaccccatctcaaaaaataaaacaaaatagactgggcacgatggctcacgcctgtaatcccaccactttgggaggctgaggtggatggatcatgaggtaaagagatcgagaccatcctggccaacatggtgaaaccccgtttctactaaaaatataaaacttagctgggcgtggtggtgcacacctgtagtctcagctactcgggaggctgaggcaggagaatcgcttgaacccgggaggtggaggttgcagtgagccaagattgtgccactgcactccagcctggcgacagagtgagactctgtctctaaataaataaataaataaaacaaaataagtaaaataaaataaatgtttgtagttccaaaatattttgatgacataatttcttcttgttctaataaaactacatatgcattggtcctatgacctagtaatcacactattaggaatttatcataaatacacacctcaaaaattacaaaaatacatatataccagcttatttattacagcgttatttgtaattgcaaaaacattgtagatagaatggaggtcacataaaacttattcttaagattcagaccgggtgcaatggctcacgcctgtaatctcggcactttgggaagccgaggcaggcagaccacccgaggtcaggagtttgagaccagcctggccagcatggtgaaaccccatctgtaccaaaaatacaaaaattagctggtcgtcgtggcacgcctgtaatcccagctactcgggatgctgaggcgcgagaactgtttgaaccccggaggcagagactgtagtgatctgagatcatgccactacattccagtctgagcaacagagcaagacttcgtctcaaaaaaaaagatcatagatcatcttatcaaatcaaagtatgcaaaatattcaagtaaacttcagataaatatgaaggctaaaccattcagcttcttcaccaaacccttgaatgtcccacctgtctaaatggagatacatgtttgtttgatttattggttaactgtttttattccatttttcctcaaatgatcccataatttgaccttaggaagctgttcaaatagacacattaggttgaatggaaagactactcgatgatatttaggattttaagaggattttatgtattttttccttgtgtgcaataatttaatagcatcttgaataggattttctgatattactaaccctctgggaataatattaggtaattagacagttagctaatattaaaatatgtatcaggtaatatttattgagagtttcctctgtgccaagcaggatcaacttcataggcaggcgacctgtgcggggacacagggcttcatgcttagataggcccccttgctttgaaggcccctaccctttggttagggctctgctgttaccatcttgaaattcttaataatttttattttatttttttgagtcagggtcttgctctgtcgccctggctggagtgcagtggactcactacagtcttgaattcctgggctcaagcaatcctcccacttcagccttctgagtagttaggacgacaaacacacgccaccatgctcagataagttttttgtttgtttgtttttttgtttttgtttttgttttttgtagagatgggactgtccctatgttgctcaggctggtctcaaattcctggcctcaagtgatcctcccacctcagcctcccaaagtgctgggactacaggcatgagccactgtgcctggtcaatcatttttattaacaagcccaagccctcttttttttttttttttttttgagacagggtctccctctgttgtccaggctagagtgcagtggtgcgatcttaccttcactgcaacctctgcctcctgggttcaagtgattctcctggctcagcctccctagtagctggaattacaggcacccacccccatgcctggcaatttttttgtatttttagtagagatggggtttcaccatgttggcaaggctggtctcaaactcctgacctcaagtgatccacccaactcggcctcccaaagtgctgggattacaggtatgatccactgcgcccggcctccaagccccctatttttattttgcactgaccctacaagttacgtagctaggcttagttatgtttttagcaaggaaagtgtataatctcatgtaccttttgaaagattactcaggtctctgcatgtgaaatggaatttagggaatgcaagagagggagtaaaaataacagcgaggaagctatgatagcatttaaggttgctttgactcaggggtagcagtagatagggtaagtaattgatagtttcaaaatatattttgggagtagtaagcattggtatggattagtaatatactggatgtggggatgcagaaaaaaatattaaaaattacttctgaaattctggctggaatagaagtgccacttaccaggtaaggaaggttggagacataacatatttgagggtgtggtcaaaagatgagtttgacattatgctatgtcatataaaagacatataaaagactacctattttataattcctttttaataaaatattcagaaaaagcaaaactgtggttgcctgaggctgaagctaggaagattgactacagacaagcatgagggaaattttgggggtgatgagagttttctaaaactggattgtggggttggytgcattactgtataaatttattaaaaatccctgcatcgtataggggcactatattgtatgtagaaagctgtgaaaagattttaaaaatgattgacatgtctgtggttatatcaatgagtactattattattcccattttatacataaagaaaataaaagagaagttaaaaataaaagtttcatggttacatagctactaggtgtaatatccagtattggaatttgaatctttttgacactaagaccttactctcgatcatataatacattcactttctattttaaagttatattatagccgggcrcagtggctcacacctgtaatcccagcactttgggaagccgaggcaggcagatcacgaggttgggagatcgagaccatcctggctaacacggtgaaaccccgtctccactaaaaatagaaaaaattagccaggcgtggtggcacgcacctgtatcccagctactagggaggctgaggcaggagaatcgcttgaacccagaaggcagagcttgcagtgagacgagatcgtgccactgcactccagcctgggtgacagagtgagacaccatctcaagaaaaaaaaaattatattataaatgctgcatctcattggtcagaagctctcttgaaattataaaacaaagaagaaaaaagataaagactgggaaattgtgttgaatcagtatataaatcctgtatactggtccttccatttcccctagaaataagtgatacaggccaggcgctgtggctcacacctgtaatcccagcactttgggaggcggaggctggcagatcacctgaggttgggagttcaagatcagcctgaccaacatggagaaacccccgtctctactaaaaatagaaaattagctgggcatggtggcacatgcctgtattcccagctactcgggaggctgaggcaggagaattgcttgaacccaagaggaggaggttgtggtgagccaagattatgccattgcactccagcctggggaacaagagtgaaactcaaaaaaaaaaaaaaaaagaaagaaaaagaaaaagaaagaaggaaggaaggaaggaaagaaagaaagaagtgatacaacaagttacagcatctttgtttattatccactgtgagttgtattaccacactttacttggctctttggcaaactatattatctcttcagatcactagggctaggaaggcccactggtaacttgaaggagtaaatgtatcttctaaaaaatgcttacttccagggagattggatccacacaagtgaatacatatatagtccttagtgtatgctatgattattttactatgtcagtagcataaagattgctatattaataagcattaagtgcctgctgtgctagacagtgaggatrcaagtggccaccaaaatagcatggtccctgccctcctggagcttctttttttcttcttcagtgggggaagcagatactttgcttatgcaaaaataattataaaatttaaagttgtgccaagttcaatggaaaaaatataaggtgttctgagagagcataacaaaggatcctggttttaactggggcctaatggaagacctctattaggaaataacatttaaactaagaccagacagacctgtagaaattagcaaagcaaagggagggaggaaaaagcagctttcctggcaaaggaacaatttrtgtgaaggccctgagacagggaagggctggggttctgaccaccctccaagtggtgcaatggaatatagtgagagagggagaagacatgagaacttggatactatgcaaaggatttggtattttaattcaagagcagtatgatgctactgaggagcagctggacaattgtgtgatccaattaaaattttaggaagatgaacctcgctattgtggagaatgcatacacaagggttctgttggttcatgaagaggtcttaagaaaactatgagctgggtgcagtagctcaggcctgtagtcccatctacttagaagtctgaggcgggaggatcccttgagcccaaggagctggaagttacagtgagctatgattattccactgtactccagcctggatgacagagcgagatcctgcctcagaaacaaaaaccaaaaaayaaacaacaacaaaaacaacaacaacgaaaatctcagaaaactacaggccttattatcaagaaaatgacaggccttattattgagaaaactacttacatttttaaaagctgattttcaaaaaccagattgtgaattaagtgatgctgaataggggaaaaaaagactgataaaccagtgtatctctgaataacccactagaycagtgcttgtcaaactttaatgtgttttcaaatcaccctgatgttttgttaaaatgtaagtcatgtctcagtaggtctagaggagggcatttctgcatttctaacaagctccccggtgatgcctagaccattggtcctcacactttgagtagcaagtgattgggstatactctttattctaaattcyaaatgtattctatcttctaatgcctatcagccctcttgctggtctggctaattatcaaacttgagcatttaaaactgggggttttcagagattaattgaagtgttaaagacatggaaatataggtcacatatggcttttcatctcttccggaaatatcctatatatccttacttcttttctacctacctaacctatgtgcctaccccttcacttatgttcaaggttctattatacttcaaaaggactctatgcaatcaaagtgatgtccaagacaaatatacagaaatagtatgaggctctaacactttacatctaatggagtggtttgcatcattaattgaggcttactctgtgccaggcactttacctgccttcttcatttaataggataggagcaggaactcttagaggttcatttcttgttcaaggatatacatctcatctctggcttatatcacagtggactcttttattcactatcctaatcattataattttgtttggtgacaacaattctaaatgcagaaaagttaaggctctttattctgtgactaaaggctttgtattttctaaagatttgtggagctttgctgccattatttcaataattttataaagatcctaggtggtaaataggcctggctttttttctttttgaaatcttctccgtcttcttcttcattagcagtgcaacttcttgtggcatatggtacccaagatcttgggaaaaggattgatcaagtaaagggaaacgatagagagagtgtgctctacaactgagatcatgctccttgtgaaagacagggtagggaaatttcttattgctccctggttcttaagaaatgagagctaacaatgacatccagttttaaaagaaataaaatctgaattgtacttttaaattttataagccagagttaaaccaatagattgtaactcctgctaatttgatagtagctccagataatgaggaagtgacagggaatgctaatttcatttggtaagagataaaactgaaattattaatgtctccacggaaatgctaaatgcctccttacaagtagggtccggctaattgtctgtcttccaacaagccagatttgttggtgtttttccagacaatgttgtgtagttttcggtttggttcgatcccctttcttgtgatcaaagaaagtgattcaaatgtttaatgagtcttgatttggattggagacttgcagaacggctagcctcacagccccaaggctggctttccctaaggtaggtttcctatgcaccgatactrgcaaggcgctttggctggaaactctggaaggaagccaaaggaaagtgaagttcctggcgctagcgcgtgtcctgctcagagagcccggcgctagctcattcttcgtgcagttattggctgggactctgtgtgccgctgtcggccaatgaagacgctggagatcgggcccctgcccgtcccctttctgcgccccgggatgaggcagagactgaacagccggcgagcaaatcaacggcatccagaaagccatgtcggactcggcgcccagcgcccaagcgctaacccgctgaaagtttctcagcgaaatctcagggacgatctggaccccgctgagaggaactgcttttgagtgagatggtcccagaggcctggaggagcggactggtaagcaccgggagggtagtgggagttttgcttctgcttggtgccttgaacaaggcttccacggtcattcactatgagatcccggaggaaagagagaagggtttcgctgtgggcaacgtggtcgcgaaccttggtttggatctcggtagcctctcagcccgcaggttccgggtggtgtctggagctagccgaagattctttgaggtgaaccgggagaccggagagatgtttgtgaacgaccgtctggatcgagaggagctgtgtgggacactgccctcttgcactgtaactctggagttggtagtggagaacccgctggagctgttcagcgtggaagtggtgatccaggacatcaacgacaacaatcctgctttccctacccaggaaatgaaattggagattagcgaggccgtggctccggggacgcgctttccgctcgagagcgcgcacgatcccgatgtgggaagcaactctttacaaacctatgagctgagccgaaatgaatactttgcgcttcgcgtgcagacgcgggaggacagcaccaagtacgcsgagctggtgttggagcgcgccctggaccgagaacgggagcctagtctccagttagtgctgacggcgttggacggagggaccccagctctctccgccagcctgcctattcacatcaaggtgctggacgcgaatgacaatgcgcctgtcttcaaccagtccttgtaccgggcgcgcgtcctggaggatgcaccctccggcacgcgcgtggtacaagtccttgcaacggatctggatgaaggccccaacggtgaaattatttactccttcggcagccacaaycgcgccggcgtgcggcaactattcgccttagaccttgtaaccgggatgctgacaatcaagggtcggctggacttcgaggacaccaaactccatgagatttacatccaggccaaagacaagggcgccaatcccgaaggagcacattgcaaagtgttggtggaggttgtggatgtgaatgacaacgccccggagatcacagtcacctccgtgtacagcccagtacccgaggatgcccctctggggactgtcatcgctttgctcagtgtgactgacctggatgctggcgagaacgggctggtgacctgcgaagttccaccgggtctccctttcagccttacttcttccctcaagaattacttcactttgaaaaccagtgcagacctggatcgggagactgtgccagaatacaacctcagcatcaccgcccgagacgccggaaccccttccctctcagcccttacaatagtgcgtgttcaagtgtccgacatcaatgacaaccctccacaatcttctcaatcttcctacgacgtttacattgaagaaaacaacctccccggggctccaatactaaacctaagtgtctgggaccccgacgccccgcagaatgctcggctttctttctttctcttggagcaaggagctgaaaccgggctagtgggtcgctatttcacaataaatcgtgacaatggcatagtgtcatccttagtgcccctagactatgaggatcggcgggaatttgaattaacagctcatatcagcgatgggggcaccccggtcctagccaccaacatcagcgtgaacatatttgtcactgatcgcaatgacaatgccccccaggtcctatatcctcggccaggtgggagctcggtggagatgctgcctcgaggtacctcagctggccacctagtgtcacgggtggtaggctgggacgcggatgcagggcacaatgcctggctctcctacagtctcttgggatcccctaaccagagcctttttgccatagggctgcacactggtcaaatcagtactgcccgtccagtccaagacacagattcacccaggcagactctcacggtcttgatcaaagacaatggggagccttcgctctccaccactgctaccctcactgtgtcagtaaccgaggactctcctgaagcccgagccgagttcccctctggctctgccccccgggagcagaaaaaaaatctcaccttttatctacttctttcyctaatcctggtttctgtggggttygtggtcacagtgttcggagtaatcatattcaaagtttacaagtggaagcagtctagagacctataccgagccccggtgagctcactgtaccgaacaccagggccctccttgcacgcggacgccgtgcggggaggcctgatgtcgccgcacctttaccatcaggtgtatctcaccacggactcccgccscrgcgacccgctgctgaagaaacctggtgcagccagtccactggccagccgccagaacacgctgcggagctgtgatccggtgttctataggcaggtgttgggtgcagagagcgcccctcccggacaggtaaggtttagcaagtcatgcttgaccctgttagtgcttttttattcctacatcatattgaggaaggaatggagctgtttttttagtgatgaagatgttttcctggtgatgcattcacactttcaactggcycttcctagatcaaagttagtgcctttgtgagatggtggcctgccagagtgtggtttgtggtcccatttcagggggaagatacttgactcatctgtggacctaattcacatcctcagcactcttttgctatcacaactaaccaatcttgctaagggatggttaagctaaaacacaagatctcagcgatcagagtttagcttggtatcatttacattaggaataagctgctggatacctctaaccagtggcagcttctaggaatacaaaaactacctcattcctccacctttcaagtgattgtgacatttgtattaaaactaatagctttttgataattttcctttgtttatacagatcgtgtacctcattctcagataattttttatgaatgaaatgaaattccaggcatcctttaaattttatttcaagcattctactggaaatgatgtgcaccctgcttacaaaatatttttaccttataacagtaatgcatgtttgctagaaaattcagaaaatacagaaaagtatttaaaaaattaaaactataatctccaaacccaaagataaccatttttaattataaaagtaataatttatttcaaaaataaatctaggcaacccaagaaaacataaagtagccagactcagtggtgtgcacctgtagttcttgctgctcagtgcctgaggtgggaggattgcttgagcccaggagttctgggctgtggtgcactatgctgatcaattgatcaatccactgtctgcactaarttcagcatgaatacagtgacctcttgggagggcargaccatcaggttgcctaaagaggggtgaactggcccasgytggaartggagaaggtcaaaactgctgtgctatccagtagtgggatgacatctgtgaatagccactgcactccagcctaggcaatatagggaaaccatgtctctttaacaataacaacaacaacaacaacaatcccagaaactacaaaaggagagtctttttggtgcctccagtgttagtccctgtccttccagccttatttttcttaagtatatgcacaatgtgaaaggtagataaattcatatccttagacaggtaaagcattcattaattcagggtggtatgcaaggatactatccaaggcatggtatccatgcaaggtgactgcaaggcctttgccctggagagaaccctatacatactctcaactgtaggagaaacactgttattttgttactcagtgcatcattgctatcaactcttggatttggcagttagtcaaatgaggttctaccatttaccaactaggagtctgtggccaagttactcaatctcctttctaagcctcttcctcatatgcaaaaagggaataataagtgttttayaagattcatgcatgatataatgtatgcaaagtgtttagcatggtgcctggcatatcataactgttaaacaattattagccagctcctagcattttgggaggctgaggcaggcggattgcttgaggccagcagttcaagaccagcctgagcgacatagtgagatcctgtctctacaaaaaaaaaaaaaaatgtgttttcattagctgggtgtgttggcatgcacctgtggtaccagctacttgggaggctgaagtgggagaattgcttgagcctgggaggttgaagctacagtcagctgtgattgcaccactacacttcaaccatggcaatagagtgagaccctgtctcaaaaaaaaaaattatcagctattactataattatttttattagttcctcactcacctaaaatctcaaacacaccttagaaatacacatatgagaacaaccaaaaatgacaaagtagaagcacatatgaaaaggctaagaaagcatgaaagccagcaagaaataactgccgctcttctggtcagcctggaaagcaactggcattttccctagaacaatgttttcaaacttggttgcacattaaaatcacctagagaccttttaaaaattctgaaacccaggccacaccccgacaaatgaaagcacagtctctgggggtgggacataggcatcattttttgaaggtccccacttgatcctaatgtgcagacaaatttgaaaaccacagctttgggaggctgaggtgggtggatcataagatcaggagtttgagaccagcctggccaatatggtgaaaccccgtctctactaaaaatgcaaacattagctgggcatggtggcgcatacctgtagtcccagctactctagaggctgaggcggaagcatcagtgagggagaatcagtgaacccaggatgtggaagtttcagtgagcccagatcacaccactgcactccagcctgggcgacagagcgagactccacctcaaaaacaaaaagaaagaaagaaaaaagaaaagcagtactctggaacctaccaatccatcatttagcatatttgtgaagtaaagtgttattctggtatttgcagaaccagaatccagctttattgggccaggcccaatttttttaaaaaacatggtaaggtctcccagccttaaagtattacatagcatagctctaaaagatcactgtaggaagacataaaatggtatttcagtcatctaagggaaaaaccttcctaaagcactagcccctggacaactattatttaaacatctacagctgttcaatagatattgggttctttttggagggatgtgacaaaaktcttgtataattagattgtgatgatgattgtatcagtttagtacatgtaaatacactgaaaaccattggattatacactttaaatatgtgatttgcatggtatgtgaattatgtctcagtaaaaatctagagatggggctgggctcagtggctcacgcctgtaatcccagtacttagggaggctgaggccagcggatcacctgaggccaggagttcaagaccggcctggccaacatggtgaaacttcatctctactaataatacaaaaatcaggccgggcctggtggctcacgcctgtaatcccagcactttgggaggcggaggcgggcggatcacgaggtcaggagtccaagaccagcctggccaacatggtgaaaccccgtctctactaaaaatacaaaaattcaccaggcgtggtggctgaggcaggaraatcgcttgatggtggaggttgcagtgagccgagatcgcgccactgcactccagcctgggtgaaagagcgaaactccatctcaaaaaaaaaaaaaaaaaaaaaatcagccagatgtggtggcaggtgcctgtagtcacagctacttgggaggttgaagcaggagaatcgctttatctcaggaagcagaggttgcagtgagccaagatcatgctgttgcattccagcctgggcaacaagaacaaaactcactccatctcaaaaaaaaaaaaawwawatctagagatgggagaatcatatggctggcataaaaaggtcaagtcaaagatatgtaagattaaggctttacgatgctccagttctagtaaaacagaccaggtacttgttttggtgtgaaattgccartataagtatagtactgtacatattagttgtttagcttaggtaagtcttttaatctctttaaactccagtttcctcatctataaaataaagagaatatctactttgcaaacttgttgtgagagtgaaaagtaatgcatataaagtccctgtatggagcaagtactcaataactatttgttgaactaaaaatgataatactgatattcaccatttattagcatccctatgtgccagacactgtaaacaattaaaagttatcattctggtacccagagtacagtatgagacagacatgcaaaaaaaaaaaaaaaaaaagataatggagatctgcatagcataagatgcagtgggaccaaacgggaaaaaacacctaaatgagcctggagaaaggaagaaatgatagaggtggtgatgcttgagctatgatctaaaggttgagtagtagcttgtcagacagtaaaggggaaaggacagggcagggaggggccattgcaagaaattccatgcagagggattatggtatttcattatcactgaamcttaaactgtgtgtgtggccgggtacsgtggctcatgcctgtaatcctagcactttgggaggccaaggtgggcagatcacttgaggtcaggagtttgaaaccagcctggccaacatggtgaaacctcatctctattaaaaatacaaaaaattagccaggtgtggttgtgggtgcctgtaattccagctacttgagcagctacttgagaggtcgaggcaggagaattgcttgaacccgggaggcagaggttgcaatgagctggtgtcaggccactgcactccagcatgggcaacagagagagactccatctcaaaaaaaaagtgtgygtgtaaaacagacagtctttgtaggagatgaggtgaagcaagtaggcaggagttagatcctgagttacctttgggccaagccaaggagtttttattttattccatatagatgacagtcactgcagaaatttgaactgatatgcatatatcatgaggtttttttgttttagaaakattattctgtcagtcataagtgaagggactggggacattgggactggaggcaaagagatcttatctctttgcaatagtttgaaagctattgcaatatttgaagagaagattgataaatgcttgaaccagcacagtggcagtacagatggagggagctgactacaataaaatcatcaggacttgttgattgacatgatataggaagtgagggacagggatgagtcaaggctgatccccctagatcctgactaaggaagctgggtggttgacagtgccattcacagagacagtgaattctggcataaacacctaataggtcaggctggtttacacctccatcattcccatgggagaaggtatagaggggtgtgtgtttgtgtgtgtgtgtgtgtgtgtaaaagaacacagaaagccagattcctctttttgacaccagaatattggttcccaccatagtcaaaaggatattcctgaggatcgagscttggaaaaatattggggaaggataagaactccagttgttgctgctttttttggcagccagtgtaacctargtaaggacttggttgaattaagaaatttcatgtccagatcaggatggatttttctatttctctgagctctggtgtgwttcccactcagattgcaggtcgtaggtacctacggtgtgaattgtgttgtgtttctgtgcttgtgcaagggagtagctaggttgctgggaggtctggatgagggtgggggtggggtgagatcaagtctccagctccaagaggtcccctggggctaagtgaaaagcttgctcttttgaaatggtcttcgttggtaattaacaamagatcaagaataccttggtgtcagataaagggaatttgtaggcacaatgctgttggtagctgatctcaatcattcaaggaagctattaaatctatgaacattagcattctgccaggtaaagagatctggtccttagcacctcccagacacactgattctttactgttttgaaacatctccctctcctggcttcctccaccccgcttccatactgtccttgaaatcaatgaatggtaatttagtgtatctagtgtatcactagcaaatgtctgaataagaaaggtttggtttccgctgtgtctcctgttacaatgagaacatgtactgcataaatttaattggctacgttaatgtgtaagccttttctgcaaagagatggatccgtttctgaatattctgcagaagggcagagttttgagtatatggcagtggttctaattagcagttgctccaatacaatcagactgagacggaagctactcatttagaatactggttgatgacaacactggcttgaacaaagtgaccactctccaatggctactctccctctcagtgggccgcaggttgctagggctcaggctgtggctgttttccccgccgaaaaggggcggggtcagtcggtgtgttaggaaaaaaaatgtatatatatatatatgttgtctgcctccccacagagataacaacccgtggaaaaacatgccgttgagcgggaggaaggcgaaaagataggctgggttttttggggggtgggggagcgtggaggatagggtgggctttttcccctccaatgctgcgacgcattaaccctgctgctgttgggacgttctctgctcagcctattggctgagcccgggagccgctgtctgccaatcgggtggtgaaaggcagacaaatctaccccgccaccagcaaaaacggcgcgtaacccttgcggcgccggccgaaccgcgccagagctggcgcggggaaagggagataggtgtctccagctgctgtggctgtttggggcgggtcggcttcatccgcgtctcaggagcaagtagagaattagcgggcggcagcaatgctccgcaaggtgagaagctggacagaaatctggcggtgggctacccttttgttcctcttttaccacctgggttacgtttgtgggcagatccgctacccggtcccagaggagtcacaggaagggacttttgtagggaatgtcgctcaagatttcctgctggatacggacagtctgtcagctcgcaggctgcaggtcgctggagaggtgaaccaaagacacttccgtgtggatttggacagcggagccctgctcatcaagaacccaatcgaccgagaggcactgtgtgggctcagtgccagctgcatcgtgcccctggagtttgtcaccgaaggtcctttggaaatgtaccgagcagaggtagagatcgtagatgtgaatgatcacgccccccgttttccgcggcagcagctggacttggaaattggggaggcagctcctccaggacagcgtttcccgttggaaaaggctcaggatgcagatgtggggagcaattcgattagcagctataggctgagctccartgaacactttgcactggatgtgaagaagcgcagcgacggcagcctggtcccagagctgctcctggagaagcctttggatcgagagaagcaatcggactaccgcctggtgctgactgctgtcgatggagggaacccgccgagatctggcaccgcagagctccgggtatccgtgctggacgtaaacgacaacgccccagccttccagcaatccagctacaggattagtgtgttggagagcgcaccagcgggcatggtgctcatccagctcaatgcctcagacccggacctgggtcccagtggtaacgtcaccttttatttcagyggtcatacccctgatcgtgtaagaaacctctttagcctgcaccccactactggaaagcttactcttttggggcccctagactttgagagtgagaattactatgaatttgatgtgcgggctcgcgatgggggttctccagccatggagcaacattgcagccttcgagtggatctgctggacgtaaatgacaatgccccttacatcacagtgacctcagagcttggaaccctccccgagagtgcagaacctggcactgtggtggcacttatcagtgtgcaggatccagactcagggtcaaacggagatgtgagcctccgcattcctgaccacttgccatttgccctcaagtctgccttcaggaaccagttctccctggtgactgctggacccttggatcgagaggccaaatctagctatgacatcatggtcactgcttctgatgctgggaaccctcctctcagtacccacagaactattttcctcaatatttcagatgtgaatgataatccaccctctttctttcagaggtcacatgaggtgtttgttcctgagaacaatcgcccaggggacctgctttgctcccttgcagcctctgacccagactctggcttgaatgcgcttatctcctactcactcctggagcccaggaatcgagatgtatcagcttcctctttcatctctctgaacccccagacaggagctgttcatgctactcgatcctttgactatgagcaaacccagacactgcagtttgaggtgcaggcccgggatcggggcaacccaccccttagcagcactgtaacagttcgtctatttgtgctggacctcaatgacaatgctccagctgtgctccgtcctcgggcccggcctggttccttatgtccccaagcactgcctccatcagttggtgctggccacctaatcacaaaggtgactgctgtggacttggattcaggttacaatgcttgggtttcctatcagctcctggaggccccagatcccagcctgtttgcagtctctcgatatgctggggaggtgcggacggctgttcctatcccagctgacctcccaccacagaagctggtcattgtggtaaaggatagtggtagtccaccactctctacctctgttactctcttagtgtccttagaggaagacactcatccagttgtcccagatcttcgagaatcttcagctccaagggaaggagaatctcgtctaaccctctacttggctgtgtccctagtggcaatttgctttgtctcctttggctcattcgtggcactactctctaagtgtcttcgtggggcagcctgtggagtcacatgctttcctgctggcacctgtgcctgtctcaccagatctcgaaggagggaggggcttcccccttccaatgggatcctccgaatccagctagggtcagatgaccctatcaagtttgttgatgtgggaggccactctcatggctgtacacccttggcttctgcacccactcggagtgatagcttcatgatggtgaagtcacccagtgcacctatggcaggggagcctgttcgcccaagctgcccaccctctgatcttctctatgggctagaggtgagacctttgcaggctcaacaaatgcttgagggttattctgatccaggcatatggctaggccatgtcctagagagtactggcctctcagtaagtgcccatagtgatgtcaccatttttgtaagaggtaactatgtggtagacgctgtgctttgtaactgtttygtgaattaaccagagttgtcacagtttagcattgggggcgggtcatgcctatatctgagtaagaaatgaaagtaattggtgatcaagagccaggctgttgtggaagcatgatgatggaatgtgggagcacaggaggctacagtgcacagggtacagtgcaccaggcagtcacttggacaaaggtggctgttttctctactcttcctgaaagaggggatcagattctgaagtaccttaactctaggttaccatttcccaagggattgaggggaaataaaatctttgtctcccagtatctagtacactgtgaagggacctctctatttgaaacatagagacagcagaaagaggagagaactaaaggaatagagaggcacgcatcagagtggtggcatagatcttttggtctgggtcttaggactcatatcaagtccctactggggatttgaactagatgcggtaaattggaaggttggggcgggttggtcatcacctttggaaaaaacagtaagtgaaatcacttatgtcagaaaactggtttacagttggctgattcatagaaacagccaccctgtgcatctttaagttgagttctcctgaatttggtgaaaccatgaaacctagaagccaagccatccatgcttggcctctgaccaccctcctgggtgacctgattcagccccagaaatgttcccctacccaaaaactgtaacactcattccacatttggggtctggrgtgtcagaaaagctaagtcccatgtcagctgacattgagatttccgcaaagcattgctggagagtcagggcaagactttacaaggttcttactaatcttttctctcaccttagcagcattcagcaggatgggggagggtgggggaatacatgggctttgcctctcccagaaggacaagattttgctggttcaagcaaagtggtggaagcttctgaagtcatgcaggaagttgctgggacagaacgctgaggagttttgtatcactttgtcttccctgttgagtaccatctgagctgtcaaactttgctgccaagggggctgaatcaacctgcagcacgaagtgagtggggaggtaggaagcttctgtgacacagatttgcagcctgtgttcccaaggtttccaggattgaggaractccataattggttgagagcacacagactttttggccaatcagactcagagctgaggtgggagatctgytyttccagcccgcctctcctcctccagctccccagctccactcaaattcagctcccctcccccctgcccacccccgccactcgrtgactaagaactgctgcaagcaggcaaacctccgagcagtttttaagmggctggaaggagacataagagacttcagctgctgcattccaagccctgggtctaccttggagacaggacagcacagacttactctccacaaagggacttctgggtcatggggcccaagacactcccacagctcgctgggaaatggcaagtgctgtgcatgttgtccttgtgctgctggggctgggtgtctgggcagcttcgttactcagtggtggaggagtctgagccggggacgctggtggggaatgttgctcaggatctgggcttaaagatgacagatctgttgagccggcggctgcaaytgggctctgaggagaatgggcgctatttttccctgagcttgatgagtggtgccctggcagtgaatcaaaagattgaccgagaaagcctatgtggagccagcaccagctgcctgctgccagtgcaggtggtgactgaacaccccctggagctaatccgtgtagaggtagagatcctggatctcaatgacaactctcctagctttgccacccctgagcgagagatgcrcatctcagaatcagcagcatctggggcacgattcccactggacagtgcccaggatccggatgtgggcaccaatactgtgagcttttacactctaagccccaacagccacttctctctgaatgtgaagaccctaaaagatgggaagccattcccagagctggtgctagagcagcagctggatcgtgaagcccaggcaagacatcagctggtgcttactgctgtggatggggggaccccagcccgctcagggaccacccttatctctgtcatcgtgctggacatcaatgataatgctccaaccttccaatcctcagttctacgtgtgggaatcccagagaatgcacccattggtactctgctgctccgcctyaatgccactgatccagacgagggcaccaacrgccaactagactattcttttggagaccacacatctgaggcagtgcggaacctctttggcctagaccctagcagtggggcaatccatgtgttgggtcccatagactttgaggagtcacgtttctatgaaattcatgcaagagcccgtgaccagggacagcctgccatggagggccactgtgtgattcaagtggatgtgggggatgtcaatgacaatgccccagaggtgctattggcctctttggccaaccctgtmctagagagcacaccagtgggcacagtagtggggttgtttaatgtgcgagaccgggactcaggtagaaatggtgaagtgagccttgatatctctcmrgacctgccatttcagattaagccttctgagaaccactactcgctgctaaccagccagcctttggaccgggaggccacatcccactatatcatcgagctgctggccagcgatgctggttcaccttccctacacaaacatctcaccatcaggctcaacatttcagatgtcaatgacaatgcaccccgcttcaaccagcagctttacactgcttacatcctagaaaaccggcctccrggctcccttctttgcactgtggctgcctcagatccagacactggggataatgcccgcctcacctactccattgtaggaaatcaggttcagggagccccagcctcctcctttgtgtatgtcaacccagaggatggacggatctttgyccagcgtacctttgactatgaattgctgcagatgctgcagattgtggtgggggttcgagactccggctctcccccattgcatgccaacacatctctgcatgtgtttgtcctagacgagaatgataatgccccagctgtgctgcacccacggccagrctgggaacactcagccccccagcgtctccctcgctctgctcctcctggctccttggtcaccaaggtgacagccgtggatgctgatgcaggccacaatgcgtggctctcctactcactgttgccacagtccacagccccaggactgttcctcgtgtctacacacactggtgaggtgcgcacagcccgggccttactggaggatgactctgacacccagcaggtggtggtcctggtgagggacaatggtgacccttcrctctcctccacagccacagtgctgctggttctggaggatgaggacccygaggaaatgcccaaatccagtgacttcctcatacaccctcctgagcgttcagaccttaccctttacctcattgtggctctagcgaccgtcagtctcttatccctagtmaccttcacctttctgtcagckaagtgccttcagggaaacgcagacggggacgggggtggagggcagtgctgcaggcgccaggactcaccctccccggacttctataagcagtccagccccaacctgcaggtgagctcggacggcacgctcaagtacatggaggtgacgctgcggcccacagactcgcagagccactgctacaggacgtgcttttcaccggcctcggacggcagtgacttcacttttctaagacccctcagcgttcagcagcccacagctctggcgctggagcctgacgccatccggtcccgctctaatackctgcgggagcggagccaggtgaggggctcggcgccgccccgggcgacccctgggggcggcactggagaagccgcccgtcctcataagggattgaacttgcatccactcctctccggccggcttggtcgctggctgcgctccacccgattctcgggatcattggaccgtttgcgcgaaaccagagtggccgattaagggatggggctccgagcaccgggggtggtggcgactgtgggcraggggaggtgggaccgacccccacccctacactcaaaaaaggccggggcctccttcgagcttccggtgaatttcgggcgatttccgcgggtgtcgggggtcccgggaggaggcagtcacagatccacccctgcagccagcctcctaggcgccggctccggcacgcttcgccggtctgtagatttcctcttcgatttctccccagctcccagcatctgtgacttcactgttaccctccctatccccgcatcacccaaccgcacctgtctgcgggacttaggtgtgcgcgcggggctcatgcgtgtcctccctgctggccacccccacggcccacacaagttgcacgggctcgccacgccccgccaacacgtgcgcggacgcacgcacgcactcctcgcacgtgggcttacgcgaataccagctttcactgccactcgctcgcggccagattcacaggcctgttccggtccactcgcagctcccctmtgccgctccctccgccgggctcaggagtactcgtagctgattrtgcgcgcctgagggtcccagatcgcggccgcccaggaccaggcgaggactccggagcctcctctcacctctcccacytgcgccccgggctgggccgggtcgcctggggggcggcctgagcgaggcgcggggccaggagcgctggagcgactgccgctctaagtgccgggcgggcaggactctacgatccttgggccagaggtccggatggtcccgggactccgtctcaagggtcggcgacccctcaacccagaagcctcgarcaggcggacaggcagagctgcccagtggccgaggcgcggcagggctccgcgttgggcgagtgagtgagcctctataggacagcaggactgggactccagtggcaccagcggccccttcctcccgcaggaagtgaaagcctcgagcgccctggctctcaacccccagagatacaggcttttggcgccgtcgtgatcacaatgtgcccagcgatctagggtcagagatttggaggtgaccaaactatctgacactctaacaagtcctgtctcctctggcagatggaaagctataggctctgccagatgccagggtgcccttatgtgtgaggaaactacaatagtaaaaaacacaagtttctccaactccaggagcttttattcaaaatatatcaatgcctaactctgctcctaggactgtattttgaaacacccccaggtgattttgatagctgattgagagaaacttactatataactcctttgagaacctcatctcatttgctcttcccaccattgctgttggctaggtactaacatgcctctcttataacagcttcacagaggtcaagtgacttgctcaagttcacagagcaagtaagagagattctaacccctgtctaactccagaatgtgtgcttttaatttcttggcacttggaactttaaaagcttgaggacaggagaggggagttgcctctgctgggattttgcttctgctgggatggggcaagggtggggttccttcccttttaggaccttacatgtggggaaagtcttctgtggctcctcatttctgagcagtccccgcagcgcaaacttggccagttatccttttggagattgagttcccccagctccgtttcctcctatcacaatcactgcatttccatgtagattctgctgtgtctaagaatacagtggctgagggctggccatccctgtgcccttctccatggcagccccagaatggtgctggtgactcccgatacacctggaatgctaggtttctgggttctgctcatatcactgccacctgtgagccttgagtgagccactggcagttccggagcttccttctccctggagtaatctgagatactcacactctctgcttctgggagcaagtatgagtattaattaccagcccaccccagaaccagtgaggaggtggctctaggagtgctccatgagagtgtgtgatgggataacacaccccctggaaagaccagaagggactcaggaatgaagtggctggccagagccccacaccttcagctaggtgggagatggctacacatcagccccttgggagccctggagacttagttggccctgcttggaggctgtgggagctggatccctccccgctgcatcccttccatttttctccgtctcagacagagcagccttgttctcttctccttagtcacagaccattgtctggcacggagttctaggggtgagaagtgtcccgggacttggatgccccgcaaaggcccaatctggcatgactcctaaattaataatgtatttagctgtgggaagagattcttgcaagccaagggcccagagaagatgtccctgtgaatgtstcactgcacaacctggcaccaaaagggttaccaagaacagcagccatcttgctgcagaggatgctttgttcccagctgaggagttgaataaattcattctagggctggtagaattctcattgaaaagcctcctttgccactttagggggctttgtctgcacctcttcccccagttccacagaagatgccttcagtccttgaattttggctcaggagttctgactctgggggcagggaggaaggggccatttctttaggaaaggagtctcagcttgctcactgtggtcagatgaaatgtgatttatctcttggtttctggkacctcagacctctgagacctgaggtgtattttgtctttggagatgagtccacccctgccccctcttagtccgttttmttctctgtgcccactcccctccttctctcccggcccatccctaggggctcgggtgacattctaacttctcacgggtactcagcccctttccmtctgttttctccacagcaagccccgcccaacacggactggcgtttctctcaggcccagagacccggcaccagcgggtaggtgactgattctccagcccaccctcttctctgcggcattttctcasggatgacgtgrgagsagatgggggagggcccascatttgctacasatggcttctccctcagtttgagatcccagggaggtcttggtgtgcggggggctggcacacagaccccggaaggaagaggcgactgccctgactgttcaggaagctcaattcacatgcttgccccttccctcctcgccacgaccggcaccttttcctatcccctgagggcactgtggaaccaaaggatggtcttaagctggtctctgggtgaaagcgaggctttctatgcccatgtactgcctaaccccctcccctgagttgagctgggctccattatgacctggggctcaggcagaaaagcatttgaccggaggaggcggtccgcactcagcgcctcctccagagcctccagagccgaggctgactgcagcctggggagagtggaggcagcacagctggaggtggaactgaggaaggactgggcggggcatggagcaggcccccttctccggcccctcctcccactgtcctctgcccctacttgtcctgctctctgtctgtggggtctccgtgtctctgcccctttttcttgagtttccgtctttgccactttctcttacctctcagtccttccctcagtctctatctcgctttgcaatctctgcctctccctctcttctccatctctgtcttagcttccgtcttgattgctgcacctcagcctcagtccctttcatttgtctacttgcattgatctgtgccgcccactgtgcctgccatggcataagtgctcaataaatgtggagtgagtaactacacgggacccttagtctctttctccttctctatctctgcctccctgtccttgtcctggacctcttttctgtttctcctttcaccgtttcctagcgccttgtgttcttctatccccagcctctatgtttctctgtctctcactatttctgctttcctctctgttctttgtctctctttgtctctgtctctgtatatctttctttgtctctgtctctggtctctgtgcctgttgtctttttctgcctctttctctgttactctttctttatctctctttttcttttatcttgtcttttttctctgagcctctgtctctgtctctcatttttttgtgcttgtgggcaagccagcacacacaaccccccacccaccacccaccaacaccccgctctcttccttccctgcccctcacacactgagcctttgatcgcagctctccaccagacaccctcccatccaagcagccccagctgctcatttcaatctggtatgaattcctgctgagacaggaaccccctgcgggctgaaggggagggaaacttcagcagaaagaccttcagttggtctgagcagagtgggataggctctgcgccaggcctcccagttagaagtcaggagcctggaggagtctcagagcccagggagagaagcaggagcttgggccaccttaccctayctcctcaatggttgagtacttgctgtccacatttgccaagttgctacagatgctgagcttccaagagttatctttcccccatcctgcaaccaaccaaacccttgttgccacaaggacccaggagcccttggtgtatggcagagattccagcttctgggcatgcacagtcctgtcacccattttaggaacgcaaagcgcttcttagaaggcccctaaaaagcagcagatcaaaaggcttgggctgcccttgcccttcctttgaccccagctgttgtccttctccctgctggccttgccaaccttctcataagttatccattaagtcattaatgtattcattcgttcatttattcamcaaatatttatcgagcatctactatgagcagggccctgtgctaaacattgggctataggagtgaacaagtagatgtgatcccagaactcataggcttccagaccagcagaggagactgaaaatttgcaacaagtaacacttaaaaaaaaaaaaaaaggctgggcactgtggttcacgcctgtaatcccagcactttgggaggccaaggtgggtagatcacttgaggtcaggggtttgagaccagcctggcagccaacatggtgaaaccccatctcgattaaaaatacaaaaattagccaggcgtggtggcaggcacctgtaatcccagcgacttaggaggctgaggcagaactgcttgaacccggaaggcagaggttgcagtgagctgagatcacgaaaaaaaaataatctagccacaaatcacagtaagttctgagaggcagagaacaatgtgagtgtaatgggggggggaagatcagagaaggcttctaggaggaggtgacattgagaagttctaggccatttatgttccctctacctaccaccaccccaggccatacactggctttgaagcagaattcaccattgaacctggaagccccaccaactgcctctcatgtgtcctctggggtgagcaccttacccctgcctcaactcccattccatcaaatgagaggcttagtggcctggaatacatgtgggagctcttggagatatggaggagaaggtgcggaacctctctctctctcctctctctgcttccttagttaacttgtggaggatgcaacaaaccttttttttttttttttttagacagagtcttgctctgttgcccaagctggagtgcagtggtgcgatcttggctcactgcaacctctgcctgccaggttcaagcgattctcctgcctcagcctcccgagtagctgggacagcaggtgtgcaccaccacacccagctcatttttgtatttttagtagagatgkgtttcgccacgttggccaggctggtttcaaactccccgacctcaactgatccacctgcttcagcttcccaaagtgctagaattacaggtgtgatcgcccccggccacaacaaacatttttgattcagcggctccaaagtgaaataagcgttaggatctagtccagtaacttcaacttctctccttcattcattcaacaaatggtcagtgagcactttctgttggccaggcagtgttctcgatgtgggaggcccctgccctcaaggagtttacagtgcactgaaggagacaaatattgaccaaataattacaaaaataaatgtgagactgaaactgtcataagtgctaggtagaattgtatctggtggtgtgggcgtataatagggatttgatttagggagcaggaggacatcctggaaatgaagttgtgctgagatctgaaagacaawtacaaattaaccagctaaagaaaagaaggaagagcattccagatggtcaggcataccagcttcaaagcagggctggtgttgagttcttcagtaaacttggttcaagatcaagccagctctgggtcacactgcctacacagaaggaagagcattccaaatrggaaaagcctatgcaaaagccttgtggtgaggcctcctgggatcaagggaatggcagggagttttctctttgctggcactggagtgaggggatgaagaggagaggttccttttatccagtctaaccctggttccagccttctgttgatgccctgcctcactccctccccaccatcttgcccactgccctccagcctggtctggtcagacacaccagcttcaaagcagggctagtrttgagttcttcagtaaacttggttcaagttcaagtcagcactgggtcacactgcctagacagaaggaagaagacctggccaggtgtggtggctcacgcctgtaatcccagcactttgggaggctgaggtgggtggatcacctgaggtcaggagtttgagaccagcctggccaacatgatgaaaccccatctctagtaaaaatacaaaatattagccaggtgtggtggtgcacacctgtagtcccagctactcaggaggctgaggcaggggaatcgcttgaacccaggaggcggaggttgcagtgagcygagatcacaccactgcactccagtctgggtgacagagcgagactccatcaggaaagaaagaaagaaaaagagagagagggagggagggagggaaggaaggaaggaaggaaggaaggaaggaaggaaggaaggaaggaaggaagaaaagaaagaaaaagggagaaaaaatgaagaagacttacattctgaagttcctgcttggcacatgcttctcctccccaccactatcccttctcaggtcatcctttgggtgtctgatcccaatagctgttgtctcaagctctgagcccagcaaaccatttcccccttcttaggctgtaacccaggccctgccctgcagctgtccccagcctctgcacaaagagtctccatttggtccctagactgttctctgatggctccacactaccatccctcctctgagagacagtatccctgctctctctcagtttgggcagtcattcaacaaacaaatagcaacttaatttttttccacttataaaatagtacatgctcattatagaaacatgaaaaatagaaaaaaaattaaaaggaaaaccacccatcattttacaatctagggagaaccaccaccaactacagtttaatatgaaacatttcaaatatgtacaaaagtagagagaatggtgtcatgaacctgtatgataccactatccagcttcaactaatgccttatcttgtttcacctatatccctacccttatcctgtccttggattcttttgaagcaaatctcagacatcatataatttcatcttggtctccaccatctttaacagatgacttttttttttttttttttttttggagacagagtctcactctcttgcccaggctgtggcacaatctcagctcactgcagccttcgcctcccgggttcaagcaattctcatgcttcagcctcctaagtagctaggattacaggtgtgcaccaccacacacagctaatattttgtattttcagtacaaacagggtttcgccatgttggccaggctggtcttgaactcctggcctcaagtgatccaccctcctcggcctcccaaaatgttgggattacaggtgtgagccaccttgcccggccagatgattctttcataaggtccacattttatatttgagtgagtgtctcttaagtatcttaatgctcttttaatgtaaaagacttcccctccatcttccatttttgcaatttatttgttgaatccctgccttttcatatatatctttctaaacttttctttgtgtaatcaaagaacatgcatgagcttcatttttatttttatttggcgcaatctcggctcactgcaagctccgcctcccaggttcacgccatgctcctgcctcagcctccagaatagctgggactacaggcgcccactaccacgcccggctaattattttgtatttttagtagagacggggtttcaccgtgttagccaggatggtctcgatctcctgacctcgtgatccgcccgcctcggcctcccaaagtgctgggattacaggcgtgagccaccgygcctggccgagcttcattttaaaaaaatctcattcacctaaataagttgttcacaaacttgtcacactttcatgtgacactttattcacatattaagaactgttattcccagtcatacggtacatttcctactagttttttaaaaatagcaactgaggccatactgtccaacagaattatagcttttttcttctttgcagtgtatcatgagaatttccccatrtctttcaaaattcttcccaagtcatttgcagagtaactcctcttatgaatatacatattattttacagaataagtcctcatatgaatatacatattatttttctaatgctaatgggcttttgctacattagaaaacatacacattcatttacaattttttttttttgagacagtctcgctctgtctccaggctggggtgcagtggcgccatctcggctcactgcaagctccacctcctgggttcaagcaattctcctgcctcagcctcctgagtagctgggactacaggcacgcgccaccacgcccagctaatttttgtatttttagtagagacggggtttcaccatgttgaccaggatggtctcaatctcttgacctcgtgatccgcctgcctcagcctccctaagtgctgggattacaggygggagccaccatccccagcctcatttacattttaacacaattaaattcaggstgttgtcagggtgacttcctagatttctcagttttttgagcatgatgtagggagtattttattatagtccagtctatgggatattcccttatacacayacacacacacacacacacacacacacacacamaccccaaactcaatagggcaagaaccatattcatcatctcttaaatcctaggtcctgtcacaggccactgcttggaaaatagttgactaaatgtagtccatttcttccatttttacttttcactattccccaaatcctggaagagtccctcatatctgctgctggggctccaaggcckccaagctgaagcccagtacgttgttgtgcataagatcataggccctggaatcatattaggctggctttcaggttgcaactctaccagttccagctgtgtgactctggtatagtctctcaacctctctgagccctgttttcatctgttggaaaatatagataatcacaacacttatctgcagggtgattccgaggataaaaaagacaaatatattacccagtcagcttagaataggaagctctcagtaaatggttaaaaaagaggtctctctccctctgctcatctcttacccagcttcacataattggcagcccacccacctgtttggccctcaaccttcaaccatttcccaggacgcctccttacactcctgatcatcatggttccaaccccactkttccactcagctttgttccctcaacaccactgctccctgtgacaggtcatcctcctaacctctggcatctggtcccgttgtctccctgacaacccgcatgctctcctccctgcaacccccgccgcttgcctgctctccctactttattcccattagcccccttcacctggggctgagaacacctggccttgaccctgcaccctcagccaggcccacrgagctcagtcgggccggaagtaaggaccccagatattcagttgaggaatttaacattaatacaataatatagaatccaccagcagattttcataaatgttctgtgtgttcttttatccttttttttaatccaggattttatcaaggagcatagattgcatttggttgtcacgtctttcctctcctttaatctggagccagctcccagtctttttatttttttaatgacatggatatttttaaagagtccaggccagttgtactttaaaatgtccccgaacctggatttgctggctattctctgatggttagattcagattacacaccttggtaggaatacttcccgcagcatcacactgggactcatctaacgtcggcctgtcccactatcagtgatgccgagtttgttcgtgtggtaaaaacagtgtcccagatctctccattataaaaatatatttttataaagatattttaaaatatttgtgaaaatataagtaatctgtggatgatactttgagataggcagcaacccttcatgcaattttagtattccctgakgatccttgcctgtatctgtttttacatcagtgattacaaagcggtgatgttctgtcattccttctacatgtatttgctggtattcttctgaaaattacctggatgatttcttcagatttaaattcactgtcttttccttggggaagcctggactggctgagctgcctaaccctgactctctgtcttttttttttttttgacagggagtctagctctgttgccaggctggagtgcagtggcaaccttcacctcctgggttcaagcgattctcctgcctcagcctcccaagtagctgggattacaggcgtgtgccaccatgcccggttaattttttttttttaatatctattttagttgagacagggtttcaccatgttggtcagaatggtctcgatctcctgacctcgtggtctgcccgcccctgcctctcttcataccctctggtagcccctgacacagcccatggcaagtatcacaattgcaattactctattgtgtaattatttaaaatcagcctctcrgtgcccaccatgagcaccgtaaagatggacagtttctatcatactcacagccacaaccccagcacctggctctgtgtctggtacatagwaattgctcaagaaagaattgttggaggggcgcggtggctcacgcctgtaattccagcactttgggaagcggaggcaggtggatcatgaggtcaggagttcgaaaccaacctggccaatatggtgaaaccccatctctactaaaaatacaaaaattcgctgggcatggtggcatgtgtgcacttgtcgtcccagctgctcaagaggctgaggcaggagaatcactygaacctgggaggcagaggttgcagtgagccgagatcgcgccactgtactccagcctgggtgacagagcgagactccakctcaaaaaaaaaaaaaaaagaaaaaagaaaagaaataattattgaatcaatggaaacagaattacaactcttcccacttttgggaaggagaattgagattcctgctttccccttcaaccctagctttatgtttgttgtgatggtatagaggtcacacatggcagccttgtgtctgttcttaggctgagttcatctacttagggacggggaatcccagattgggcaaaaccaaaagcagggacagaccttggaaaaattgtaaagcagttcttggttgtgctcacccaccatgacaaaatatgcacacacacaacgcaacacacacacagacattttcatgccttcaaggcctaccctacagcctttcccatggtgccaaacccttcttcttaccttacagtcacttaactgtctctgctggtctcttcccactcatttaggcaacaaatatttattgaaaaacttctctgagccagatggtgccaaacagttacctaaagggcagactgtgtgtgtgccagggctgtttcccgccaacactcccctgcaaattgaaataatttcatccttggaaattcaaaaaaatcatgaaaattgtcactgtgggaaaattccaagtagagctgaaccttctaagaagcagagagttcttcttatggtttagtatttttttwaattatgaatcatttcatgttttttcaacactcggagtttctaaaagtctcacttaggtccaagtgctaggctttgtgctaggtgcttcagtaggaagcaggtggagtcgctgcctcacagaagccagtgtggtggaggaacagacaggcactacaacagctgcagtgtgactagtgccatgtggggcagccgctgggatgggagtacagtggaggcacctgcccagtctgagtggatctcctctgatatattttattcgtgtcatcatggcaaatgttgggggactggcattctagggaacaccatctgcccaggattcacagcaagagggaacttgagggataggaaagtgcaccttggaaaaggtttgatgatagagtgtttgagggcggggggtggggrttcttgtaaaataggaggggcaggttcttctatggcsgtggattttactctgagggcttaggaagccattgaattttagaaatttcttctccctgctccagggtctcttggggcctcctacatctccccctaggtacctcctaggtccccactttttctctagctctggaacattctcttccatttcccaccttcacagtcctctggagaaggtctgatctccctcactatgacaggaagccaggctctctcatggtgggtgggggaatgcactatgttcaatgcatyggaccagcctggccaacatggtgaaaccccgtctgtactaaaaatacaaaaattagcctggcacagtggcaggtgcctgtcatcccagctacttgggagactgaggcaggagaatcgcttgaacccaggaggtggatgttgcaatgagccaagatcgcgccactgcactccagcctggatgacagagtaagaccctgtctaaaacaaaaagaaaaaagcatcggaggcagcaaagagctggtttgagggactgacttgtgggattctgkcttctgaaggattgtagaagtgcctcctaccttgctgagagaaacaggtcttsggcatggggtagggttagggtactaggtttgggagccctgggagaggacaggaggggcatgagctgtgccggcctgggagtctgtgctcaccatcctactctctccccagctcccaaaatggcgatgacaccggcacctggcccaacaaccagtttgacacagagatgctgcaagccatgatcttggcgtccgccagtggtaagtggtgtcagtgtgtgtatggaagagtgggagacctggggttctggggtrcatctcacagccaccatgccyacggactggatgtcaaacctgtgtagtttctccagatctttcggcaggtctgaaaggacccacaattccaaacataaagcctggaattgtggctaaggaacagcagargggttgggggtcctgggatgcctggaggagagcgaacaaggaaaagactcatggagggaatagtggttacaagtctagctctggaatgggacagtgtagctcaggtcctagctctgctactatccttgggacttggatcgacttgctcaatctctctaaacctcagtttcctcagcctagaaagtggggacagggaccccaaagggttgttgtagagattaaatgagatgataccacaaagcatagagttctgggcctggcgcttggaagccctcaagcaatgaaagtgggtgtagaaatccccagccgagagaacacctcctctttatgcgaggctcctcttttgctgcccctaactccagagtaggattctggttttcccataaggttgactaagggcttcctttgtaatagagattcggctagtggtggttgtccctgaagagtcactagggcccagagcaggagaagaagaatatcatttgtccttaagagcacagcctaagctgggcgtggtggctcacgcctgtaatcccagcactttgggaagcwgaggcaggaggatcatgaggtcagsagttcgaaaccggcctggccaacatagtgaaaccctgtctctactaaaaatacaaaaattagctgggcatggtggtgcgtgcctgtagtcccagctacttgggaggctgaggcaggagaatcgcttgaacctgggaggtggctgtggtgagcagaaaatcgcaccactgcactccagcctgggcaacagtctcgctctgtctcaaaaaaaaaaaaaaaaaaaaagagcacaggctttagaggcaggccaatctggattcaaatcctggcacctggcaccaccacttagcaatgagtccttaggtaagttattaaaccccctcggtttcacttactattaatgggcacagtattaacggatctcattgtggtgttaccagggccaaatgcaagtccctcagcacaggattggcagagagtaagggcacaatatattattatctttgctgacccaaacccgttttttactgggtagaaagcagaattagaataatgcctattaataaagactagcttctggagcagcaaatcctgggcttataaggaggctggcagaggatcaaggcattgccctatatcatgaactgatagccctgccctccagcatgtctggaggactggtgggtagagaaccaggtgaaatcacaagaagcactgtcatcacacctgggcacatactaaacaaactttaggggcctcctgtcaatgaatcctctcaatagctctgcaaggcaggtctgatttctcacactcgacagatgagagaaccgagaaggcacttgccccagggtcctcagttttgagctgccaagctgaggttctaacctggctcaactcctaagtttatgctctttctactatagggaccatggctgcctttggatccagcctcggcttctctattacctgagcaggatgagaggctgtcctcttcctcgagctctgctttattcttccagatcagggttgccagataaaatacaggatgcccagttacagttgaatgtcagataaacagcaagtactatttcagcataagtcagtctcaaatgttgcatgagacataatgtactaaaaaaaaaaatgctcattgtttacctgaaattcaaatttaactgggagccctgtacttttatttactaaatctggcaactctaccccagatgtctgtgaggttaagtggggccaggcctacagctgacggaaggacagagagagaggtggcagggactgctggcctcctgaggcagagctgtcccaggtctggtggggctatgattccagagaggccagagactgagtatgaaagtggcaggcggctgggtctgaggagatgccaagttggcctcttgagggaaataaacaggtatatttagctgttgtggccttgcgccctgaggccaggaagcagctttttagcctaaatccagatgttaaaaacagaaatgaaatcagtatttatggccccaaaccctccaagcaagtcatgcagctcgttcccctgtcaaggcctcccacctttggcccacacagggcctgaccctcgtctaagcctgcgccctggggaacggaccctgggggtggaggtggtgggtcaggccctgctctcactttcacacccgcttcctagccctgaaaccagagaggttcctgaagtccagcccagccaggcctgtggggctgctgagaggggttaagtaagagggagagtaaaaaccgacacttgggaggaggcttttaaaataaacatctgcggggagggatgctctcaaggaggctgcggtttgcagctcagccagctgtgttccagctaatcagcctccttgggctactctggagttgctgccttggccctgggatggggtakgttaagaggacagagggakgtcagggagctgggggctgagtttccctgagtagaggctggcacaggagagaaggcatcacccccacctcgtccaggccagaagatgtccagcttcttgaggctctcctaagtctgcctctcctgggaccaagagaaaatcccggtccttgaccaaggtgggccttggggggagtggggtgtagagggaggggcactggagaactgactctacagaaagtcaaagctggcaatccaacttcttcccctcagatttatagatgggaaaacaggcttgagccacgcagagacttgaccaagctcacacagttccttagtggcagagcagagcaaatattctctttcttttacattctggatttccrtatcttctctccctcctggtccagcccaacctcagggcaccccccacgaggtgggcgggggatggctttgtcacttgcacccactcggggtgctactcagagatcttgggtgcacatargacgtgggtgggccgagcttctagctactccgtcaggcccttcctgtcattctgtctctgcctcccttctcyctgcttctccgtgttcctcctcattcttttctgtgtgcagggagactacaccccccaccccgctctttctctggcgcctctgaggtcccccctctagcccctaaatcactctggaatcctggctctttgaagccagatctgggcccccctcccctaccccttccattcccaggctgggaaaggctgaagaggctgacsgctggasgggagggggcgggkcggtggcggatctggcttccttttggagttaattagggaaaacagagaaatgtcagcggaatgaaagggctgggggtgggggccagctggggtaggagaggaggaagtgggcagctgctccctcccactcaacccctctcccccgcccccagaaagctctcagctccggggatttgcgacatgaaatgggggctgtagaaacctgagcgctggtgcgtgaagagaaaaaccgaggcgcatcccggctctcccctcccgtgtgccctcctcctcttatgccggcttgaaaatatttcctgtctctctatttctcaatccctggttgatgtcccaggattactcagcctctccggctttagtcactctcgctacccgctcccagggtccagggtggaggcagagggaggctgggagagaagctctactgccagctgggcctgggctggcctgggcatccctgaggttttaactgtctcctaaccacagaggatctcagggcctccagcagcgagccccaatgagtcaaactcttgtttcctcctctcccacccccgacccagtcagggcaggtgaggggtagaggtgatggcatgctggatgtgacggtgttgatgatgtattgcacaggatgaagcaccatctcatttagtcctcacagcagccttcacagtgcgtacaaatcagctggcaattccgagaggctgcattctaaacaagttcctgggtgatgctgagccagggccagagtgtggacttctctgggccccagtttcttcttctgtacagtgggacgttggactggaggtgctgtctgatgtcacctagctgtggcactctgagcctgtgcctaaagtgtccctgagatgtctagtccccgagatcatcatctcctcagcttcatagagccgrgctcttctccatcttctctctacctcccattcactcagaacagggataaggtccaagctgctggtggtgatggtgactgactgtcccttccagcatgcgcttaggtacacttgggcctgaatgcccctctaacaaatgctaccgggtatggccttggtccttctaacacttggttccctcatctgtaaaatgagggtcataccacatagctggctgggctgttatgtagaggttaaaagtgattgtgcatgtgaagcatccagcagagtgcctggcacacagtaggtgctcaaatgctgttttgaaatacaaaaattagctgggctagtggtgtgcacctgtaatctcagctactcaggaggttgaggcaggagaatcacttgagcccaggaggcagaggttgcagtgagccgggatcgcgccactgcactccaggctgggcgacagagcaggactccatcttaaaaaaaaaaaaaaaaaaatgctgttttgaaatggaggcttggaagagcactcttcacccycaccccacacacttactaacggaactaccgaatctctactcgtgccaggccttgcttggcaaaggctaggggcatgtaaagccatggtttcatggctgctgccctccaggagcccatggtctagtgtgggagtcagaggctcccttgagaaagccagggcaaggaactgagagcccgtgtcacagccctgagagaaataccagcgaatgtgttttgagcacttacatctaccaggcactattttacgtacctgacatacattttcttatttagcattcactaaaaccagaagaggtggttaccattatcatccccattttgcagatgagaaaactgaagtggcataaggaggttaggtagacttgcccaggatcacagtgagtaaggaaaggagctaggaatcaaacytagactttctcactccagagcctcttaacctctaccctcaactcttgtgaagagagactaccttggtgacccctatattcccagtgctcagcgtggtcaaggcccagggtgctgtataggcattcattaactgctggggatataagacagtgactgttgaggaccctaagtttagctcccacctgatcttcctctgtctctgcagaagctgctgatgggagctccaccctgggagggggtgccggcaccatgggattgagcgcccgctacggrccccagttcaccctgcagcacgtgcccgactaccrccagaatgtctacatcccaggcagcaatgccacactgaccaacgcagctggcaagcgggatggcaaggccccagcaggtggcaatggcaacaagaagaagtcgggcaagaaggagaagaagtaacatggaggccaggccaagagccacagggyrgcctctccccaaccagcccagcttctccttacctgcacccaggcctcagagtttcagggctaacccccagaatactggtaggggccaaggccatgctccccttgggaaacagaaacaagtgcccagtcagcacctaccccttcccccccagggggttgaatatgcaaaagcagttccgctgggaacccccatccaatcaactgctgtacccatgggggtagtggggttactgtagacaccaagaaccatttgccacaccccgtttagttacagctgaactcctccatcttccaaatcaatcaggcccatccatcccatgcctccctcctccccaccccactccaacagttcctctttcccgagtaaggtggttggggtgttgaagtaccaagtaacctacaagcctcctagttctgaaaagttgsaagggcatcatgacctcttggcctctcctttgattctcaatcttcccccaaagcatggtttggtgccagccccttcacctccttccagagcccaagatcaatgctcaagttttggaggacatgatcaccatccccatggtactgatgcttgctggatttagggagggcattttgctaccaagcctcttcccaacgccctggggaccagtcttctgttttgtttttcattgtttgacgtttccactgcatgccttgacttcccccacctcctcctcaaacaagagactccactgcatgttccaagacagtatggggtggtaagataaggaagggaagtgtgtggatgtggatggtgggggcatggacaaagcttgacacatcaagttatcaaggccttggaggaggctctgtatgtcctcaggggactgacaacatcctccagattccagccataaaccaataactaggctggacccttcccactacataatagggctcagcccaggcagccagctttgggctgagctaacaggaccaatggattaaactggcatttcagtccaaggaagctcgaagcaggtttaggaccaggtccccttgagaggtcagaggggcctctgtgggtgctgggtactccagaggtgccactggtggaagggtcagcggagccccagcaggaagggtgggccagccaggccattcttagtccctgggttggggaggcagggagctagggcagggaccaaatgaacagaaagtctcagcccaggatggggcttcttcaacagggcccctgccctcctgaagcctcagtccttcaccttgccaggtgccgtttctcttccgtgaaggccactgcccaggtccccagtgcgccccctagtggccatagcctggttaaagttccccagtgcctccttgtgcatagaccttcttctcccacccccttctgcccctgggtccccggccatccagcggggctgccagagaaccccagacctgcccttacagtagtgtagcgccccctccctctttcggctggtgtagaatagccagtagtgtagtgcggtgtgcttttacgtgatggcgggtgggcagcgggcggcgggctccgcgcagccgtctgtccttgatctgcccgcggcggcccgtgttgtgttttgtgctgtgtccacgcgctaaggcgaccccctcccccgtactgacttctcctataagcgcttctcttcgcatagtcacgtagctcccaccccaccctcttcctgtgtctcacgcaagttttatactctaatatttatatggctttttttcttcgacaaaaaaataataaaacgtttcttctgaaaagctgaacgtttctgtataagcgatggaagctcctggcatgtgtgcatgaagtgatgagctgaggtgggtgctggaagaagggcggaatcgggaggccactytgtgtcattgcgcgtctagatgtttccgaattgcgtgtgtgtgtgtgactgtgcaatatggttgtgtatgcttgcaatgccgttgtgcctatgagacagtgtgcgattgtgtgcctatggatctgtgtaccgtgtgccattgtgtgatcggtccgctgtgggggtrgggatctgagtgcggcgtgtcartgtgcagtggagtgtgcagtctaagcttgcggctgtctccaggcagaagaggagaccccggcgcgggcgggggcgggttggcgccgggcaaacgccttgggtagaggggagaggacgtttcgttagttcccgccccttcctgactaaaattgcctacccgaagcgccccggagggcttcacgggaggagggtagactctcctttgcccccgcacccccacccccgctgcctaggggttttgggaaagccgcgggagtgggagggaatgcgggaggtgattcttccaaagccaagtctgcagctcgagcctcagtttccccatctggaattcgccttcccgctgacatctccgtagcgaagcctaagaaattggagggctcatcctcttcttgcgggggtcaaggggactgaaaggacgtgcaggaaatgagatccatcgcagactcagctcccctccctccttcctgtcggtgcttttccactcactcgcctgctctcccatctccccgccccctccgcctgcctcctcgaagcactgtgggattccgaggttgctgcagccagagaagctgcagaaraacacggagctgggggtgaagggggacttaaaaggggaactacccggaaggacccaagaacacaaagacagagccactgsggttatctggctggtcagcaagggtatgcggcttcctccgcgctgcggaggctcccagagccaggtcacccattctgccagctcaagtctgttgtcatgggaaccaaaccttccaacttaagaatctgggggcgactttctagcgtgggaggaagggtggtgtgcacggttgctgagatggaagcagggttttgttactcagagccaggctgcggaggggcggggtgccgggcgcctgggttctattccaggcacagcagcagactggcagagcgcgtgagcagctgtggtttgtcccctaattggtatgtgtgcctataaagctctgaaccagaaaggcgtggcctccggggggacgggagggaggcggcaggcaacccatccccacacctcaggccatactgaggaggcagctgcccaggctccagggctatttaaaaggcttttatttccagttccagagcccgcccgaatgggtttgtggtcctctccaggcctctccctgtctatcctgggcctgctcattgctggtctggcttttttgtgcaggtcataacgtgctcagacaagtatggctccaagtggcaagtcatctggagcatgacctcaggctcccaacctctgctgggcaggctcaggtttccaccccagggtaarcccctctactctggaatgtggtctgtggccaccaacagagcagaggggatgagaaaatgggagccagatgcttccctcagcaagagacacaggtactgccaggaaaccttgcgtgacatctgggaacatgaaaggttccaagtgagttccaaaaaagggctccaaaccaagtagcagcaatgtggaagagtcagggagctgaaccaggcgcccactcctttactgtggccaaacggccctgaggtgagctctggtggggcagcagccaccatgtattaatcatctctagccctgtgcccaagtaaagtgtctggcacctttagctttttcacagtgatttgtcaggtcaaccagggatttgaggcaggaaagactagaggagcctggactagagtgaaaagaaaacagctcagaaattcacacaggaagctgtaaggcagtactgtttcaatgctttattaacagttggaaacaaaaccaacaaactggaggtgatgacatcccaraagcctatgaggcaagggaaataggtttgcattttgtccctcacacctctctctctctctctttttttttattaaatgcatcttagcaaaagtagattaaaaaagaaagggtcaaagccccagatgtcagcgagcagggaggaggtgacccaggggagcaacagacgccctgcatcagagtcctcccaggaatagtccaaaggagctgctcttgcccctttatacacaagcgccagcaaccaaaaccctccctcctggcaataaggcctcactatagttgccctcatgcttcctaagctctctcttgctctaataactctaattctgggccaagcccaagagtgccattctttcttcctagctggggatggaaagctgagaggggcacaaggagggcaaaagtatcaccctaagccasagaattgcagcttcctgtggttggggccaccaaacagttcagtgtgcccacccacttctcttttagaagagagctggggtacagtgtatgaaggcactcctggtgcccagttccccagaatgtccagttagcatctgcacatttggcttgatacatttatacatttataaaaaactctgtggtcttagagttcctgctactcttaggcctggcccagctcaaccagagaaggggttcctcctgtgtcggattccctgggagagaggatctgccttggactcaagggtccagaaggtccaggggcayattcaggattgggcctgtgagaagaaatcccagaactctgtaacctgccaccaaagcttcttacattatggaggggaaagggggaaggaacagttttctttaaaaaaattttttttttcatacaaaaatagatccatttgcaaaacaatttctcagccaggaggctccacctcccatttccttgtagacagagggtgaggtgttgggatggtcacagtacaacccatagtccagatgagatgcaccaaagctcagggaaggcatgaggagggaaggtggctcagtagcctggggttggtgcagagcgtccagagaggcaagggcataaagcgtggcagaagctgggggcaggtcccacactgtcgctatgccctgcctgcctgcccacaggctctggcctgggccacagcacagcagggaaactggtccagatcctttgctttggaggcctttcccaggaaggtggggtaaaggtgggatttgctccctgcttccttaggagcagctcccagtgccacaccactaataataaataaccacagccaggagagggaagagcagagacaacagcaatgaaaggagggatctagcccaaaggtttacaagccccatgctattctcagggccagagaaaccacaaaagaaaagcacaaatccagcaagactgacctaggggggaaagcccattagaaagtcagggctgagaaaaagcaggctgggccttgtctgagatgaggccctctgagtaacagagaggagacagggttaaggcagcaaacatggaccctgctttggtaatacaacagccagggctggctaagtcgggctcaggcctcccctgcactgccctttccttctggcctccaggcagctgaagctgtatgtgatgttgagagagcagcaggccagagagaaagacagggtcagggtggtgggagtggccaccccagaggaatatccccttgagcctttaggcacatgctgcagggcaggacagtctgcggctccgctgaggagctgccgcggtcacaggacccacattagcttgcacggccaaccaactccttggcttcctcaaggattgtggggaatgtytcactgttcttggacaccttggcaggaacagcagccatggcatcatccttggtcagctccgaagctagcagagatgtgactgcacacccggccttcctgttggctgcaagagaagacgagagattctgtctatggaaggcctcatttctaatttctttcaaactctacagcagataatcagcgtaagccatgcagacatgactaccttggccacttcacagaggcccttactttgaagaaaggggcagagatccagcatgtggaatatattgttgggtggcaaagaatgtaagagagtgtggtgcaacaggaaagcaagccttgcccccttgcttccctgtgtgaaaacagcacaaaagtttgaacacagacagacagaactgggctgaagtgttagctatgtgacttaaggagagatgaagtattcaaagtctattttctcgtaatagggatgttggaattaaatagactaaagtttagtacatagtattatttttgttttcttgacaggtcccaggaaactcctaggccaaaacacttctcagtcagccctgggagggttgtccctagcagaaggcaaccttccgtaagtggctggagasactcccgcaaagaggaacagcagccacgcactgacaccgcactcccacgtgttcctccaacaacagatgcccacatgccttagctctttcccaccccttcaaaggtagcagccgtaatacaaatgccaagggccctacaaggtgtgtagagtatgtgggggtggcatggcgggggggaggtagtaataaaaactatgccagggaagcagaactgggataaagatggacaggagaggacccctaccaagaaatctcagcccaggtggctaagagatggtcaagttccggctgtcataccagattagaaaagaagaaccaaatcaatccacgagtttctgttctaactgctgggtttcatccccaagactctcatattcatttatggtatctaggcttatggccccagtatctgcagcaggaaggccactccttgagaccatgcccatctcatgatgtttcctcctcccatgccccagaacagcacagagcaactgtgtatacacaaacagctgtctgggacgaaagaagcctgacacgaaaggccatatgttatgggtcagcttctgcgaaatgtccagcacaggcaaacccagagatagaaaatagactggtggttgccagaggcaaggggaggggagaatcagtagtgactgctaatggggattatgaagtttttcttctggggatgatgaaacgtcctggaattagatagtaatggttatacaatcttgtggatattctaaaacccctgaattatacatttttaaaaggtgaattttaggtatgtaaatgatagctcaattggraaaaaaaaaaaaaaaaaagacttcctggagatctgggaaagctggagtggagaaagcagtaccrgaatgttttagaagcaggaccagatgaaagagccgagcactcctaaataaagaccaagactggggcagctgcatgactggaatgaagcgcctttttggaccagcaaaaagctttaggtaggcagaagccaaacaggatcagatagcccgtcttttttttttttttttgatggaatctcagtcgcccaggctggagtgcagcagcgcratcacagctcaccgtagcctcaacctcccaggctcaagtgatccacccacctcagcctccctagtagctgggactataagcatgtgccaccatatctggctatttttgtatttttttgcagagatggggtctctccatgttgtctaggctggtcttgaactcctgggctcaagcaatcctcccaccttggaacctaaagttctgggattacaagcatgagtcaccacagcctgccaaagcccaagtcttaaccaggtcttctctccctgcagagccatgacccagagctactgttttcatcccaggagaggctgcccatagatcaagcagggaacacgcagcatgcacacaggttaccaatttaaaggtctcctcctcctcctctacttcccagg

SEQ ID NO: 9925 - DNA, 75191 bp, Homo sapiens
  misc_feature (36055)..(37202): n is a, c, g, or t
agtgaacagttcccttttctgagcctcaatcttcttatctgtaacacagcgttaaccactgtcctggcctccagtgggaggatgtgtataaagcccctccaacagatgcttagcaaaagtaattgtggagtaaggctacctttggggaaagttggagaaaaacaggggcatgagaggggcttctaggatatagtaatgtttcattttgtaatctccaggctggtaatrcaagctcatttgtgaaaactgtacatttatgatctgtgcacttttctattaggtgcacaagttatatattattcccaatcttttgctatatattagtccaggtttttacttttgcaccaacctatttttgcaccaacctaataaatgtatgataaattccgataaaaaataagcataacacattaaaacacaaagtaaatatggttcctcttttggsttaggctgctcacctccaccagggcctgcaggaggcgctgcgtcagggcaccaaaggggcatccatcttccggctgttcatgctgggcctcagacttcttcagcagggcatccacatctaagcrrgcacaggaaaggaggggaggtgggctgaagttctggaattcaagtcctgacctggggttggcagggaggtgagaggcctacctttagtgtccagttcggtcagtggccccatgaggcctttcttcttgtcagccacagccgctgcccgggccccatccttctgctcctccagcaggtcctcctgggcccagcgctgggagtagtgcttccccaggggtgggatctgtggaaaagatggcacccaaccctgagtgggtaagcactggccagccatgcttcattcattcattcacttacctatcttatatctctctcaagtccctagtccaaggccaagcccagtgtcaggtgtaggtaagaaagtacaacraagataaaacctgtacttcacactctagtaagggagacaggtccaaaaagaactmagacacacacacagaagccaatctgaaataattcccaagatagaaggtgcagaatacgtacacagattgtctcaggtcacagcaattgcctctcgagagaattaggagccttcaggtcacgggtgacagggaattaccttttgtattgcttgaatttactgctgtctgtatgaactctttttcagataaatttttaagaaatcagataagtgaagtgaaagagagagatcaaagtgttgtggcagcacaaaggagagactgactaactttctgctggggaatctgaaagagtgctttggtggaggtaacatgagatcagggccttgaagggtgagtcaagtctgtcaaggagacaagagggagagaagagcttgccagaggcccagagaccagcgaggaggctgtggtgtcctggaatgagggcgagatacttggtgggactggtcaacacggcaatgaagagggatatggccgaggaaaatggagaggggcactggagctgtgccagcaaggactgggatgcgtggacttgatcctgtagataacgggaggaagrmaggcctggatgcagcgccatgtcatgagcacatctgatcatgacagctcacctatgggaggattctccctcaacatttttctgtattttctaaattttctttaatggagcatgttttatttattttcatcattaaaacatagttttatatcttcttttttttttgagacagartcttgctctgtcacccaggctggagtgcagtggcrcaatctcagctcactgcaagctccgcctcccgggttcacgccattytcctgccktagcctcccgagcagctgggactacaggcgcccgccaccacgcccggctaattttttctatttttagtagagacggggtttcaccgtgttagccaggatggtctcaatctcctgaccttgtgatctgcccgcctcggcctcccaaagggctgggattacaggcttgagccacygcacccggcttttttttttttaatggatggaatctccttctgtcacccaggctggaatacagtggcacgatcttggctcattgcaaccgatgcctccccagttcaggtgattttcctggctcagcctcccgagtagccaggattacaggtgcatgccmccgtgccaggctaatttttgtatttttagtagagacggcgtttcaccatgttggtcaggctggtcttgaactcctgacctcagatgatctgcctgccacagcctcccaaagtgttgggattacaggcrtgaggtgacttttatatcttttttttttttttggagacggagtcttgctctgttgcccaggctggagtgcagtggcgtgatctcggctcactgcaacttccacctcccgggtccaagagatcctcctgactcagcctcccgagtagctgggactacaggcgcacaccgccatgcctggctaattttttgtattttggtagagatggggtttcaccatgttgcccaggctggtctcaaattcctgagctcaagcaatctgcccgccccggcctcccaaagtgctaggattgcaggcataagccactgctcccagcccaagttttatatcttaaagaaagaagaaaggttcctccagaggcctcgaaacaggaagagagttaagaggctgtttggatagaagttgatgaaggcttggaccaaagcagaggggatggggataaaggaacatgggcagacttcacttaagtagatgcttgagggcgtgttgacatttggctggggtagaggggaggcagtgcacggagaaagctgagtttgggcctaggtgtctggaggcactgatggagcagacagcagactgggcagggttggggaaggaagatgatgcrtggctttggtagctttacttctcaggcacctctgaactctcttgttccgcatcatgtctatcarggcccagagtttctaccttgtaatgctcagcctcatcttctgggggcttcagtaactcctcaagtgtgcggacctcctcgctggtgatgtcagcacagtagggctccactgaagcccagaacctgcagggagaagcagatcctgagtgggcgcccctgccccaccagtgcctccaccaccagaaccttgaggcccccttctatgttctctagcccagaacctgttgggggcatcatttttggggatccgtggcacgtcgatagggtcatcagtgaattcatattcctggatcttgggctgaaggtttttggatttgggccgtcctgggccayggcccggcccatgtcctgccttcccttccagtttctgcttcttgggcttcccatgtttggggggagctccaagttcatggtctcgacccagcttcaggaatcgtctgtcacctttcttatcctgccagtcggtgaggatctgaaatttacagaaagtgtcactgagggggasaagggaaaacacagaatatctctttcctctagtgaataaattaggatctagaatctacagaggctcctgggtctttccccatcctctttttacctagtaaactcttactcatccttcaaaattcagctcattttctgtgcctggcctcctagaactttattcatatacttctcataatctcattcacttgttcatctatactgattcacttctgtatcacccatgccagtcacatactgtttaacagaagagtcctctcagcaaaccttcacttcgatgtcaccactackgagatgccttctctcaatcagttacccaggttcttagatgctaaaatacaacttgagtcatagccttcctcaaggagggtccatggattcccagggacaagttaattccattcatccttttaggtccagttggcacctccttcctccacaagtctctggcacttcacagctccaacgtgcacccaatcgtgttgtttggtcacactggaatgaccatcacaccttgtctcttcaactagaccataagctactgaggaccagaaagcccaccttaaccatctctattttgcagaatacagcatagcgcctggcacacaaggctcaaggcatctttatgcagtgaataaagtcatcagagtagcaaataaataacatctgaagtacttacttagtgtctggcattgggctgagtttttgcaaaaaattctcttttaatcctcacaaaagcactaaggtaggtcctattattcaccccactttgcagatagggaaactgacactcagagatatgaggcaactttctcaaagtcacatagctaggaaacagcaatgctagcaagcgcttatgccaggattcaaatccaggtttccccattccagttccctaggactgctaaccacaacatcacatcacctggtatgtacttgactttctcactttcctagttgccaagctccctgacagccataactgtcctaattacctttctctaatgactagcataggacccagaacacaatgggggatgagtggggtgccaataaaagcttactgaattagaaatcttgcaatttaagaggatcatgcatattcttgtgtattttttgtgtcatgcaaacccagtttgcgtctctctccctctccccacaaacccctgtaccccaagtctcagcatatggggctaactcaatgacccatcccataacttgttgcagtccatctctggtgctggcccctctctggggttatcacctgggtttcggcctcaagcacacgcaggcgccggctggcagaagacagcagggtctccagctccagctgcagggtgtccagctcctcgatgccgatgccatcatcctcagagcgtgccagcactgccgtgtagcggggacagaccttcaggtgatccacagacttgaagtcgtggaactgcaaggggcagtctttcaactcactcatggcccaggatatggggatcctgtggagctggagaggacagggccattgatgggagacaaagtggtctgagaaaagcccaagggcttcttacctccagggacagcctcaaggaagcccagcttcagtcccttactgacaaaattgatggcacagttcctactcacagggcacttaactgggtaccaagctaggtgcagagcactttatcagtttatctcactgaatttctcactcagcaccatgaacaaggaccattgtgatctcgtttttacagagaaagaaactgagactctgtaagggtgggtatgtgcctatgcttccaagatgcaatttgaaccccgctagtcttgagtctgcaccctgatcaccabgctatactgctatgccttgcctcgcctttctgatgctctttccttcccttctatttctcttgggttctgctaagactttgagttccaagcaccccattcttaccatgttctctgggactcttggcctcttttcttaccctattccacctttctcccttctctagtcactaacagtggtttagaacgtgggctggtaagccagacagacctgggttcaagcccaggctttaccattctctacttatatgcccctgaacatgttatttgacctttttcagtctcagtttttccatctgtaaaatggggacaaaagwmgtctcggtctgtttccccattaaaagtctgaatctgaaaaatggggataacaatagtacctacctccctgggatgttctgaggattaagagatgatgcccgtcaagagcccagttcagtgtctggcacagaagtgggactgtttaatggytggccccgcccgggggtcgcccaaatgtcccgccttcagagtcctcgttctctagggacaccctagtgcgacccccgccccctctacctcctcgctgcggcctcctacggccccaggggccgcgggagggggcggggagttccggtcgatgtgagcaaccgccccggaactggctatgggcgggccccttgcagttgacgcgggggcggggagtcagcgagggcgagcctactggagtttgccgggggtgggaagaaggtgggcctcgagcaaagccgctagaggtggggtgcgggtggtcggmctcaggcgagccccggggcacagcccggggcgggaggcggagcttggcggccgagatctccscgctgcagttagccccgccgagcgccaggagctgcgggtaggaggggcgagagaaaggatgggggtacagaaccggaagaaacgaagggctcgtccgcttcggcttgtcctaatttggtgcccaatctgaagctgggctgtaccattgcatacctgggggaggctgtggcaaaggtgacaagaagrccgaaggcacaaagggaagctrcacccattcctggaggagcttaaatagtgactcgagtgcaagaatttaaaaataccgagacagccctaggtggaaaacttccggaaggcccaagcgttcgtaagggctctctaccccgctcggagcatagatggtaccgtccggaagtccgggcggagaccgtagctgcgcttctcgcgaaagggcaggcatcgcggggctggccacttccrtacttccgctttccggcccagccagcgcccgcgatggtgagagagccgggcccccggccagggacccccggctgttcggcctcagggcagtgggtcggtgggagatgtggctttgccgcaggggcgcggggcygagggatgtccgggggttgtggggacacgatgagggtgggaaaaagagacggggcgggggcccgaggtgaggaaggggcgagtgggggtactccctggtatgaagtgggccttgtggcttcacggtcagccttcgaagcaggtaggggcttttcctgagccctgtaggaacccggaagtggggtctcctaggctctttggagcatttcgagggtacgtagtcggcctcttagcckctgaggcatgaagcaagtccacctgcctatccacagtggaacttcacgacatacgccctttgtcctcttctgccttcctgaccctacagttgcttaaggcaggcggccacacttccttatcccattcttggtacctccagccctgcttccaccccattggaggatctctcgtgttgcttccattcaggcccttcctggtcagaactgaactgtgtcagccttagtgtatgttagctgtgatactgctcatccctcccttcctggaagtcctccctttttcatacatgtgggcctttttcatacrtgtgggcctttttcatacrtgtgggcattcctgggagttgtgactttggatgaccatctccctcttcgtcacaccttccctggtgataccgatctagtctcctggcttcgataactttcttcattctgatgactcctaatctggcttctcagctctctttcaaggtttgcctggatatcttgaagagaccttgaaattagacctctagttcaaaactcatattctattctaaatttgttcttcctcctgggttccctatcctggcaaacttttgtgacctcatgtctctgctaaaaatctgtattttttttttctagtggggcacatgcctcttgatttttaaaagttcaagtttattgaggtattacatgagactacatctgttttattcatgaaaggacaggcgtcacggagccagtcaccctttttaggtttactttctataactgttgacaraggccaggcgtggtggctcacgcttgtaatcccagcactttgggaggcagaggcgggcggatcacgacgtcaggagatcgagaccatcctggctaacacggtgaaacctcttctctrctaaaaatgcaaaaaattagcygggcgtggtggtgggcacctgtagtcccagctactcaggaggctgaggcaggagaatggcgtgaacccagaaagcagagcttgcagtgagtcgagatcgtgccactgcacaccagactgggcaacagagtaagactccgtctcaaaaaaaaaagcgttgcaaaaayttgctgggtatggtggcatgcgcctgtagtaccatccgctcaggacactgaggcaggaggatcacttgagcccagaagttcgaggccgtagtacactgtgatcactsctgtgaatagccactgcacttcagcctggacaatatagcaagatcccgtgtcttaaaaaaaaaaagtcaagttrtgtaaccactactgcaaccaaaatacagaacatttccgtcaccccaaaaagttccctcaagcccttttgtaatcagtcctctccttcccaccccagacaactactgatttttcccccctgtagttttgcctttttcagattgtcatgtaaatggaattctttagtatgcaggcttttaagtgtggcttcttaccataatacatttgagagtcaaccatgttgtgtgtatcaatagttactctttttttattaccaagtagtagttaattgaatggctggaccacagttcgttggaagtggtttttctttttctttttttttaagacacagtctcgctctgtcacccaggctggagcacagtggcgtgatctcggctcactgcaacctcagtctcctgggttcaagcaattctactgcctcagcctctcaagtagctgagattacaggcacccgccacagctaattttttgtatttttagtagagacggggttttgccatgttggccaggctggtcttgaactcctgacctgaggtggtccacccacctcggcctcccaaagtgccgggattacaggcgtgagcccctgggaagttttttttcagttccattatccactccatctaatgtcagtccaacgcttgtgatactctttgcttgtgatacagtctgctgtatgtctcacttccctctycaaatcattctccacagagccatcatgcagctgcagtcatgaacttcctcctcagaaagccccagtagttccttacccccttaagagaaaagctaaacttggtagcctggcattcaagattccccatgatcttacctcagcctaccgctgcagcctcatttagtgaatctaaaatgcttctcatatacagaaacattgtactcattactactctggaactcttgctgtccttttgtgttactctaatcttaattatttctttcgcttatttattctacaggaaatgagtgagacactgtatatgttaggtactgagctaggttggaggctatatagctgtgaataaaatagatatggtctgttgaccatgaggtttacagcctagtaaaggagaaatcacttacaaaggcatgaaggagggcaggtgcagtggttcatgtctgtaatcccagcactttaggaggccgagatgggcgggtcacttgaggtcaggagtttgagaccagcctggccaacatggcgaaaccccatctctactaaaaatacaaaaattaaccaggcacggtggtgcacacttgtcatctcagctattcgcatggctgaggcaggtgaatcacttgaacccgggaggtggaggttgcagtgagccaagattgcaccactgcgctccagcctggacaacagagtaagactctgtctcaaaaaaaaataaaaaaggccaggcacgttggctcacgcctgtaatcccaacactttgagaggccgaggtgggcggattgcctgaggtcaggatttcaagacaagcctgaccaacacggtgaaactccgtctctactaaaaatacaaaaattagccaggcatggtgatgtgcgcctgtaatcccagctactcgggaggctgaagcaggagaatcgctttaacccaggaggcggcgattgccgtgagcagagatcgtgccactgcactccagcgagggtgacagaagcgagactccctctcaaaaataaatattaagaagacatgaaagacatttttttgtcaattgtaataaatactttatagggggatgtcaaggtctctctcaagaggccttccttaattaagctgagatctggaggatgacttaggcaaagaaagaggagaaaagcctacagatagatggtcaagcatgtgtaaagctctgaggtgggaaagaatttggctgatacaaggactgaccagtgcagctagaagctaatccctctcctaagaatgtccttattctggcagggtgtggtggctcacgcctgtaaacccagcactttgggaggccaaggcgggcagattacaaggtcaggagattgagaccatcctggctaacaccgtgaaaccctgtctctactaaaaatacaaaaagttagccgggtgtggtggygggcgcctgtagtcccagctacttgggaggctgaggcaggagaagggcatgaacccgggaggtggagcttgcagtgagccgagatcgtgccaccgcgctccagcctgggcaacagagcgagactctgtctcaaaaaaaaaaaaaaaaaaagaatgtccttattctcctttttctcctcctaatcccatttcaccttcaaaaccagtttcttctgcaaatatagattacttgtaaatctaaatatttcacatgtcatctttatatcatagttattttctgtatatttgctatccagttgagctgtttgagggtagagacagtgttaatcatctttgaattcccagttagctcagtgcgtggcaaacagtacacctatacatttgttggcctaatagattgacgacaatcatgcattcactggtgtgtctctagatcactttctcaaccttagcactattgatatttgagtctcgataattctttgtagtgcattgtagtatgtttagtggatatctgtccactgaatgcctgcagttccccttcttgccaagtcatgacaattgaaaatgtctcagcattcctctggtctgaccccaggttaaaaaagaaagaaaggaaatgtctcgacattaccaaatgtaccctggcaggcaaaattgtctcctgttgaaaactaccactctacaccytggaaggcgtctcgaaggcctagtctgttctgttcacagtagtgtcttaagagccttgcaccctcagtgctacctgkcttcatgggagctggaataggggatcggtgggtttggcgtgacagattytgatcttccctttcctctgtgttatttcctatagactgccactctccgcccctacctgagtgccgtgcgggccacattgcaggctgccctctgcctggagaacttctcctcccaggttgtggaacgacacaacaagccggaagtggaagtcaggtagggaaggacaagtcaaggtggggatgaggggtgcagcacacagagatggctgctgtctagaaggtgccatgaacttatgtcctgcagtagtcaggaaagctgcagttgacattttgtcttgctgccarctgaatggtgattcccaatttggagttaagaaaatagggtcagtgggttggcaggacagaacccaggggaaaagacaagattggttaacacaaggtatgacttctcagagcagggctgttgatgaagtctctcctgtggcattgttgaaaacactggtagtttaaggaatggtcagataattgttatctgagattccatctccatacttttcttttttttttttttttttcccatctccatacttttctaatgtaatgatcagggattttttttttacctaccagcctagacactctgaccccctaatccaaatacttcatattttgaatgattttctcttatctagtttccatttcataaatatctttttcccctttaaaatttaatctggaggcctggtgcagtggttcacccctgtaatccgagcactttaggaggctgaagtgggtagatcgcttgagtacaggagttcaagaccagcctgggcaacatggcaagactccatctctaccaaaaaaatatgcaaaaatagtcaggcatggtggcacatgcctgtagtcccacttctctggaggctgaggcaggaggatctcttgagcctgggaagcagaggttgcaatgagccaacattgcgacagtgcactccagcctgggtgagaccctgtctcaaaaaataagtaaataggccgggcacagtggctcacgcctgtaatcccagcactttgggaggccgaggcagacagattatgaggtcaagagatcgagagcatcctggccaacatggtgaaaccttgtctctactaaaaatacaaaaataagctgggcatggtggtatgcacctgtagtcccagctactcgggaggctgaggcaggagaattgcttgaacctgggaggcggaggttgyagtgagccaagatcgtgccaccgcactccagcctggcagcagagcaagacttcgtctcaaaaataaaataaaataaaataaaataaaataaaattcattctggtacatacataactgagataatctgggttacaacattaaatgatacgatttaatttttaattttaaaaataactgataaagatgttaggatatgccctgttatactgtgtaacgtacacgatttccagtgggcctttgaaaatggttagcagtttagagacaccacaccacaattaattactattagagatctctaggtattcagaggcattactttgtaacctgaactcataggggtctcagaggcaaatgaatcatttctggattgataattaaaggaagccaaactgtgttcaattttagcctttccttacctctaagacaggtgttctctctgtattcctaaatggtatattggtttgcctgtacaggttgagtatctyttatccaaaatgcttgggaccaaaagtatttcagattgtggaatatttgcagatacttaaccagttgagcatccctaattccaaatccaaaatgctccaatgaggatctcctttgagcatcttgtcagcactcggaaactttcaggtttttttttttttttgagatggagtttgattctgtcacccaggctggagtacagtggtatgatcttggctcactgcaactgccacctcctgmgttcgagcaattctcgtgcttcagcctcctgagtatctgggattataggagtgcgccaccatgcccagctaatttttatatttttagtacaaatgggatatcaccatgttggccaggctggtctcgaaytcctgacctcaggtgmtccaccagcctcagcctctcaaagtgctgggattacaggcatgagccactgtgcccagccagtttcagattttggatttcagatttgcagattggggatgttcaacttgtagttactaaaatagctatcttttgtaaagctcctactatgtgccaggcacgctattagacatttgaccctttttgatctctctcagtcctcgccagtgaattaggaatcagagtcattttacagatgagaaaattgagattccaacagggtaacttgcccaaggaaagtaacagaggaggctggatttcaaaaccttttcgccctgacttcagagcctgtgctctttctgctgaagaacacactcactggcccccatcttggagcactcctgcttgtgagtcttctattccttggactctatggtctcatagtgattccaggacctgcgtggggtcactctgactattctatccctctgtagtacaagtactctgtcacattatgttttcaggagtagcaaagagctcctgttacaacctgtgaccatcagcaggaatgagaaggaaaaggttctgattgagggctccatcaactctgtccgggtcagcattgctgtgaaacaggtaagttcrccatggaggaggcccaacgtaaggcctctttcagtcctttcagcctctttcagtccggggtccccatctgagagatcagtgtgccagattccagattcagagtgcaggaaacctagcctctgcttcctttttttttgacacggattctcactcttgtcgcccaggstggagtgcagcagcatgatctcagctcactgcaacctctgcctcccgggttcaagcagttcttctgtctcagtctcccaagtagctgggattacaggcatccgccaccacgcccagttaatttttgtatttttagtagagacagagtttcaccatgtttgccaggatggtctccatctcctgaccgcaggtgatgggcccgcctcaacctcccaaagtactgggattacagtcatgagccaccatgcctggccagtagagggcaactctaaactttcaacaggatgaaaacgaagcactgttattaaatgcagactacacactgttttctacagaaacttataaacctggggcctgctttccttgctaaaatgggaggttaacaagtgttgagaggtgttaagggcatgctagcaaccagcagcaataatcttcctttagaaatgttgagagttcagggccaggcacagtggctcatgcctgtaatcccagyactttgggagaccaaggcgggtggatcacttgatgtcaggagttcaagaccagcctggccaacatggtaaaaccctgtctctactaaaaatwcaraaattagccaggcgtggtggcacgcgcctgtaatcccagctacttgggaggctgaggcaggagaatcgcttgaacccgggaggcagagcttacagtgagtcaaaatcgtaccactgcactccagcctgggtgacagagcgagattccatctcagaaaaaaaaaaaaaaaaaaaaaaaaagaaatgttgagcattcagaagggagaaacttcagggattgttggatgttcagtgttattaaagcagagaccacctaaggttatctctgatagcccaggtgatgctgcaaaacaccctgggaaatgtgacactagtgaaatgagaatggaaagggcagcttggagtacagctgtagactctgaaagaagcaatagaagcctgtcagaattacctctctggaatgggtcgtcattaagagatgccccaaggtagacccttgtttcagttgacagccaggtcccccacttcagtgatccttccgagtaccaaacctcactgtctcctgggagccttgaaaaaactggagtcagaagaccaggctacaaggtgtttttggccttgggtgtcagctttagagaaacatttctctcttgcactccccaggctgatgagatcgagaagattttgtgccacaagttcatgcgcttcatgatgatgcgagcagagaacttctttatccttcgaaggaagcctgtggaggtgagaccctgtgacccatgagtttgcgatacccaggaccctgttacagaatggcctgggattgtttctagaaccagctactccagctgtttggcacccactgcctgaattgagagttggccttcatcttggagtgggagcaaagaggattagaagcttaggaaaagttgggtctacctcagccatagaaaaggcaaaaaagagccgggcgtggtggctcatgcctctaatcccaacactttgggaggccgaggtgggtggatcatgaggtcaggagttcaagaccagcctggccaacatggtgaaaccccatctctattaaaaatacaaaaattagctgggcatggtggtgggcgcctgtaatcctagctactcaggaggctgaggcagagaactggttgaacctgggaggcrgaggttgtagtgagccaagatcgtgccactgtactgcagcctgggcgacagagcaagactccgtctcaaaaaaaaaaaaaaaaaaaaaaaaggcaaaaaagataagacacattgcttattcccggagcctatagtctagcatcagaaagagcacagtgaattagaaatcctttctaagatctgccaaatgaatcatagtctctctctctttttttttttytttgagayggagtctcrctctgtcgcccaggctggagtgcagtggcacaatcttggctcactgcaagctccgcctcccgggttcacrccattctcctgcctcagcctcctgagtagctgggactacaggcgcccaccaccacacctggctaattttttgtatttttagtagagacggggtttcaccatgttagccaggatggtctcgatctcctgacctcgtgatctgcctgcctcggcctcccaaagtgctgggattacaggcttgagccaccgcgcctggcctttttttttytttttttgagatggagttttgcttttgttgcccaggctggagtgcagtggcgcagtctcactgactgcaaccttccacctcccaggtcaagtgattctcctgcctcagcctcccgagtagctgggattataggcacgcatgtgctaccatgcccagctaattttgtatttttagtagtttcattgtgttggctaggcggtctcaaactcctgacctcaggtgatccgcctgcctcggcctcccaaagtgaatcatagtctgcaatctgggctcactgcaagctccgcctcctgggttcacgccattcttctgcctcagcctcccgagtagctgggactacaggtgcccgccaccattcccggctaattttttgtatttttagtagagacggggyttcactgtgttagccaggatggtcttgatctcctgaccttgtgatcsgcccacctcggcctcccaaagtgttgggattacaggcgtgagccaccgcgcccggcccactgaatcagtctcttaaagccacagttaacattgggtcagttgttgcctgaatttgtacttgaatcttctccacagactccttgccaggtaaacttaaaatatccccagtgactaagcaactaccacacagcagcatgtgccatcatcagacacgtcaggcgtgttagccaagttcttcctcattctgagccaaattttctctcctggtcctagatctaacctctggggccacccggaataaataaaattgatcttcctcccacagccctccagcagaaaaagacccttaatcccacccatcttccacatcatctcttctctggactaaatgttccctgttgtttgattagattattctgtaacaagacttcaagttccttgactcattctgaatgcagagctgttgtgccacagatagttttccagagatgtctgatacacacagaattctcaacggggttcagttgcttggatccaacctagacaccctcccccagagcagctgggctgctgactggaagggtatgtagcttgggagaagatcacagccagtgggaagcatgtggatgagtggaggacatgaccagctcagttcccatggggtgctaattctctcctgttccttctcttccccctccctactgtcttcttccctaggggtatgatatcagctttctgatcaccaacttccacacagagcagatgtacaaacacaagttggtggactttgtgatccacttcatggaggagattgacaaggagatcagtgagatgaagctgtcagtcaatgcccgtgcccgcattgtggctgaagagttccttaagaatgtgagtaggggcctttagctttccttccagaggccagaggatctgggggtcatgttgagaacttagcatctggtgggaaaggggtccaagcagtgtgtttatatctcctgagctctctaggacccctggggcacagcaggtcagtcaggtgctttggagctagaggaccccaagttcatctctgagagctacaaggcattttctatatttgggtgtctggggtggctcttagtctctcgtaggaacttggtcactcatttctacatctcaggatgttcacaaagtccttgcctctatctcstttaaaccccaagtgaggtaagtgaagtctgcatgtgaattttctaggagtataggacaattaatcatgttatgattccacttctcaaatagacttcagtactttccttcagcatgtttctcaggcttaaatcatgattccttcaacctgttttccatcacttgcatggcgtaagtcctccagattcctcttacgttgtttatgtctttctaattgaaagcactttagtcatctgaagaggtagaattgtttacattgatgaactggtgacatcgttcttagttgtttagatattcagaacatgccttttttttyctcctttttccaagcaatctttggtttgttgacatgtgccacccagagtggctgtgatctctagacggtagacttagtgtgtactcccaccagtaagtacatacccagtccagaaggagctcagattcctaaaaatggaaattatacccgcttcccttgggatttaattatactgagggtggccagtgtacagagtagctgtggtgggtgcacaggtcggcatggctgttcagctcactcggctatggaggcaacccacctgtgtgggaatccaggctccaccgcctactcaggcatgtcactgaactctcaactaagtctcagtttcctcagctgtgaaatgaaggtctggtaattaatacttatctttcagtggttgagcattaaatgagaccatgtgtgtaaaacgtagcacctggtacatagtaagctttccgtgtattgcaccaccaaaattttatggccaggatattaggaggcctctagattgaactggaaggggaaaatagctcttgttccaattgaatatttggctcactcactcaacaatcatttacttatttatgataattatatcgcacagaattggacccctaaaaaagtatgttcacatgtcccatttattactcaaaacagtctttgagtcagctattatcgccatgttagagattaataaactggggctttagaagtaaaagcacctgtccaaagtccctcagccagtaagaggaggaaccagaatgtggagctgggttttcggactcagaggtctaagaaagtaccatagcctttgtcaagggtcacaaattcaggtgcatccaaaggtcgggtagctatggagtgggctgagtatggagtgggcagggtgaggagctgctgagcgcatgcctcatgtgcaggggctggctcccacacagctccaggccattgaacccccaaatttggatttgtatatggcatcttccatgttttcaaggttggcaactaattcatattgttttaaacaccatgtgggccatgcagtgctcatctttgggctagtttcaggcatgggccattggttcacaacctttggtctctaaaatgtgcagggctgtcctaggcagcatgggggaccsttgagggcagaaaacatttcaagggcctggcttggttggaggttcatccagagcttgacacaaaagtaccagaacctgggtccttttccacttggccctctgagtccccaggccccttgcatgagagcccccatgcctaaagaaagcaacctcagttcaccaggcaggacgctggcagggctttctagcagcctccatgccagggcacaagggagctgtggagaagctctcatggctcttamtttttctgccttatctagtgctaggcttagggccggtgcccataggtcacttctgaaagctggmtgaattagagcatgaccacaaggtgtcctgggacccaactctgcccctcacagatatgagcacagtggcagctctcaggttcatgcacctccttagagcagtgccaccaggatgcaataataaccaccatgcactgcctcttggttctcttgacagttttaaaccatctggctggatctcgtggccttccccctcagactacccatgtctccacgaaggcgtcctggagtcactccccgagcagcgcggcggcggcagggagttgggttggggtgggcatttgatgcgggaggtgggtggtgtgcttgctagctgggcaagaaagcagcagtggacctgccccaaggccacacgtgcctggtcaggctggcttctgatgttcagtcccctgggccgggacagattttttttaacgtcttgaaacttaaactctgtgcttgtaggatactgtaacctttttgtctttttttttttttttttttttaaacctccacctccagtggctgtgactggtcccagtgattatacgttattggttgctgtgggtctgggcgggcctggagccagaaggcgacttattttttctcycctatgccaccccaggtggggagggagggaggtttcagactccagtttctcccttgcccttttattcccaagcctccttggccccagtataagtgttgggaactctctgccagcttcctgagttctgcctaaagatggccccccagcactggttggggacaagggccaaattggtgaccaccagtcatgcctaggacctggggcccaaaarccgggcaacctytggctacaggggccattgggtgccctcccagttgagaggggccgctgtttcgccttgtccgtcagtgccagtgcctgtgccaraggtggcgaggtgagtcctccagagcttyctggccgggccctcctcctgcctgttytggstcctytgctcccacgctagctgtcccttttytgattytggtggatcctccctcccctaattaaagtctctttttgcccctttggggctgcatgaggtctatgctgtgtgtgtgtgtgaaaggaggggaggtggggcttcttttccctgagaccagatggctggtaattgtgcctggagctccccactgggtgcagtctcatgattggtcctgccattattcctgccaggggtcccaacccagagactccattcattgcagtccaggcaccattaatttctgaaactgctctgtctgcctatacagagctttggtgcttttcacataaggaacttacttgggctaaaaagtaacctcagagaaacagtgctcccatttggtggataaggaaactgaggttccaaacatgagatgtaatagcttgccccaaatctagccagtgagcaagagagtagacttttgcctgtgccaaaacagtaatcaccatccacaagtggctatttaaattttaattattacaattaaataaagtttaaaatccagttccccagtcccactggcaacttaacagctaccagtgactgtaccatatataacagcatatatagacatacagcatatacaacacatacatagagattcccatcattgcagaaagttccattggatagtactagaccttagtaacaccttgaagtaaaaagacaaaagacccttgtgtttgagtcctgattcttcttgccagatttggctaagttacttctattttgtgtctcagtttcttagtctatgaagtggagataatgaatataaacaatctgatacggtcgctgctacacaggtactgactgaactatattttttccaccagcccagtggctgggctgttgaataatttccagtgttcatgatgtttatccttgccttgaggcttggaggtccaggaaaagggctgggtgtgtaaaaggttcactgaagtgtttcatatttaatattggaagtctgggggccaaggggtaaatataggagtgggtgtcagggtaagcttcaagaagggtgaacctttgagctgagctttcaaaagggattcctccagatggccagaggggtttcttctgatggggtggacaaggtgatgttaaagggaggagggggtaaagggcaacttgcaacagctatttgcccccctcctccccccccyctttttttttttcatttttgagacagggtctcgctttgttacccaggctggagtgcagtggcgcaagcatggctcactgcagcctcagcttccccaggctcaagtgattctcccacctcagcttcctgagtagctgggacmacaggcctgtgccaccacgcccagctaatttttttgtttttggtttttgtttttttttaggtctcactatgttgcctcggctgccttgggtgatccccccgcctcagcctcccaaagtgctatcatctcctttatgacattacctctgtgacctacctcgccacccctctgaattaggtgttccctcctccagggcacatggctatgttctagctttgcagtgaatgttaaaggtgctcacrgtgaaactgggtgactaataggatatagcagctggtcactcaacaaccctcacaggacagcattgcctgggtgagccagccacaaacctcatttgtcatgtatctctctcccagggtccaaattccctaaatcacctttcctggggggcatgcttttcgggaagtccagccatcagctaaaggggagttggggtcagctggacaggaaggtgggggatccaccttcactcttaagagcacatctacccagtgactgacaaagctgggctcttaccaggacactcttcgactctgcctgcgggggcactgctagagtttgcctctcaaactgtccctgtgtggtccttctgtgactggcaggcaacctgagtgataacaggtgtttaagagacaggctttggagtcagacctgggttccagtgctgcctctrctctgtgatttgaggcaaattgtttaacatcttggagccttacctcccctgtgacttttgaggataatattttgccagtgcttccaaaaaggttgcttacagtcttagcctgggggccaggcataactgttgtgaactattacatttctttcgcagttgactcaaatgattgtttttccatttccagtttctggggagggtgtgctctgcaccttcttgttacccccatatgctgccctcgctaaggaccttaccctaggcccatctgccaggcccagcaggtctgatctggcctcaccaggctccagccaccctggctgtcttgtagttcgcacagaggttcttacccttctcagggctgttgctgggactgtcccttccctgaagtgcagttcctcccctttccctggtgactcctgactcctggcatttacaccttcagcttaaatgcgccactttatctaaaatgcgcccccttcctggtttcacctctgcttgttcattgcccttattatacctgtaaactattctcttcctttgttacttgctttttattcccctcacactgggcttttagtaagctccatgaggtcaggggccatttgttagcgcctataaatactgtggaatcactcaaaccctagggccggtggcaccaggaagtactggataaggaaccgcaacactaactaactggggctcagtgctctcttccgccttcagtgccctgctcatcaagggtctgggtgaggccccaggtcataaggaagccctcgctcgactgccccggggcccatcgcagcccccaaccagccccgagcggtctgatggtgcccagggaatggtttccaaggcaatagcaaacggggcggggcttggaacggaggacaaggctcgagcctaggcaggaacttcccgggagaggaggcggcgacgcggaggggcgcgggatcaggggccctgggagggcgrgcgcggcgaggggcgcatgcagggccccgacgcgccactgctcctgagcgcgagggagctggggcccgggcgccggggctcggcctcctggtaccgccaggagggcggcgcggtgtgcaactggctgcggaagccgcagccgctcgagccacgcaccagtttcccctcggcgcgccgctccgagttccgtccacccaggaggctgccatgggccggccctgcctccgcccagtccgaggagggtcacgcaggcggcagatgccaggcgggcagccccgcccctgcgcgccgcctcagcggcgccttcaagacgctggtcccaggcacccacgcccagggcgcctcggatacccaccccctcggccccccgcacaccccggtcctcgacccctctccgcaggatggtgaggcccgtgcggcccgctcgctctggcctacagcggctgcgaggacgacaagacgctggggtggagrgactgggggtcgggagaagagcggctgagggtgggcatctggatgaaggcaggaggaagaaaagaggcgtggctatgggcggccagaaaagatcctaggccgagaccctaggcccagcctcagtgtaccccgcccctattccgcatctttctgcaggtttcccggtcctctggcgaggatcctccaaggcgtctcacatgaaccggctcagaaacgccaaaatctacgtggagagagctgtcaaggtcagaggaggggcaggggcgcttagaaagggccctgggagcggctcagcctgtctccctgcgctgttttcttatatccttaaaaaacaaaagcaaaagaaaaaacaatagcaaaaatcctcaaccaccacacccatcttcaactacctccccgtttaccccttcagcaccaaacttctgggctccctccactctggttccctgcgatgtcccactctaatcaaggtgcctggtgagttccagggagccaaacccagcagtgcctttcggtcttgatctcggttgggcaccctgtatctttcgacaccgctgccccacacacccttcctcttggctgtctgactgcacgctcctagttttcctttctcyctctttggctgctgcttttcagcggcctttaaaggttcctcagccattagtggccccctggccccttccccaggtctgtctcctttggctgtgtccttggctgagtccagtcagtgtgctgcaccctctccgtgccccttccagcccagcctcgaactccacatcccgtagatctagcccctacctgtcatctacacccagaaaacttaacaagcatttcaaattcatgtcccaaaccagactttgatcttcctgcccaaacctgtcgtcctccccagtctccagtctttcccatctctcagttcctcacgccagaaatctcatctttctgtttcttcacccacaggtctaattccatcagcaaaaccacttgtcatctccacctccaaaacgattctcaactctagcaccttctcccgtctgtgttgtaaccaccttcattttagtaattgtgatttctctcctaggcaaactatgacagcctcctagctggtctacctccatcctgtcccctcatctttttgtaatacagcagcaagccaagcttagaaagattccctcagttagccttttttgctcatgacactcttagtatgaaatccaagtccgttccaaggcctgcagggccttccacagtctggccactgcctacctcctctggggctttccccatcrttttccatgttccactcactctggtctcccttcakttccttctgacctctctccagcctcaaggcctttgcacatgcattcccctctgcctgaaccgccatttcccagctctgtacattcatggcttcctttcaaccttccctgaccatgtatttctaagtagtttctctggatcccattaagtatgcagtttctggagccaaactgccaggatgtaaatccctgctcttttgcttaaccactatggggcctcaggcaccctgcttaatttctctatgcctctgtttcatagcccgtaaaatggagataacagtatctaataaaaatgcatagtattggccagacgcggtggcttacacctgtaatcccagcattttgggaggccaagtcaggaggatcacttgaggccaggagttggagaccagcctggccaacacagtgaagcccagtctctaccaaaaaatataaaaattatttgggcaccagatgaggtggctgacgcctgtaatttcagcactttgggaggccaaggcgggccttggcctgaggccaggagttcaagaccagcgtggccaatatggtgaaaccctgtctctactaaaaatacaaaaattagccgggcgcagtggcacacgcctgtactcccagctactggggaggctgaggcaggagaatcgctcgaacccgggaggtggaggttgcagtgagccaagattgtgccactccagcctgggcaacagagcaagactccgtctcaaaaaaaaaaaattatctgggcgtggtggcatacacctgtaatcccaggtactcaaggagactgaggcaagagaatcgcttgaacccaggaggaagagggtgcagtgagccgagattgtgccactacacttcagcctgggcaacagagtgagaccctgtctcaaacaaaacaaaataaaaacacacagtattgttagtaatgcatgtaagtgctcagcatgtagtaggtcctcaataaatattagccattgctattrtcattattaccatgcatatttatttctctacttatttatagtctgtttatttctcctaatggaatataaaaatttcctgatggcagagtccataactgtctggttcacctttatatcccctatgtctggcacttatgcaatacttattgaagaagtatccttctctcacattgcagcagaagaagatctttacaatccaaggctgctacccggtgatccggtgtctcttgcgccggaggggctgggtggagaagaagatggtccatcgctcaggccccaccctgctgccaccccagaaggatctggatagctcagcgatgggtgacagtgacaccactgaggatggtgagtggttccttccctttccacagctgttgctcctgagtccttttcctttggttcccactgtcccagmgttgaggccttatgggctatgggtcagggagaggaaactcatcagctmtgggctctgcatccacagaggatgaagatgaggacgaggagttccagccatcacagctgttcgacttcgatgatttactgaaatttgatgacctagatggaacacatgctctgatggtgagggccctgggggccaagatgatacagggactgcctgcttagagggagggcattggtgtccagctgggtgacctcagacaagtcctttctttctctgggccacagtttccctatctgtagtaaaaactgcttctttaaaggctggatagagctggacatggtggctcatgcctgtggtcccagctactcaggaggccraggtgggaggataacttgaggctaggagttcaagaccagcctgggcaacatagtaagactcagtctctacaaaaaaaggtagaaaaacattatccgggtgtggtggcatgtayctgtagtcccrgctactcgggaggctaaggtgggaggatcacttgaacctgggaattacaggctgcagtgagctatgatcgcaccattgcactccaacctgggcagcaaagcaagactctatctctraaaaagaaataagtgaataaaggctagataggcccacagagtggggagggacacagcagggctgtgtcccatctggcctgggattcagagctctgctaggtcataccagatgccagcacagccgccatgcatggtaactcccccttcaaataaaaaccccatagttccccttccccgctgcccttggtaagtgaaggcaggaaggaaggtcttaaaaagctctggaagagacggagcggggtggcttatacctgtaatcccagcactttttgggaggccgaggcgggcagattccttgaggtcaggagttcgagaccagcctggccaacgtggtgaaaacccatctctactaaaaaaacaaacaaataaaaaaacaaacaaataacaacaacaacaaaaagtagctgactgtggtggcaggcgcctgtaatccyagctactcgggaagctgaggcaggagaatcacttgaacccaggaggtggaagttgcagtgaactgagatcacgccactgcaccccagcctgggtgacagagcgagactccgtctgaaaaaataaataaataaaataaaataaaggccaggagcagtggctcacacctgtaatcccagcactttgggaggccgaggctgatggatcacctgaggtcaggagttcaagaccaaccgggccaacatggtgaaaccctgtctctactaaaaaaatagaaaaattagctgggtgtagtggtgtatgcctgtaatcacagctacttgggaggctgaggcaggagaattgcttgaatctgggtagcaaaggttgcagtgagctgagatcgcgccactgcactccagcctgggygacagagtgagactctgtctcaaaaataaaataaaaatacaaaaattagccaggcatggtggcgggcgcctgtaatcccagctactcgggaggctgaggtgtgagaattgcttgaacgtgggaggtggaggttgtagtgagctgaaattgcgccactgcacttcagcctgggtgacagaacaagcgataactccatctgaaaataaagaaaaaaggttgaaagagtcggtgtgatgatgtggaggacatgcacgttgaggtgagggcccttgggtttccatcttggtagtgccacttactgagktcaaatatataaaattgccatttctggccgggcatggtgggtcatgcctgtaatcgcagcactttgggaggccaaggcgggtggattatttgaggtcaggagttcgagaccagcctggggaacatggtgaaaccccgcctctactaaaaatacaaaaaaattagctgggcctggtggcgcacacctgtaatcccagctactagggaggctgaggcagaagaatcaayttgaacccaggagacggagcttgcagtgagccaagatcacgccactgcacyccagcctgggcgacaagagtcagactccatctcaaaaaaaaaaaaaagccatttctgtatgtcaggaatggctgaatattggcagcttcatatgggtcaatctcatgagcccttgggcaagtcacttgccttcctgtgcctcagtttcctcatctgtaaaacagagataaccttagcccctaccacatagaattatggtgaatgaattgacgtggaaagtgcttagagcagggcccagcatgggctgacgctggttattaataattaccccacctcccagagttgtaggaaggagggagagaggtggggtccatgagagagcctgtgtcacaggctgtgtgcccatcagcttggagtcactgtcctgcccctgggcaagtcactgatgaccatgggccagaacaaagtgtgacattcagttgtgcagctttgtcactccttggggacacccttaggggccctgccccctcagcagctawctccataggtgggtctatgtctcagtctttggaatttgccatggtttgatgaggctaatgccaactccttctcacgctgccaccgcctgggggctgacaagcctcataggacaccttaagcagtgacaaagggaggcagaagrgagtctttggcctccctaaggccaaaaggaggctgaaaggctggcttgctctctgcccacctgtgccctggaggaagagaaatcttcttgacttacacaaagatgatgtgtgggctagaggccaccttggaagcatcctctccttcctgttcacccaccctgctcagcagggcagggagaggctgccttaggccctgctacccacactggcctctgtgtttctgtctcctcctgtctccccagtcccgcatggtccagaatgagatcccctacttcatctggaccactcggcgggatgtgctcgactgtcgcttcctctccaaggatcagatgataaaccactacgcccgggctggctcctttaccacaaaggtgggctccctagaggagcaggcagggcagcttccgaccccctgcccttgggctggcagctctcctccctgctcaccttgttagtaagaggaagttctcaggacaaggggaagtatacaattcagaaaatttggagtctgaccagtatctggcaagttcaaatccagcccctgcaccgtatccggcatttgtaratatgatgtctaaaatgggtctggaggtagaacaatcaccaaatccaatgatagtgagcaaacggactcttacctcctaagcagaagatatytggctaatggacccattctgtcttaccwgggtttytttttttttttgagacagagtcttgctctgtctcccaggctggagtgcagtggtgcaatctcagcccactgcaacctctgcctcccagttcaagcaattctcctgcctcagcctcctgagtagctgggactacaggtgcgtgtcaccacacctggctgatttttgtattttttagtagagatggggtttcaccatgttggtgacctcaggtgatccacctgcttcagcttcccaaagtgctgggatttcgggcacgagccatcatgygcagccttacctggtgttcttagcaagtgacttcacctctctgagcctcaatttccycatctttcaatgagaataccagtaaggcccatcttctggggttgtggcaaggatgaagggctttataataatgacctgccattatattattggtgtgggttaggaaggattctagaggaagcagctctttttttatttttaagagatgaggtcttgctatgctgcctaggctggtcttgaactcctggcctctggcctcaagcagtcctcccacttcagcctcccagagtgctgggattataggtgtgagccaccgcgctcggccttggcagctctttaagaatgagaaagggtgggccgggcacagtggctcacgcctgtaatcccrgcactttgggaggccgaggcaggcagatcaccaggtcaggagatcgagaccatcctggctaacacggtgaaatgccgtctctattaaaaatacaacaaattagctggatgtggtgtcgggcgcctgtagtcccagctactctggaggccgaggcaggagaatggtgtgaacccgggaggcagagcttacagtgagccgagatcgcgccactgcactccagcctgggtgacagagtgagactccatctcaaaaaaaaaaagaatgtgaaaggggggacaggagggacatcaggcattcttggcaaaggacacctcccaggcaaatatatggtgatagatrtgagcaactcagaccttgcaagcggggccaaggctctgagcgcagatccagtcagagtctttctgaactgtctgggtgtgtggtgagtgtgggcagtcctgccctgccctctcagtggctaactccgtaggtgggtctatgtctcaatctccggaatttgccgtggtttgatgaggttgatgccaactccttcttcccacgctgctactgcctgggggctgaggatgacaaaaaagccttcataggtaaggagacccscagycctatgcctgaacctcaggctgacagagcagggctgaagctctggctcatattggagagaaacaggcctctcttcatgccctcatctgcctgccccagcagatttccctttccaccctcaatccttatccttccctaatgtgccctcccttaataagcctcttagcttggtcaactctgacctccagaaaagcttgggtagcttggcttatattctagagcaggttctaaaagttggtcagtcccttgagtttggaatccagaacagattccaggcttatatcaagttccatttgttgaattgggttccaaaaaagkctgcaggctttggatttctaaggcagactaggttccgattccacaatatgttctaaattcaggttagaatttggatccagattctatgctasatttaaattacattcagaatctgaactaggacacagtctggttctcaggacagaataagtatcaaaagtaggtgatgaacagaagaaacaaatcagacaatgggtccaagccagattctgaaggcagaatatgatccaagtcaggtcagatttggggtctggttacacaactgaaacaggagcaagttcttttttttttttgagayggagtctcgctctgtcacccaggctggrgtgcagtggcrcgatcttggctcactgcaasctccgcctcccaggttcccgccattctcctgcctcagcctcccgagtagctgggactacaggcgcccgccatcacgcctggctaattttttgtatttttagtagagacggggtttcactgtgttagccaggatggtctcgatctcctgacctcatgatccatccacctcagcctcccaaagtgctgggattacaggcgtcagccaccgtgaccagcctgaaacaggagcaagttctaaactcaggctctagagtcagaaaaggtagagtcaggttctggatccaaaatggggcaagtcatgatcaggttctggaaccagaacaggcctcaagcctaggggctgagcagggtatcccctggcctgggagcagaggacttctggctgactgctgcccgcaacgttctcaagctggtggtgaagtctgagtggaagtcataccctattcaggcagtagaggaaraggcctcaggtaagtactgtggttacckccactctcccacccatttatcctccacccatccgcccttccacctatctgcccttctacctatctattcatccacgcacctactggttcatccacacatctgtgtatgattcacatctacccatctatccatccatccaccagccatccatccactcatccacccacgtattcacccactctctgatctaccgattcacccacccacccttccactcatccttccatcctcccacctgtcacccattgttaatctcktcattcatctacctgatgtcagctccatactccccatccatctatccactccctgcctacctatccttccacagatccacctacccatctatctacctgctattccattctcccatctactacctatctgttcttcaggccatccactcatccattcttctgtcccaggtacytagacacttgtcttcccatccgtttgttagttgatccactcctcattcagccctcccatgggcctggcatgtagccgagcaccctggagagggcagactaagaagacatggtccgtccctgcctgtgaggagttcaggtctctgaggaggaggaagcagtgaaactgggctttacacatggcctgagaacagcttaggcctgaacataaggaacagcttggagtggaggggacacagaggaaccctcactatcatgcatgccaacccaaccactgcctgccctttcccttctggatttagctcgtgtctccaggctcctagtcctgtaatccagggacccatcagcgagggattcagggaagcagaggcagctctccaggaaggaggaaaatccctgcctcttccagagagactcccccattgctgtctcttgtgtgtgtcatgcacaaggaaggcttggttgtgtgccaggataaggggcacaagggcctcgggtgtggccagagaccccatgcttaagcttttatggtataggtcaggctgcaggggtttgagggcctcagttgtatatcagaatcttcagagcactgcgatgttcaggggtgagtcaggtctgtagatgtgcacggggtcttctgaagggtcagtttctgtaatcactttcaggtgtgtcagggccttgtgcagtaacagtgcacacagaagttagtgtttctgtgggctaagggttgtagctctgtatcaggattctgggagtgggtctggatttctggtgtgtggacttaagaagctgtgtcagacttgggggaggggcgttcatgtataactgggttcacataggccaagactcccaggtgcattttaggcagagcctcaggtgtgttagaggtcccaggggcagagaggctataggtgctgtcagaggccttggggacatttagggcagagcctcgagtgacaggtcctgggacagtgggagccaagggcaagtgctagagttgcagtgaatttagagcaaagcctcagctaagtgacacatcccagggcagtaggggatctatctaggttcgtgctgggcctcaggtaagtgacaggccttaggacaatgggggctgtggcatgcgtcaggttacctgccttgatatgggatcgtgacaggcccctccctatgtgcaggagacaagcagcccaagaaacaggagaaaaacccagtgttggtgtccccagagtttgtggatsaagctctgtgtgcgtgcgaggagtaccttagcaacttggcccacatggacatcracaaggacctggaggccccgctgtacctcacccccgagggctggtccctcttcctccagcgctactaccaagtggtccagtgagtcccctgcagctgggactttgggctgtgggcaggtgcttagggatagaccctttctgtctcgtgcagcccctaccycttccccaagcctcccgctcgtttaccccgctgttctgctcaggaaccctcgaggactcccactgcctccgtgatagggtctgggccacttttcttggttcttggcatagcatagtcactaagagcatggactgtgccaccaaatggacagcacattacccaaagtgtgtgttgtgtggatgttaattctacaggaagtaaatagattttatgaaaaaagggcttttgtggtccatcacatttggaaaacactggattaagcagttaaagaggcttccctggggcagtactcttcagaacctgtgggtggtgtaagcctatagagagagtgcgctgcttatcctgtacttaagtgagcccagtgccctgcctcccaccaagcatcctgaggggcagtgttttctgaacacactttggaagaaggttcttaggtggggaaagggaggatcaaggtgagcctggtgctgctttagggagattccattcgggagaagcatgcaggagcaactggagggagaacagccctgaaggcagaacacacagtaagcatttcttgagcaactccgatgtgccaagcattgtgccaggttcygaaatgaagcgtagcccctgttctcaactgggacacagctcaaggtttgagacctgcaggaagccaggtgggagtgctaggaatctcagctggggtggtggtaatgggaagaaatggatagatttaattactcartaggggaaaccgaagaactaatgaatgacatgagcagcagatccacatcattagcacgtaattcactgcatcttttctaaatgccaggacataactcaggtggcccggtactttctctttagctactggaaaatgtaaagctgcccattttaaattaagaattatcaaggtggccaagcgtggtggctcacgcctgtaatcccagcactttgggaggctgaggcgggcagatcacttgaggtcaggagttcaagaccagcctggccaatatggcgaaaccccatctctactaaaaatatgaaaattagctgggcatggtggcgcacgcctataatcccagctgctcaggaggctgagacaggagaatcgcttgaacctgggagtcggagcttgcagtgagccgagatcgcgccactgtactccagcctgggtgacagaatgagactccgtctcaaaaaaaaaaaaaaaaagaattttcaagacttagaacattagtcatgaagcacgagtccctttttttttttttttttttttgagacagaatcttgttctgttgcccaggctggagtgcagtgacgtgatctcggctcactgcaacctccacctcctgggttcatgcgattctcctgcctcagcctcccgagtagctgggattacaggcgcccaccaccacgcccggctaattttttgtgtatttttagtagagatggggtttcactatgcaggccagactggtatcgaactcctgacctcgtgatccgccctcctcagcctcccaaagtgctgggattacaggcatgagccaccgcgcccggccatgagtcctttttatttctggtgtgtgggggcaagttctggagggctataagaacctctctaaagtcgggattacataaaacattgcatcatataacagacatacacagtgttgaatggttcagtacaaatgaccagcattcattcattccctcaatattttattttatttttttgagacagggtctcactttgttacccaagctggagtgcagtggcgcagtcttggctcannnnnnnnnnnnnnnnnnnnnnnnnnnnnnnnnnnnnnnnnnnnnnnnnnnnnnnnnnnnnnnnnnnnnnnnnnnnnnnnnnnnnnnnnnnnnnnnnnnnnnnnnnnnnnnnnnnnnnnnnnnnnnnnnnnnnnnnnnnnnnnnnnnnnnnnnnnnnnnnnnnnnnnnnnnnnnnnnnnnnnnnnnnnnnnnnnnnnnnnnnnnnnnnnnnnnnnnnnnnnnnnnnnnnnnnnnnnnnnnnnnnnnnnnnnnnnnnnnnnnnnnnnnnnnnnnnnnnnnnnnnnnnnnnnnnnnnnnnnnnnnnnnnnnnnnnnnnnnnnnnnnnnnnnnnnnnnnnnnnnnnnnnnnnnnnnnnnnnnnnnnnnnnnnnnnnnnnnnnnnnnnnnnnnnnnnnnnnnnnnnnnnnnnnnnnnnnnnnnnnnnnnnnnnnnnnnnnnnnnnnnnnnnnnnnnnnnnnnnnnnnnnnnnnnnnnnnnnnnnnnnnnnnnnnnnnnnnnnnnnnnnnnnnnnnnnnnnnnnnnnnnnnnnnnnnnnnnnnnnnnnnnnnnnnnnnnnnnnnnnnnnnnnnnnnnnnnnnnnnnnnnnnnnnnnnnnnnnnnnnnnnnnnnnnnnnnnnnnnnnnnnnnnnnnnnnnnnnnnnnnnnnnnnnnnnnnnnnnnnnnnnnnnnnnnnnnnnnnnnnnnnnnnnnnnnnnnnnnnnnnnnnnnnnnnnnnnnnnnnnnnnnnnnnnnnnnnnnnnnnnnnnnnnnnnnnnnnnnnnnnnnnnnnnnnnnnnnnnnnnnnnnnnnnnnnnnnnnnnnnnnnnnnnnnnnnnnnnnnnnnnnnnnnnnnnnnnnnnnnnnnnnnnnnnnnnnnnnnnnnnnnnnnnnnnnnnnnnnnnnnnnnnnnnnnnnnnnnnnnnnnnnnnnnnnnnnnnnnnnnnnnnnnnnnnnnnnnnnnnnnnnnnnnnnnnnnnnnnnnnnnnnnnnnnnnnnnnnnnnnnnnnnnnnnnnnnnnnnnnnnnnnnnnnnnnnnnnnnnnnnnnnnnnnnnnnnnnnnnnnnnnnnnnnnnnnnnnnnnnnnnnnnnnnnnnnnnnnnnnnnnnnnnnnnnnnnnnnnnnnnnnnnnnnnnnnnnnnnnnnnnnnnnnnnnnnnnnnnnnnnnnnnnncaaggcgggcagatcatgagatcaggagatcgagaccatcctggctaacatggtgaaaccccatctctactaaaaatacaaaaaaattagctgggtgtggtggtgggtgcctgtagtcctagctactcgggaggctgaggcaggagaatggcgtgaacccagaaggcggagcttgcagtgagccgagatcgcgccactgcactccagcctgggcaacagagcgagactgtctcaaagaaaaaacaaacagccagtttttttttttttttttttttaaatcctggattttaagaactaagccagccaggttttcatcaggctgacttttcattaaaatactgttttttttttctttttgctaactataaaatcatattgtcatgtcgaatatactttttcaaattacgctcctgtgtgatattttcctgggccacatcacagattactgaaaagatacttcatgctacggaccacagaaaagtttgtcaggacatagktgtgagtactcctgggagaccttgcctagccccctgcatctggctgtccctgttcctggcactgccccagtggctgctgcctcctccttaaaaaagagaaagttctccatgactggagacactcaagatgctaagatgtcacagagttagcttcccctgaacaggaggctcccgtcctattcagtcagaaggaaagaaatgygagagtctggatgaggcagccatctggggtattttgtgacttggtttagttcaggacattttctgtcttgtagagaacagggtccctctttgtccatgaaaccctgtcygtgcagcccagttgctgaggcaagctcctaccaaagtacttgctgagccaaccgttcattcattgagcaaacttccagggagtacctgctgagtgccaggtgtggtgcttggggatggggattatagcagagaacaactacagaaaatgttcctgctcttacggagtttacattgtagttaggggattcagacaataaccaaataagcacatgtgttaggtgggggtagatgatgggaagaaaacaagcaagaagaggtgtgatatagaagtgcttgaaaggaattaggctaacattgtttcagccaatattaggcacagattaagacaggaatgaaccccaaaaagcacctgtgggtggaggaatcagacagracagagtttgaatcctggctgaaccactcaactttcagtgtatggccttsggtaagtcccttaactctcaaagcttcagtttactctttttgttttttgagatggagcctcgctccgttgcccacactggagtgcaatggcgcgatctcggctcactacaacctcygcctcctggcttgaagygattctcctgcctcaacctcctgagtagctgggattacaggtgcccaccaccacacccggctaatttttgtatttttaggagagatggggtttcaccatattggccaggatggtctcaatctcttaaccttgtgatccgcccaccttgccctcccaaagtgctgggattacaagcrtgagccactatgcccgtcccagtttactttttcttttcttttcttttctttttttttttttttttttttgagacggaatcttgctctgtcgcccaggctggagtgcagtggtacgatctcggctcactgcaacctccgcctccctggttcaagtgattgtcctgcctcagtctcccaagtagctgggattacaggcacctgccaccatgcctggctaatttttgtatttttagtagaaacaaggttttgccatgttggccaggctgttctcgaactcctgacctcaggtgatccgcctgcctccgcctcccaaagtgctgggattacaggcaggagccaccgtgcctggcccagtttacatttctctaaaatgggaccagagctgggtgtggtagctcatgcctgcaatcccagcattttgggaggctgaacaggaggatggcctgaggccaggagttcaagactagcctgggtaacataataagacccatctctgcaaaaaataaaaattagcttgggtgtggtggcgtatgcctgtaattccaactayttgggaggctgaaacttggacctaggagttcctggctgcactgagccgtgatttcaccactgcacttcagcctgggtgacagaccaagaccctgtctcaaaaaaaaaaaaaaaaagtcggggggtagggggtgggtactagtaatacttccctggcagggccttgagggsattcgtgaaaatatatggaaagcccttgtcacaatgcctggcacatagtggtgctttatcattaggaactggaatkattaaattctgtcaaagacagttttaatgtaataggaagggggtggcacaggtggagtgttggagtagggggtggtttgcagttaatggaattttatcagcctttcccatttgtgtagtctgggcaggttaggatttccggggtggcttgaaggtggggccggaggcttgggagggacctatggatatctgcagggagggcgtgaccaaggctgcctggatgacggcgggggatggtggaatatatctccccctgccctctccacctgcatgtcccaggtccagccctgcccaagttctatcatttccccacagcgaaggggcagaactcaggcacctcgacactcaggtccagcgctgtgaggacatcctgcagcagctgcaggccgtggtaccccagatagacatggaaggggatcgcaacatctggatcgtgaagccaggagccaagtcccgyggacgaggtgggggtcagctcctgcttcctgcactggcacctcaccacctgcatctaccagtagaggccaaggaagttaatagtgcaggtctattgaagccaaattgcctgggtttgagtcctagctctgctactaatgtgcttcgtgaccttsagcaggttttagcgcctccctgaacctcagttccctcatctgtgacatgaggaggatgataatacctcctgtgaggtgaggattaaatgcagtcatgcagctaaagcactattccaaatcctcaacgtgcttcaatttatgcaatcctgggaaacggaggcacgtgtaggctttcacatgatccagaaggatatccataaggtcctggaagcagcagttggctgcctctagacaaggagatacattttttattgtatgccctttcgtactgcctaatttttgttttgttttatagtctatttattattggtaggaacgtaataggtgcacatactttaaaaaagcccccaacactggccaggtacagtggytcatgcttgtaatcccagcagtctgggaggccgaggcgggtggatcacttgaggtcaggagttggagaccagcctggccaacatggtgaaaccctgtctctactaaaaatacaaaaattggccacgtgtggtggcaggcacccataatcccagctactcgggaggctgaggcaggagaatcacttgaacccgggaggcggaggttgcagtgagctgagctcgtgccactgcactccagcctaggtgacagggctgtctcaaaaaaaaaaaaaaaaaaaaaaagtccagcactttaaatttgtatccatgtatgtattcctgtttaatcaaacaaaactggttaattaggaaaaatttaaaatccttagcaaattcctggctttcccaaagggaactgggttctgattgagggagacagccttacccrctcagccctatcagctccgaggggacaagagctcatgacaagctggcccttctcctggcccacgcctgaccttccaatccctgactgccctcttcccccrtaggcatcatgtgcatggaccacctggaggagatgctgaagctggtgaacggcaaccccgtggtgatgaaggacggcaagtgggtggtgcagaagtatattgagcggcccctcctcatctttggcaccaagtttgacctcagacagtggttcctggtaactgactggaacccacttaccgtgtggttctaccrcgacagctatatccgcttttccacgcagcccttctccctgaagaacctggacaagtgagcccctctgctcgcctcccacgagctccctgcctarttggggagctggcaagcaaacaggcrattacagtgcaggggactcgcgcagcagcgctaggctccacacacagactgcaggcaggcaggccctcatcctgccagctgtccttgcakccaacagatttttttttaacagacagggggcggtctcactctgttacctaggctggagtgcagtggcatkgtcacggctcactgtagccttgacttcctgtgctcaagcaatccttcctcctcagcctcccaagtgtctgagaccacaggcatgtaccacagctgatttttaagttttttaatgtagacatggggtctcactmtgttgcccaggttggtctcaaactcctgggctcaagcgatcatcccaccttggcttcccaaagtgctgggattacactatgcctggcccctycaacagatttgaccgagtgtgtaccttgtgccatgcactgttctgggcacttggggtatagcagtgaacaaaacaagatcccagctctcaagggcttacattctagcagggagaaacaggcaagcaagaacacaagtgaaattatctaacaggttaaaagattatttgggccaggcgcagtggctcatgcctgtaatccaagcactttgggaggccgaggtgggtggatcacctgaggtcaggagttcgagaccagcctgaccaatatagcgaaaccccgtctctactaaaaatataaaaattagccgggcgtgttggcgggcgccagtagtcccagctactcgggaggccgtgacaggagaattgcttgaacctgggaggtggaggttgcagtgaactgagatcgtgccattgcactccagcctgggtgacagatcaaggatctgtctcaaaaaaaaaaaaaaaaaaaaagattatatttgtcgttgggggaaaaagggaagcaaatgtagagcaggggaaaggaggtcaggagttttgaaaactaagatgtcgtgttaacttctagggtgagagaaagccttgttaaagcctgaattccaattctgtctctgcagcttccaagttgtttgaatctggtcatgtgaaaacctatttaagccttggtttccacatctgaagaatggaggyagtagtatgaaattcatagctatcaattattgagtgcttcatatgtgatagtgctgagcactttgtatacatgatctcattcttaataagaacccagtgcatacttcttgttcaccaggtctgaagaaaaatataaaaaacagtgaagtgggtactgttactacccccattttgcagatgtgaagagcacacaggttagatgacttccctaaggtctcacaactagtgtggagatggcgcttgaacacgtcctggcratgacggggccatacccttacccaccctcttatcttccagacactgggatggttaactgagactatgcacaaagcacttactactgcggcccccgtaactagcgccctcagagcagccctgagagataagagtggttctggccctagaagaatgtggtggggcccaggcctctgtcctttttgtccttcccagtagggccccatctcaagttgaatagtgcagggtggcccagggctgcttccaggacttgcctgtcctccctgagtttggatgggagagacacaagggcctggacctcagtyttctgttctctgccccagctcagtgcacctgtgcaacaactccatccagaagcacctggagaactcatgccatcggcatccactgcttccgccagacaacatgtkgtctagccagaggttccaggcccacctgcaggagatgggtgccccamatgcttggtccaccatcatcgtgcctggcatgaaggatgctgtgatccacgcacttcagacctcccaggacaccgtgcartgtcrgaaggccagctttgagctctatggcgctgacttcgtgttcggggaggacttccagccctggctgattgagatcaacgccagccccacgatggcaccctccacagcagtcactgcccggctctgtgctggcgtgcaagctgacaccctgcgcgtggtcattgaccggakgctggaccgcaactgtgacacaggagcctttgagctcatctataagcaggtgaggaggttgggcccaggcaggaccccagagagtctgcaccctcttccaggcagccctgcagtggagcataggactctgcagtcagacccagtttaagacccagattcaagtcctggtcctgctaaggtgacctcacttccttgagcctcagtttcctgatctttgaaatggggatattattaccatctttctcatgggaatgggagaataaaatgaattcatgtatgaggataatatttctagagaggcatatagcatagccataagagcagagattctggaatctccttgggttcaaattcctgttcagygacaacaagctatgtgactttggacaagttcctaacccctaggtctccttgtccgtaagaataaaaatagtacctaactcacaaagttaggtactatgagttgtgagaattaaatgagttgataagtaaagtacttcatttatttatttttgagacagagtctcgctctgttgcccaggctggagtgcagtggcatgatcttggctcactgcaacctctacctcctgggttcaagcgattctcctgcctyagcctcccaagtagttgggattacaggtgcctaccaccacgcctggctaatttttgtatttttagtagatacagggttttgccatgttggccaggctggtctcgagctcctgacctcaggtgatccgcccacctcggcctcccaaagtgctgggattacaggcagaagccaccgtgcccagccagtaaagtactttagaatagtgcctggcacgtagtaaatgctactaagttttagctaatgttattattacctaataaggttaggagtttcatcatgtataacctgtaaagtgcctgaatgtatagtaataggcaattactggtagctactattattaktagtattataattatttcactcgtcttgctccaaaaagagattggagtctacttgtaaaatagaacagcattttaaaaaatcagtcagaaaattgattgcaaggctttctgagttctggatagaatttcttgtggcagtttaagtggcttctgattagcctccggtttctgtcaaggtttggttacaggaagagaacgtactgatcacatgacytaagtgacctcgcctttgttacagttgttattgatcatttcttaaattaatatattggcgttttggtttcaaaaaatgtaaacggggaaatacatgggcaggaaaatatgagcaagctgagggaaaaggtgccattgtagtgcagtgctcccaatgccagtgcccaggccagaagcatctgaaagcttctaaaggtatggatgtgaggaggctccacccccagagattgacccaaaatgtctagcttggggaggagactatgtmtatctgcatttttcaaatgccccccaaatatcttttttttttgagacggggtcttgctctgttgcctaggctggagtgcagtggcaccatctcggctcactgcaagctgcgcctcccgggttcaagcgcttttcctgcctccgccccctgagtagctgggactacaggtgcctgccaccaygcccggctaattttttgtattttagtagagatggggtttcaccatgttagccaggatggtctcgatctcctgacctcgtgatttgcccgcctcggcctcccaaaatgctaggattactggcatgagccaccgcgccmrgccctctaaatgtcttttattgctgatttgttcttgtttttgtttttaggccagcacatagtaaaggcttatrccttgcactgtttttttttgtctcttttcatctaggccagccccagtgccttttgaccccatagttttgatcttttgaggggccaggcgggttgttttgtagaactgtcccacattctggatttatctgattgtttccttatggtgtgatttaccttggtcttctgttagctgattgtctcaggaactagaagttaggtcaaatagtttgatgaggttaaacatttttcccaagagcacttcagaggtgatgccgcgtacctcatgtggcatcacaaggcacatcctgtgagagtgtctcacagttagtgctgctgagtttgactgtgggttacagtggtggctaccagattctctccattataagctacatctcccctttgcaattaatttttctgtaaggtgctstgttggctctgtccagattacacattttcctgtcatcctttcatctaattgttttgataccagttttgattattgcctattttattagagttgcaaaatggcaaatgtctaattctgttgttccttctgcatttattagctgagattcttctgtaaagatgarctttccctcatcatctggggctacttgggagtgctgatagctacatttttatttgatttttttttttttttttttttagacagagtctcactctgccacccaggctggagtgcagtggtgctagctcggctcactgcaacctccgcctcccggattcaagtgattctcctcagatcccgagtagctgggattacaggcgcccaccatggccggctaatttttgtgtttttagtagagatggggtttcgccatgttggccaggctggtctccaattcctgacctcagctgatccgcctgtcttggcctcccagagagccaccgcgcccggcaatagctgcattttttttttttttttttttttgagacggagtttcgctcttttcacccaggctggagtacaatggtgcgatctcggctcactgcaacttctgtctcctgggttcaagcaattctcctgcctcgacctcccgagtagctgggattacaggtgcctgccaccatgacctgctaatttttttgtatttttagtagagacagggtttggttatgttggccaggctgatctcgaactcttgacctcaagtgatctgccarccttagcctcccaaagctctgggattacaggtgtgaccaccatgcccggccaatagctgtatttttaacaagctccaagtaattctgatgtttagatagattctgatcaggatccttcagtggcacagaagatacctccaactggctccaggttgctagcaaggcacagggagctctcctggagcccagctgagggcaggacatacagcttggcctgataggaactgagagttgtaagggagtccctctcctggacccttctctctgccttcctctgcatattcgttacttcattctctccacagactgtcttctttaaggttcttagtttctgctwccccataacctggattcacacgaggctctaggcaggctccaaacctcttacttgtctgggtggcgtaactcaaattctctgtgcagagaatctgattggctcagctcaggaagctgtccaccagcagtggcctgtgcagtggagccacacgcattccagcaggggctgggggcagcttaggagggaaatgtggctgaggggtgctggtgggacatggctaggattcccccttcctctgggctagcaattcctggagctctgtgactctaggtactgactcagaggtgggctttccatttctcagctcagaaacrcctctttgaccaggtgcctcagaaagtaattccacccatctctactctgggtcccgctgggccaaggattccagtaccactgactgagtgggccttgtctcctcttcttgcccacagmctgctgtggaggtgcctcaatatgtgggcatccggctcctggtagagggcttcaccatcaagaagcccatggcgatgtgtcatcggcggatgggggtccgcccagcagtccctctgctgacycagcgaggctctggggaaggcaaggactcggggacccctacccacaggtcagcttctaggaaaggcactggggccaggagcctggggcacagtgagaagccagtctccactgccaccacttcagcccccggaaaggggaagaaaggcaaggcgaaaagggccacagccctggtctgccccaatctctgggagtgggatgcccccagcaccaggatgggctgcattttcaccatgaccttttctagtggggacaggcaaccccaccacttgaacagattgccactgagtccgaagaacccccrggccctgggtaagaccattcccccaaaacacccgagtgttccaaggcgatttattcctgctctccaggcccctcccaaccacctggatcagccaccccaccaaagagccaccagtagcaagtaaaagccactactcacaaagtattgtttaaaaatacacagccaaattagctgggcacggtggtgtgagcctgtggtccaggctactcgcgaggctaatgaggatcgcttgagcccgggaggtyaaggctgcagtgagttatgatcgcacctctgcactccagcctgggagacagagcgagatgctgtcttaaaaacaaaracacaaaaaaagcactttgggaggccgaggcgggcagatcacttgaggtcaggagttcgagaccagcctggccaacatggtgaaaccccatctstactaaaaaatacaaaaattagccgagtgtaggggcaggtgcctataatcccagctacttgggagactgaggcacgagaatcgcttgaacccaggaagcggaggttgcagtgagccgagattgcaccattgcactccagcctgggcaacaagagcaaaactctgtctcaaaaaaaaaaaaaaaaaaaaaacccagccaaatgagtattgtctcctccaaagtagtcactctgcctcacagagtgacttatttcaaagatgacctgatttcaaagatgccaggacttaagcccaggttgctctctccagcgcccacgcttttcccactgcagtattctgcctttgccttcaagcagtcacctctcggggaaagaactaacacatgtccagcacttaacagtttgccccataccgctacctgcccagctcctttagtgtttacaccaacctagcaaggtaggtgctattatccccattttccagccgaggtatcaggaagtttaaggaagttgcccaaggttgcacagctcagaaggggcacagctgggatgcagacccaggtctgttggactctaccctgttttcttctcactgcctctggaggaggaaccgggagggctccgtcggccttcaccccattccctccatatccccccatcctccacacrtacctkttagggcagctaggccaccttgggccccaccccagggcctcacagcttctcttgctcccacagcccgtcaccacttccccagcctccacaccaaggcccagctgccttctccccatgtactccgacaccagggccaggtcctcagacgacagcacagcaagctggtgggcactaaggccctgtcgaccacaggcaaggccttgaggactctacccacggctaaggtcttcatttccctcccaccgaaccttgatttcarggtggcacccagcatcctgaagccaagaaaggtgggcctcgacctgtgactcacacccagtggacagtgctgagcacggggtcagggctggagggcacaggcagagggcagctcccaggctggctggcaccccaagggaagagctggtctccctcagaagccccttcctccacagacttctgatcatctccctcttctcccctcctttcacaccgaggctcctgctctcctgtgcctccgaggcccccagctggaagtgccttgttgcctctgccctttgaagtcggaacaattcctagcacctgtcggaaggtcaaggccaaaggcaaattcaaggccagactgtgacaaacccaggrctgaggcctgccccatgaagaggctgagccccctgaaacccctgccccttgttggtacattccagagrcgcaggggcctgggggatatgaagctagggaagcccctgcttcgattccccactgcccttgtcctggatccaacaccaaataaaaagaaacaagtgaagtatttggggcttgactccattgctgttggagggtcaagagtggatggggcgaggccgtgtaccccagggtccacagcaagagcctgaggccatcagcagctcctccgtgcagcgaggcccagaattccsacctaaggacagacatggggcttcctatttagggactcccccagcatctccgatccaggggtggggagcgtgagccttcactttacagatgaagaaactgagtctgaaagaggaggcatggcttacccaagatcacgtggcagtgagtcgacgcagggacatattgccagaactgccgagcactgggagccccccaaccccagagaacaagccaagctagcagaatgacacctaccrggcataggaacgttaatgccatgagacargggaaggaattggccttgcctaaacctcagcccttctgcagagggcatgggtctatcccttcttcagcaaggggccaaggtcacctaaaaatgaaacatccaataagccacacccacctgaagaaaagtgtggcactgcttagttgtagtgggttgaactgtggtcccctgaaaagagatgtctacttggaccctgtgaatgtgaccttatgtgggaaaagagtctttgtagctgggtatggtggctcacacctgttatccyagcactttgagaggccaaggcaggagatcgcttgagcccrcaagttcaagaccagtctgggcaacatggtgaaaccgtttctacagaaaattagctgggtgtggtggcacacacctgtrgtcctagctactcgggaggcctaggtgggaggattacctgagcctgggaagatcaaaactrtggtgagctgtgatcacgccactgcgctctgagcctgggagacagagtgaaaccctaaatcaaaaaaaaaaaaaaaggtctttgcagatgtaaataaatttaagatcttaaatgagataatcccaatgaccagtgtggtgcttacattcaatggcaagtgtcttcataagaaaggattaagggccggtggctcactcctgtaatcctagaattttgggaaggctgaagtaggtgaatcacctaaggtcaggagttcgagaccagcctggccaacatggcgaaaccccgtctctactaaaaatacaaaaattagccgggcatggtgacatgtgcctgtaatcccagctactcgggaggctgaggcaggagaattgcttgaactccagaggtggggttgcagtgagctgagatcgcgccacttcactccagcctgggcgacagactgagactctgtctcaaaaaaaaaaaaaaaaaggaaagataaggctgaggcaggagggttgcttgagtccaggagttggagggtagcctgcttgggcaacatactgagaccctgctttaaaaacagagattcaaaaacaaaacaacaacaaaaacattagccaggtgtggcggcacgtgcctgtaatcccagcaggagaatcgcttgaacctaggaggcagaggttgcagtgagtagagctcacaccactgcactccagcctgggaaacagagtgagactctgtctcaaaaaaaagataaggaggctgaagcgggagggttgcttgaggccaggagttggagggtagcctgcctgggcaacatactgagaccctgctttaaaaaatataatagagtaagaaggctgggtgcagtggctcatgcctgtaatcccagcacattggcggggggtgggtgccaaaacaggtggattgcttgaggccaggagaccagcctagtcaacatagcaagaccccatctcaattgttttttttttttttttttgagacaaggtttcactctcacccaggctggagtgcagtggcaagatctcggctcactacaatatctgcttcctgagctcagatcatcctcccacctcagcctcccaagtagctgggactacaggcrcatgccaccacacctggctaatttttttttgcatattttgtagagacagggttttgccatgttgcccaggctggtcttgaaatcctgggctcaagtgatccacccacctcagcctcccaaagtgctgggattacaggtatgagccactgagcccagccaccatctctacaaatttttttttttttttgagacggagtcttgctcggttgcctaggcagtgggtgtgatcttggctcactgcaacctccacctcccaggttcactgcctcagcctcctgagtagctggaactacaggcgcgtaccaccacacccaactaatttttgtactttttgtagagacggggtttcaccatgttggccaggctagtctcgaattcctgtcctcgtgatccgcccaccttggcctcccaaagtgctgggattacaggcacaactcagcagtaagcaagatccgtaataaacatttactttcttagcaaatcctcaaaaccataacatgaggtaggaacttttattatcacaagtccagagaggtaaagttacttgcccaatgccacacagcaagcaagtggcctgtccaggatgtgatcttaggtttgtctgactgcagagcccccaccctcactttccagtgtgtgtgagggggtcaggaacagagggaggactattgtaagcggagccccaggcactgtagggtcctggagaaataagggggcagtggtgccaggagctcaacaggggtgtccctggccctggtgcctgggagaaggagccgatgtaggtggaggtgcaagggcagctgggcagcctgggagggggtcaggtggaggcgtctgaggagggcttcatccaggacctggagcgggagaggtacgttgtgttcagccccacattttccaagcagctgagtacccagctctaagggaaatgggagtaaggcgggcgcttcctccattccccactgttctgcaactgttaatcatttcctctttgcacacagatgtgcacattcacacaggcactcacactgcagcagagactggctagggggtcacccaatcagtttcctcctaggcacacacctcaactccatttcccagccctctcacagcttggtgagacgtgagtgagctctagctgagtgaatgtgggtggcagtatgtatgccacttccacacctggcccagaaaaaccttatccacttgaacctacactgtctcccctcatctggctgggtatcaacagcctgggtccctgagtacttagtgcttgaagcagagcccactcccattatttgaccttaacatgagggcacagttcttgtgtgaagactctggtagtctgggcttagtgtgttagagcaggtagaggcatctggtgtcctaatacaygcatgcctttgaccctttgtaccagactcaaagaatggcagacttaagagggctttagaaattagccacatcaactcccttattgaacacatggacagaatgaagcccaagagagtgagtgttacttgcccaaggccacacaccaagatgtgggtacggatacagccttgggagccaaaagggctgcctcccagtagtcccaagctgcacagataaggtctggagatgctgcccatgctcacctctccctccacccctcagaaagcagcaggcaggtgggctggagtacctgtctttggggcttgttgttctcagctggcagcagaaatcgctggcccaggacagtgcccacacgggcagagtacatgtggtccccaagcacagggcagagctgtagtaccatgtgcacctgtagttgactggagaacactgggcaacaggaaagccaggagagacagtgggcagctactcgttctgtgccacccagtatcactcctccccttttcctttggggaaacaccaccccctttctcagatcatatgtttcagtgaggtcagtactatggcccctgcatccagagagggacacataacacgtcaggacgatcacagctrtcaatctgcctggctgtgggatccactcatgatgagatgcaaccctgatttaattgctgaagccaccgggcctaaggactgttctttcctgttggggtgctagcctgaagctgcctcctctagctgggcctggtcacatacacctctgggggccatcaaatgctccccaggctgctgctgataccactgtctccccagctccttgcctccctaagccaagtgcagttttttttttttttagccagcgtttcactctgtctcccaggctggagtgcaatggtgtgatcttcgctcactgcaacctctgtctcccaggttcaagcgattctcccgcctcagcctcccaagtagctaggattacaggtgcgtgccaccaactccagctaatttttgtatttttagtagagacagggtttcaccatgttagcctggctggtttcgaactcctgacctcaagtgatccatccgccttggcctcccaaagtgctgggattacaggcgtgagccaccgcgcctggctcaagtgcagttttttttttttttagatgaagtctcctctatcacctagactggagtgcagtggcatgatcttggctcattgcaacttctgcctcccaggttcaagcgattctcctgcctcagcctcccgagtagctggttttacaggcgcctgccaccrtgcccagctaatttttgtagtttttagttgaaacagggtttcaccatcttggccagactggtcttgaactcctgacctcgtgatccacctgcctcagcctcccaaatcaagtgcagttttaaaggctggctagggtgccagacctacctgtcagtggctgcagctggaccagggcacagccagagcctgtggctaccacacgaaagtgactgagagtcttcttgacaccttccaggatgtcctttcgggatggggccttcactggaactgtctgtggtgccagccaagagtgaacaagccttacacaggtctgggagctatacccagaccctccctgctcccaatagactccgggcagggccacagtataggcagtggtcacttgcctgttttaggggacaggagagccagccatccyaaatccatacccctgactcctctctgtaggggtamtatatctagaagcacccctcctcttcccagacccggactcacgagattgaccccatcaatgtgttccagtttcagggcagcctggatcttcccctcagaagsagctgggatcccatcagtgacagcactgagamaggggcaggaggaggtcacagggtggcttgctgggacctccccaccactctaggaacctcccagcacctctcaccagtaggtggctgtgggcctttgggctctccgtgcatgggtgaagtacttctggaggcgactagctgtctggggacagctggagaggagtacaagcccagagctttctctggaataagcagacaaatcacacaagttaaagtcccttgaactcgcccactaaaaagkaaactcttaggaacactgacctgcttcaggccaaacactaacaccaggactataacctagaccaactcctgagaaacaagtaaggtttccccttctttgataacaagactatgtagcttaatgtgtttctcattttgccccggcccccagggaactcagagccaaatgtcgtaacgattgtctaccatgtgccagaattctactagaaattctgtacatattagctcttaaataagttctctacaaaaaagctcatgagtttgtggaactgcagaaatatttcatctcaagtaccatctttaattgatggcagttagaggaaagagtatcatggatcgactagcaatgcctgccacgagtaccgtcatggagaaatgactgcacactgagcataggtattattttctctattttaccattaggggaactgaagctcagggagggtatttgttttgttttgtttttttgagacrgggtctcaytcaggttgtttaggcttgcgtacagtggcgggatctcagcttattgcagctgccatcttctgagctcaggtgattctcccatctcagccacccgagcactacaggcatgtgctgctctgcccagctaggtttttgtgtgtgtgtgtgtgtgtgttttattttgttttttaagtaaagatagggttttgccatgttgcccaggctggtcttgaacttctggactcaagcaatcctcccacctcggcctcccaaagtcctattgattataggcatgagccaccaygcggaaagttttgttgttgtttttccagagatggggtctattttgcccaggctggtctcgaactcctgggctcaagtgatcctcttgccttggcctccagaagtgttgggattacaggtgtgagtcactgtgcccagcgtcagggaggtgtcatgctttgcctggtatcacaccatttgtacttgaggatttgaacccagagccatcggcttcctcttcttcacagtacttgtatccacctctatgatctcaaaccttcccatggaaaatgtctcagcttatccccaagcagctgtttccccaccacagatggatgcctgtactcctagcttcctgtcacccctaccacttacttcccagatgctcggacaacctgaagctccygctccctgagccctagggactggctcagctctggcagcactgagaacaacgtcagctctcctggttttcctggaaagtaagaaagaaaaattacaagaggccaaagcttcatgccttcacttttccctccctcagwcacgaaacccccttccgctgcattcccttcccacatccccggcccatacctgtcactggtagaccctgtggcttgttcaacgtcactagaggtcctgaaacatacatcacacgaacatcagcaaaagcaacggtaaccctttatgcagcactaaagagtttccagagcactttctcaygcatcttagcacatgtccccatcatgactctcagacatgagttaactaccccacaccaaattcaacttctttctgttcctctgccacctcagagcctcggcacttgctgtttcctgtccccaaatttcccaggtctggctccctatcatcttggctcaaatgtcacatcacggagaggtctgaatctccaatctaatgtctgccttcctcctgcagttcctcaccatcataacaccctgttttagtttatgcatagcacttaccactagtaacttgttcatttattttctgacatccatttctcccgttagagagaaatccatttctcccctgagagcagaaaccatatctatctttttcagcactgtatagcctgcctagaacagtgcctggaacatagcatatgttcaagaaatagttgagaaaaggaataaatcactgaatagagagtggggttcagagaaattcagttattttcctaaagccgcacagcaagctgatcacagagcctaggtatgtctgactccaaagcctgtgttttgtccgtcgataaataatcattatttatttatttatttatttagactgagtcttgctctgtcatcccaggctggagcgcagtagcacgatgtcggctcactgcaacctctgctatccgggttcaagtgactctcctgcctcagcctcccgagtagctgggattacaggcggacgccgccacacctggctaatttttgtrtttttagtagagacggggtttcaccatgttggccaggctagtctcgaactcctgacctcaggtgatccgcccgcgtcagcaccstaaagtgccgggattacaggcgtgagccaccgcggccaataaacaataatctagtatagcaactcccgtaactgagcgccggctatgtgcaaggctcggtagttatttgcatcttctccccactcttaaccctactgcatcatggcagtagggttaaaagcggggagagggtgcaaattaggtggctygtcccagctcatgctgctagtgggaggcagaagcagggctgatcccgtggcttcaatggagagcccaactgcacgccgaggcagtcycctcccggtccttgtgcggccgtgcctctcacccytcacctttccggtccaccacggctgcccgcagcgcatcaaccagctcctcccgactgaggttttttggcagcagccccgcgaagggctggtccccgaggggccccgaccgttggcaggagccgcggggttgcctctgatgcctggacaaggagggagaagcaatgggagtcattccatcccgaggtgccacccattcctatctccggacgcctcttcccaaatcctgcggcctctgacaaatgcctcacaatgtctgggctgacctcgaaaattcaggtacgaccggtyccattctacagcggagggcaccgaggctcagagaggccaacggggctgttttcgggtaacatctacctgatccagatcccgcacgtgccttccccctgccctagcctccgtcccgcatgagagagggggtacttaatcaccgggcttcggtgccaaagcctgcgtcctcgggcactgggcgsacacccaggccccgccgccagccactccagaaccggcccaaaacacggcggccgtccatctccsgagccaggacagcgcgcatgtgcgtccagaggggcagacccgcgctccagccagcgcgctgattggtcagctggagtgtcaatsggaatggtgaccgggcgggactcagagcctgaggaggcggggcttttcctccgcccaggaaggaaatgcagaaatgccttcctatgcwtttagggagagcgctgyagcagaagaatttgatctgatcaaaaaacctgtcttagcaaaaaacctgaagccgcctttgcaaaaattatattacaaaattatgacagcgaaagagatctgatctaaccaacccgcagcttgcctttaacctctaaacggtccttggtcattcctgggcttgggccaagctaactttgggagaaattagttcgtagtctaaatgataattgcccttcccccgaactaaactggcttcatagagttaatgaaaggccaccaggttaggagtagtagagggacctgaattctgctaagggttagaggtaactgattaccagcggttattccggaggtcacagtgtttgcagcttccccagctcacgattgtccaacctgagattggcctttggagatgtctttccaggcttttgcatttctgacggccggatcaccccacccggaccctcaactcttggctctactagtcctgtggcccctcgargtcaggagatcgagaccatcctggctaacacggtgaaaccacgtctccaccaaaaatacaaaaaaattagccgggcgtggtggcgggcgcctgtagtcccagctactcgggaggctgaggcaggagaatggcgtgaacccgggaggcggagtttgcagtgagccgagatcgtgccactgcactccagcctgggcgacgagcgagactccgtctcaaaaaaaaaaaaaaagaaaaaagaaaaagaaagtagaagaacacagaaaaaaaagaataatataatgactgcccacattcctaccatcagaattagtcattgtgaaacaatatatatatgtataggtttcctgtttttcttgtttaagaaatgaaagggataaaagtaaattcccctttactgcgtgcttccagttttcactccctccccagtctccactttgagtttggtgtgaacattttcctaatgtgttttggtttttgttttttggagacagagtctcgctctgtcacccaggctagagtgcagtggcccgatctcgactcactgcaacttccacctcccgggttcaagcgattcccctgcctttgcctcctgagtagctggaattacaggtgcggtgcccgccaccacacccggctaattttttgtattttagtgacggggtttcaccatgtcgcccaggctggtctcgaactcctgagctcaggcaatccgcccgccttggcctcccaaagtgctaggattacagacgtgagccactgtgcccggccactaatgtgtttttttgcttgctctgtcatccaggctggagtgcagtggcacaatcacagctcactgcagcctcaacctcccaggctcaaacgatcctcccacttcagtctcctgaatagctgggactacaggtgtgcaccaccatacctagctttttttttttttttttttttttttaaagatatggggtctcacgatgttgcccaggctggtctcaaactcctgggctcaagataagaaaataaaaataacaaaataatttttaaaaaatcaaactcctgggtttaagggattcacccacctacttcggcctcccagagtgctgggattaaaggccgcacggggcctttgacagacacttctttttttttttccttcgagatggagtctcactctgtcacccgggctggagttcagtggcacgatcttggctcactgcaacstctgcctcctgggttcaagcaattctcctgccccagcctcccaagtagctgatactacaggcrtgcaccatcatacctgcctaattttttgtattttttagtagagatggggtttcaccatgttgaccaggctggtctcaaactcccgacctcaggtgatccacctgcctcagcctcccaaagtgttgggattacaggtgtgagccaccgtgcccggcctttgacggacactttctaataggctttttcatccagcattacacacccctatgaggaaggcagggtgggttggggccctgccttacagatgaggacacagtggctgttgtggttctttgtgtcccttaaaggcatgccaaaagctatgggtgggctcagaatgccccggaaggaagtcagataactgaaaagaacacttgcactggtcacaggaaaaccagcctgagctgccrgcagcctcygggaggtgttggkatggcctgcccctggtttccatgcgggtcctgacccagagagcaggccccaggggagtgggggtcagcagaggcaggatggggcccggtctgcttgtgagggagtgctgggagggtggagtctcactcttgaggcacagagctcagccagcggaagaggggatgcagggatcaagccccaggccctggggcctgaggtgtgagagctgtctttgatggttgaagccagccttcccaggccaggccaggccaggctgctctctctccccgaggatgcatttcttgctctgttatcagccctgagctctgagagaagggactttctttttttttttttgagacagagtcttgctctgttgcccaggctggagtacaatggcgtgatctcggctcgctacaacctctgccttctgggttgaagcgattctctagctgcagcctcccaagtaacagagattacaggcgcctgccaccacaccctgctaagttttgtattttcagtagagaaaggggttcaccatgttgaccaagctggtcttgaactcctggcctcaagttatccacccgactcggcctcctaaagtgctgggattactgtcatgagccactgaacctggccaggagggactttcttaagaaggtcacaagaggactcagcacctgccaactcccaagtagagcctgggcaggggtgggaggtgtccccggggaccccagtgcacgagagccctgtgcctgcacggccctccaccaggaggccaggcctcagaggcagkccagcattggagccacttaccacatgaacaaatgtctgtgtccccccaaactcatgtgttgacacctcatccccaaggtgatggcatctggaggtggcatctttgggaggtgatggggtcatgagggtggggcccttgtggttrggattagcgcccttatacaagaggccccagagagctccctcgccccttccgccatgtgaccacagtgggaagatggcaggcatgacccagaaagtgggccctcaccagacaccctgtatgccagctgatcttggactgccagcctccagaactgtgaacattatattgctgttgttagagagacccaatttacagtattttgtcacagcagccccaacagactaagacgtatgactgcaagctctgaaaatgcagccaacaccacatgttggaatcatgatatttgggatgtgttggggtaaaccacatgcattagtaaaataaactgttcaacacctgtgaaaaggagagaaaaaatataaataaatgaaataaactattactttctgaaggggtgggttgtccctccacacctgtgggtgtttcttgttaggtggaaygagagacttggaaaagaaaaagacacagagacaaagtatagagaaagaaataagggggcccaggggaccagcgttcagcatatggaggatcccgccagcctctgagttcccttagtatttattgatcattcttgggtgtttctcggagagggggatgtggcagggtcataggataatagtggagagaaggtcagcagataaacacgtgaacaaaggtctctgcatcatggacaaggtaaagaattaagtgctgtgctttagatatgcatacacataaaacatctcaatgccttacagagcagtattgttgcccgcatgtcccacctccagccctaaggcggttttcccctatctcagtagatggaacatacaatcgggttttataccgagacattccattgcccaggggacattccattgcccrgggacgggcaggagacagatgccttcctcttgtctcaactgcaaagaggcatgccttcctcttttactaatcctcctcagcacagaccctttacrggtgtcgggctgggggacggtcaggtctttcccttcccacgaggccatatttcagactatcacatggggagaaaccttggacaatacctggctttcccaggcagaggaccctgcggccttccgcagtgtttgtgtccctgggtacttgagattagggagtggtgatgattcttaacaagcatgctgccttcaagcatctgttgaacaaagcacatcttgcaccgcccttaatccatttaaccctgagtggacacagcacatgtttcagagagcacggggttgggggtaaggttatagattaacagcatctcaaggcagaataatttttcttagtacagagcaaaatggagtctcctatgtctamttatttctacacgacacagtaacaatctgatctctcttttccccacatttcccccttttcttttcgacaaaactgccatcatcatcatggcccgttcttgatggtcgctgtctcttcagagctgttgggtacacctgcagacttgaacaacagacaaaacaggcacacaaggattaatatgaaatttataatcgtagtacttccaatcgtcttaacccaagtgacagggttaagatttgtgaggccatcagcaactcctgcgattgcctcagttcctggcaccaaatttaaatgggcttttgatgttttgaaaatttgttcttttaatttggaaatgtctaaagtgagattatcttctcttgcctgtagatggcgtctaaccatgtcccagtgatgctcagactcattacaacttggggtgtaatacaaaaatctgacatattccagtcacattgtaactggaaacgatgttctaagctcatgagcctgtctcccatccaaatgacagtttgtctaaaatcattaatttgatttgccaatttttgatcaataccagattgtgaattccacaatcttgtagcatttttttgccaatcattaacaaagtttactgactgaacagaagagtgcagcgcaactcctgccacagcagccgtagctgtgactgcaattaatcccataagcactgtaattaaagtaaaaatgaatcttttggatctatttaaaatggcttttaatattcagtcaaaatatggacggatggcgaggcctcccacggtcggtccatggacacagggatccacacgccctctcttgctctcaccagcagaatacggtgctgccgattaaaagtcgaatcaatgcaagtaaactatctacttttyacaggttatagtttgagagtctggtttaataactatatttcctacaactagcatataagggggctttacacaactttgtaaaggaaccgttagactggaatttaggtcgatagtataaaacggctgatgatctcttgtttctaaagtttgatttccagaccaaatcctaatgtggtatgaggctacagtaagcctccataattctggatgttcaggaccagaaacaggacttattatttttggtcttggggtagagattcctttttctccccattcccagggatagaaagactgtaattttttatgcttatgtttgtctaaactttctgttaagtcrctttcaacagctggactcacttgtgccctgggacatgactgagtttgccctgagcaattgtggtagaattgacctcaaggtgcccaatctataatagttccaaattcattgttttgtaatattaccgcactattggccacacattcttcccaaactaaagcttctgtattttttgatcctttgggaattttcttggggcaaggtttccctttaggtctaaattttaatgatctttgataagaaaagtcttgtaaattatttacccgtggcctgagtgacatcctgcttaccgtgtgataagtgaatctactgatgggactgacagtaggtacttctaacaaccaattttggactgcaggcattaagcatcctggtgctctccctaggcaaataggaggataacgatacccartggaaatatttatcataatcccttcttcctcaggtttggcagggcagcgatcatctgtggggccaggtaccccatacactatcattaacatatacttcaataggattatccatccatgtgactggtgtttccatgtccgtggaggcgcttttctttgcatctctgatggattcattgtagaacttcaaatgtctagtgggtatccaaacaggaagctgattttctcctggtgaaacacaagcaaaacctctcccccacgtcaccaccttccctatttcccatgtcttatttttattatctttccaccaaatcagttttccttcatgtgggctgttctttttaccagtaagatgttgttctgcagaagtagtagtctgatttctataaatgtttaaaaaatttaaagtatagagtgctagattaagttgcatctgaggagtggtacactccttattgtctcccccttctttttgtttaactaattgagttttgagtgttctattagtactttcaactatggcctgtccttgggaattatagggaattcctgttgtatgtgaaatttttcactgatttaagaatctttggaaagctttactacaatatcctggtccattgtcagttttaattttttctcgaactcccattacagcaaaatacgataataaatgttttttaacatgggaagtactttcttgattatctggccctaaacaatgtaaaatcctagtactttgatacacttctgaggctgtgcctacgccgacaagtcctgtaacagccttttgtttaggccaattttttggccactgatttaaagcaatgagagacatctgctccagtgtctactaacccttcaaactgttttccttgaataatggacttacacacaggtctgttctctgagacctgacttgcccaatatgcagcctttcctgttggatcagtgcttccaaaccctcctgttctttttatctcactatttccaaccttaatataaggcaggagtaataattgagcaatcctgtctcctggactggcactccaaggaattgaagagctaataaccaattgaatttcacctttatagtctgaatcaaccacaccagtgtgaatttgaactccctttcgatttagacttgatcttcctaagattagtcctacagtcccctcaggcagtgggccatatacccctgtggggattttttgtgggggctcccctggaagcagagaaactgcttgtatagtacataaatctactgctgcactgccgcttgtggcgggggacaattgttgtattgtggtaactggctcattccctgaggcacttgggacagtgggggttgtcttccctgaaaaccctgaggaacaaagggctgaactgggaatgccccagtttgttgtggggccggactgaggctggcccctttgctcgtttcccgacaatggttgcccatttctatcaaatttagaacgacattgactagcccagtgttttcctttttgacatcttggacataagtcaggtggctctttacctgttgttgtagtcacttgaatagttatattctgtttatttgaggctgggcaattcttttttaaatgaccactttgaccacaattataacatttccctccaaatgttctaacttgtcctcctaaagcagctcccattagtgcttgagccataagcatagctttatgcatagctcctccgattccatcacaggcttttacatactctgagattacatctgatcctgcgggaaactttccttttaatggcttaatggctgattgacactcaggattggcattttcgtatgccatcaactccactatgaccttacgggcattttcatcggcaattgacttttgagcaacatcttggagccttgccacaaaatcagggtagggctctttagagccttgtcttgtattaaatgaggggcaggcggttcctgggtcttggattttttcccaggytctaaggcagatagctctaacttgctcaatggcctcattttgcattaatgcttgttgactaatagtgctccaattttgaccagttcccagtagttgatctgcatctatgttaactggaggattagcagccctattttttcggacctgttcttgtgccccattaatccaccaaatcttaaattgtaaaaattgagagggtgagagagacgattttgccagaatctcccaatcataaggaatgagtctatgtccgtgtgcaatggaatctaataatgtcctcatataaggggagttgggtccatactgttttattccctctttcatgtcttttagcatttttatagaaaaagacttgtatctggcctcaactgtgggaggctctccctcttgggctccttctccaggtggtatcagttctaacattagtgggaatggccacgcctcaatatctccttgctttcttgacttatcaataattttatgtaatgcactaccctgtctattaggtggtgctgtaggattaagtctcatagtgggcggctgagggtatggcgccctgccctgtggtgctgggagcattcctggatgtccatactgactttctgggggtggccgatactgaaattcagccggcagccagtattgataagctactggtggttgggtcttattttctctaacctgtgtttgaggttgtaatgttacgggcatctgacctgctggaagaggacttgtccctcgtggtttagactctgatggccccactaattctggacctttttcttctaattttaacgtttcagggtatatcacctgctgtaattgattatagtcaacattttgcattgastgagccattaccagctctactgcatattcacaatgtaaactttccatttctttccgggatttcctccccgcctcttctttacaatctattacacagccttcaggggcatcagaaactgaaacgctatcttcttctgtttgaaatggttctaaagctgctttaataatggcccaatcattccatactgtaagtgggatgattttaccctccctacttgcttgttttaattctttgccaatttttttccaatcttttagatctaaagttccctattctggaaaccatgggcaaaattgttctattgttcaaaatagcttgatcagattttttgtaggtactctaactcccccgctttttaaaagaattttaataaagctgagataagaggcatatttacttttagttttacttttagtttgcctcattgttaccccggcttcttccaagcgcacaagcttaccgcaaggctgactgtagacgtactcgggatctcttgtggacttgtcctcaaygaccacamtcgagcgtaccttcaccctagagaaaagcacccacgttgggcaccagatgaaggggtgggttgcccctccacacctgtgggtgtttcttgttaggtggaatgagagacttggaaaagaaagagacacagagacaaagtatagagaaagaaataaggaggcccaggggaccggcgttcagcatacggagaatccaccccagcctctgagttcccttagtatttattgatcattattgggtgtttctcggagagggggatgtggcaggatcatcagataacagtggagagaaggtcagcagataaacacgtgaacaaaggtctctgcatcatagacaaggtaaagaattaagtgctgtgctttagatatgtatacacataaacatctcaatgccttaaagagcagtattgctgcccgcatgtcccacctccagccctaaggcggttttcccctatctcagtagatggaatcgggttttacaccgagacattccattgcccagggacaagcaggagacagatgccttcctcttgtctcaactgcaaagaggcatgccttcctcttttactaatcctcctcagcacagaccctttacgggtgtcgggctgggggacrgtcaggtctttcccttcccacgaggccatatttcagactatcacatggagagaaaccttggacaatacctggctttcctagacagaggtccctgtggccttccgcagtgtttgtgtcccygggtacttgagattagggagtggtgatgactcttaacgagcatgctgccttcaagcatctgttgaacaaagcacaccctgcacagcccttaatccatttaaccctgagttgacacagcacgtgtctcagggagcacagggttggggataaggttacagattaaaatggagtctcttatgtctactttctatacagacacattaacaatctgatctctctttcttttccccacaaccaagggcccagctcctaacawgcaggtgtcaccagagagaaatgcaccactgtgcccagcaccatagctctggctcagagagtttgcctgagaaagcagcagacagaaaacaraaggtgcgwgttgctcccgaaggaactgacttcatgtgcaacagagctcggagaagtccaaggctaagcacactctccagaacagtggaggttgtgctgaaaggcaactgggaggcgacggagagcctgggaggtgcgggctacactggaggccagcaagtctgccagagagaaacagaaaaaaagacaggtgggaagagctctcctggggtcagaacaaagcttaatatcttctttgacaaagaacgtaacatcaaaatagccaactatgggtttagttcaacatttgcaaagagagacaacactgaaaagggaacgtttgatgggactctcccttatgcaggcccagaactcttcttgggccatgggtaccaatgccctgccatcaacgtttggagccttggcatcatcgtatgcaaaatggtggctggggccctgccattttatgagcagaactgtaaggatatactgaaaaaaaaaaaattaaaatagtatgctacttttttattcattttatggaaaaaaatatttaaaaattcttcacactcaaccccagggagcagctcccactggaccagctgttgaggaactcctgggtcaatagtgaccagaagacatgattcaagccatacagagagccactcctggactacccaggccccccaacaacccagctcatagtggccatgggattctaggaagaacatatcgaggaagtgatattaaaaaaatatatgatcatcccatggccacctacctaatcatggagttcagaaaagtgcagaggagaaagggctccaacatcggagcacaatccctccctcccggggatcccatctgtccttccccatctgccacagttaagtcaaccttccctgtccaacccagaagaggactcaaaaccagccgacctttcccactttctaattcacagaagcatgaacaccatcctgggagttagggcagaaccctacttggcctggagatgaagccagccattcccagcaaagccccccagcataagtctgtggcttcaccctccccagagcaccagcagccatggggaaaacctgaaggatccttgtctctgggaacccactgggaagtcggctcgctccatgtggaagacccagaagaggtggcttggtctgagggaacccccgggaagctggatggtataacctcaatctctgtgactaaaaggagccatggctaccatgggcaaaagatgtttcagtttcatgctgcaattatgttgtttctgactagcacaaaaaagtcaaagggagaaataaggcagcaccagtgaacccaatggacagctgggcccagacaaaaaccaagtgggtggggcagtcaagctacacttcctgtgttttattacatttattatgttcttcttaatattattttaattggcaaatcatgcttgtattcatttataagatacagtgcggggattagatagatgtgtgcaccatggaatgacaaaatcacactacatagtatctgcatcacctcagaaagacacattccacgtgatgtccctgaagtgtccatctaaaaaagttgacctcatagaaatagcgagtgggtcgatggtgaacgatggctgggastggtgtgtggaggggtggcagagggaagaaatgggggcttgtcggtcaaaaaaccacagtctcagttggaaaggaggaagaggttttgacatctagtgcacagcagggtgaccagagtcaatgagaatgtgttgcatatggcaaaacacctgagagggtccatgtcgaatcctggcattcagaatggagaaaataaaggccctgaggttcaagaacattaaaaaccttgtgacaggttgaccacgtgtagacttcaacggctgtgggtgagaactgggcaagatgccgatgctgccatttgcccagcacmtctggcccagaggcattcagcagaggacgcagatgtccaagctgctaccagggtcagtggaacaggattcaaaagtcaagagggcatctggcaaccctgtggcctccaaaggcctatcaaaagctataggtgagctgaagggcagcctagagactcctggagaccagagggcccctccaccccacctggcccggagcaccatctcttcctcctgtctgtcccctgcttcctctgtcctgccatctcccccttcctccaccctcagctccctgcagtcctctctccacctttccaaggtagaygcagcttgctgctctgctgtcctgagtccscactaagactgtggtttctggtccctgctgacctctgggacttgatttccctggccttttgccccacctcctttctgtttgtcccagccccacccccaactccctctcccccagctcctcctctgctattcctaatcccctcatcctgattgcttttttgctacattttctctagctaaatcatcttttatttacttgctaataatctatccatgggtcccctggaagtctgtcttgtgctacatacaatgatgaaaatctagggcccggtgtggtggctcaygcctgtaatcccagcactttgggaggccragrcgggcggatcacgaggtcaggagatygagaccatcctggctaacacrgtgaaaccccgtctctactaaaaatacaaaaaattagccgggcgtggtggcgggcgcctgtagtcccagctactcaggaggctgaggcaggagaatggcatgaacccrggaggtggagcttgcagtgagtggagatcctgccactgtactccagcctgggcgacagagcgaaactccgtctaaaaaaraaaaaaagaaaagaaaagaaaagaaaatctaggccgggtgctgtggctcacgcctgtaatcccagcactttgggaggccgaggcaggcagatcacaaggtcagggatttgagatcagtccgaccaacatgatgaaacctcgtctctactaaaaatacaaaaattagccgggtttgatggcgcatgcctgtaatcccagctattcaggaggctgaggcaggagaatcgtgtagacctgggaggcggatgttgcagtgagctgagattgtgccactgcactccagcctgggcaaaagagctagactccatctcaaaaaaaaaaaaaggaaagaaaatctggaaactgtaatttaactcctggccctagacaggactcargttttgtgaaagggaggaagaaaaaaaaagcaaaccccaccaaaccaacacctagtctaaagcctgatataaatgccattcaaaacatgtttcctcctttattctttttttttttttttttttgagacagagtctcgctctgtcacccaggctggggtgtagtggcgcaacctcagctcactgcaacctctgcctcctgggttcaagccattctcctccctcagcctcccagtcgctgggattacaggcacctaccatcatgcctggctacttttgtttttttgaatttttcgtagagatggggtttcaccatgttggccaggctgatctcaaacttccatcctcaagagatctgcctgcatcagcctcccaaagtgctgggattacaggcgtgagccactgcgcctggcctccttcctttattcttcaataaccaraaaattcttcctgaaaaaggtggcccctgagaccatttggaagcatcacaggggggaggggcaagggtcctgcgagctggtcttgccatcccttgtcccccagtttacatgaagccgagtttacatgaagccaagctccaragaagaggcagggcctgtggrgcatttggattacactccaagtctaattcccagtccagcaatcctgcccccagaggcttccttcatctttccacttagccaaggaaggagcaggtcagctcatgccccctgcctggatgcagacaacaaccatcagaaggccatccgtgtagccggggccccagaacaatgtctggaaatggctcaaggagctgaagccctttagcctcaagaagagcatgagggacccagcacccttctgaaacctaaactacattctggcctgagccattttgcactgtctgtgccctagaaagctgtgaaggcctgtaagtgggtcttcctgtttccctgtcttctgaggcccaggcctttcttagagcttccgtgggtcccacccttacacrcatcacaccgtgtctgggctctgcctgcctggcttacactccctacccccaaccactgccctatttccacccccgggacatcctgctgggcactgctgttccctctcttagaagattttcacaggtcctgcccttcccttttgccaattgatatcatttggctgtgtccccacccaaatctcaacttggattgtatctcccagaattcccatgtgttgtgggagggactcaggaggaggtaattgaatcatgggggccatgatttcccaagctattctcatgatagtgaataagtctcatgagatgtgatgggtttatcaggggtttccgcttttgcttctttctcattttctcctgctgccaccacgtaagaagtactttttgcctcctgccatgattctgaggcctccccagacatgtggaattgtaagtccaattaaacctcttttccttcccagtctcaggtatatttttatcagctgaatgaaacagactaatacaccaatcaagtgaatgtcacctcctcagagaaaccctccctgagcaccccatctgcagtagggtcaccccatcttccaccttcacttttcctggtgtttccttcttagcccctatttccatggggagtctttgctctgacagactagtctccctcacccacccggggccagcctgtctgtcttctctgtccctgtacatgggagatgatcaatgttcatttgttggcatcagtaaaacaggaaggcccctgaggtgcaaggattggaagcccttccccccaggtgaggaaagagccttgaggcagggtagaggacccgagttagtgccctctccctaccccgagggtcagccctgggcaggacgggccacggccccttggggcacctgttgcctgtgcccttgatgggtggcctgcaggggacgtggccgcacttggtcagtggtggttctrggkcagccacattcaggtgggcagcattttaggaaggacaaactccaaaacccaggctccaaaggatccacgggaaggtcgagaggctcaggggagtgtcctggtggctgggccagcgctttgaggcccctggggaaccagcagagagggcctgcgtgaggcatctggaggctctgagcacctctggaatcccagcgacctgcagaggttgcccgtctctgtgggggcagcagcgcctgaagggaggtggccatagcagcccacaggggcccaggrctgacsagctctgccttgggtgccaaggctgggcagggcctgtgcccttgggagtcctgtttcagacccacytcaaccacatggccctgccctcatcttatttgcctggacagcaaggcctgcagaaactgatttgctcatccaatttggggawcctgagctccctgctgggcaagcctgatggtttcacagctgcccatgatggtttcctcggcaacttcaaatcagactctgctccttagttgccagcacctttactaaagaaggtgggggcggtgggcagaaagcatgggggtgtcgtgtcatggtgacaggtgtaaggagmargcaaagagttttccacttccattgatggtagcagtggcggccacctgacccagggcaccatctcttcctcctgtttgtcccctgcttcctctgccctgccacctcccccttcctccccaatgaggtcactgcagttctctctccacctttccaagatagatgcaggttgctgctctcctgaggtccccactaaggctgtggcttctgatccccgctgatctcttggattttatttccctggccccctcccccacctcctttctatttgtcccacccccatccccaccttcctctgccattcctaatcctcccatcctgattcctcttctaggttttctctggctaaattatctttttttttttttttagtagagacggggtttcaccgtgttagccaagatggtctcgatctcctgacctcatgatccgcccgcctcggcctcccaaagtgctgrgattacaagcgtgagccattgtgcccggcctttctttttttcttttttttttttttttttgagatggagtctcattcagtcccccaggttggagtgcagtcgtgcattatcagctcactgcaacctccagctcccaggctcaagccattctcttgcctcagcctcctaagtagctgggactacaggcaagcaccaccacacctggctaatttttgtatttttggtagagaaagggtttcactatgttggccatggtgaaccgggtgatctgcccgcctctgcctccca

SEQ ID NO: 9926 - DNA, 19313 bp, Homo sapiens
  misc_feature (1)..(2990): n is a, c, g, or t
  misc_feature (6495)..(6989): n is a, c, g, or t
  misc_feature (10848)..(10867): n is a, c, g, or t
  misc_feature (16184)..(16326): n is a, c, g, or t
nnnnnnnnnnnnnnnnnnnnnnnnnnnnnnnnnnnnnnnnnnnnnnnnnnnnnnnnnnnnnnnnnnnnnnnnnnnnnnnnnnnnnnnnnnnnnnnnnnnnnnnnnnnnnnnnnnnnnnnnnnnnnnnnnnnnnnnnnnnnnnnnnnnnnnnnnnnnnnnnnnnnnnnnnnnnnnnnnnnnnnnnnnnnnnnnnnnnnnnnnnnnnnnnnnnnnnnnnnnnnnnnnnnnnnnnnnnnnnnnnnnnnnnnnnnnnnnnnnnnnnnnnnnnnnnnnnnnnnnnnnnnnnnnnnnnnnnnnnnnnnnnnnnnnnnnnnnnnnnnnnnnnnnnnnnnnnnnnnnnnnnnnnnnnnnnnnnnnnnnnnnnnnnnnnnnnnnnnnnnnnnnnnnnnnnnnnnnnnnnnnnnnnnnnnnnnnnnnnnnnnnnnnnnnnnnnnnnnnnnnnnnnnnnnnnnnnnnnnnnnnnnnnnnnnnnnnnnnnnnnnnnnnnnnnnnnnnnnnnnnnnnnnnnnnnnnnnnnnnnnnnnnnnnnnnnnnnnnnnnnnnnnnnnnnnnnnnnnnnnnnnnnnnnnnnnnnnnnnnnnnnnnnnnnnnnnnnnnnnnnnnnnnnnnnnnnnnnnnnnnnnnnnnnnnnnnnnnnnnnnnnnnnnnnnnnnnnnnnnnnnnnnnnnnnnnnnnnnnnnnnnnnnnnnnnnnnnnnnnnnnnnnnnnnnnnnnnnnnnnnnnnnnnnnnnnnnnnnnnnnnnnnnnnnnnnnnnnnnnnnnnnnnnnnnnnnnnnnnnnnnnnnnnnnnnnnnnnnnnnnnnnnnnnnnnnnnnnnnnnnnnnnnnnnnnnnnnnnnnnnnnnnnnnnnnnnnnnnnnnnnnnnnnnnnnnnnnnnnnnnnnnnnnnnnnnnnnnnnnnnnnnnnnnnnnnnnnnnnnnnnnnnnnnnnnnnnnnnnnnnnnnnnnnnnnnnnnnnnnnnnnnnnnnnnnnnnnnnnnnnnnnnnnnnnnnnnnnnnnnnnnnnnnnnnnnnnnnnnnnnnnnnnnnnnnnnnnnnnnnnnnnnnnnnnnnnnnnnnnnnnnnnnnnnnnnnnnnnnnnnnnnnnnnnnnnnnnnnnnnnnnnnnnnnnnnnnnnnnnnnnnnnnnnnnnnnnnnnnnnnnnnnnnnnnnnnnnnnnnnnnnnnnnnnnnnnnnnnnnnnnnnnnnnnnnnnnnnnnnnnnnnnnnnnnnnnnnnnnnnnnnnnnnnnnnnnnnnnnnnnnnnnnnnnnnnnnnnnnnnnnnnnnnnnnnnnnnnnnnnnnnnnnnnnnnnnnnnnnnnnnnnnnnnnnnnnnnnnnnnnnnnnnnnnnnnnnnnnnnnnnnnnnnnnnnnnnnnnnnnnnnnnnnnnnnnnnnnnnnnnnnnnnnnnnnnnnnnnnnnnnnnnnnnnnnnnnnnnnnnnnnnnnnnnnnnnnnnnnnnnnnnnnnnnnnnnnnnnnnnnnnnnnnnnnnnnnnnnnnnnnnnnnnnnnnnnnnnnnnnnnnnnnnnnnnnnnnnnnnnnnnnnnnnnnnnnnnnnnnnnnnnnnnnnnnnnnnnnnnnnnnnnnnnnnnnnnnnnnnnnnnnnnnnnnnnnnnnnnnnnnnnnnnnnnnnnnnnnnnnnnnnnnnnnnnnnnnnnnnnnnnnnnnnnnnnnnnnnnnnnnnnnnnnnnnnnnnnnnnnnnnnnnnnnnnnnnnnnnnnnnnnnnnnnnnnnnnnnnnnnnnnnnnnnnnnnnnnnnnnnnnnnnnnnnnnnnnnnnnnnnnnnnnnnnnnnnnnnnnnnnnnnnnnnnnnnnnnnnnnnnnnnnnnnnnnnnnnnnnnnnnnnnnnnnnnnnnnnnnnnnnnnnnnnnnnnnnnnnnnnnnnnnnnnnnnnnnnnnnnnnnnnnnnnnnnnnnnnnnnnnnnnnnnnnnnnnnnnnnnnnnnnnnnnnnnnnnnnnnnnnnnnnnnnnnnnnnnnnnnnnnnnnnnnnnnnnnnnnnnnnnnnnnnnnnnnnnnnnnnnnnnnnnnnnnnnnnnnnnnnnnnnnnnnnnnnnnnnnnnnnnnnnnnnnnnnnnnnnnnnnnnnnnnnnnnnnnnnnnnnnnnnnnnnnnnnnnnnnnnnnnnnnnnnnnnnnnnnnnnnnnnnnnnnnnnnnnnnnnnnnnnnnnnnnnnnnnnnnnnnnnnnnnnnnnnnnnnnnnnnnnnnnnnnnnnnnnnnnnnnnnnnnnnnnnnnnnnnnnnnnnnnnnnnnnnnnnnnnnnnnnnnnnnnnnnnnnnnnnnnnnnnnnnnnnnnnnnnnnnnnnnnnnnnnnnnnnnnnnnnnnnnnnnnnnnnnnnnnnnnnnnnnnnnnnnnnnnnnnnnnnnnnnnnnnnnnnnnnnnnnnnnnnnnnnnnnnnnnnnnnnnnnnnnnnnnnnnnnnnnnnnnnnnnnnnnnnnnnnnnnnnnnnnnnnnnnnnnnnnnnnnnnnnnnnnnnnnnnnnnnnnnnnnnnnnnnnnnnnnnnnnnnnnnnnnnnnnnnnnnnnnnnnnnnnnnnnnnnnnnnnnnnnnnnnnnnnnnnnnnnnnnnnnnnnnnnnnnnnnnnnnnnnnnnnnnnnnnnnnnnnnnnnnnnnnnnnnnnnnnnnnnnnnnnnnnnnnnnnnnnnnnnnnnnnnnnnnnnnnnnnnnnnnnnnnnnnnnnnnnnnnnnnnnnnnnnnnnnnnnnnnnnnnnnnnnnnnnnnnnnnnnnnnnnnnnnnnnnnnnnnnnnnnnnnnnnnnnnnnnnnnnnnnnnnnnnnnnnnnnnnnnnnnnnnnnnnnnnnnnnnnnnnnnnnnnnnnnnnnnnnnnnnnnnnnnnnnnnnnnnnnnnnnnnnnnnnnnnnnnnnnnnnnnnnnnnnnnnnnnnnnnnnnnnnnnnnnnnnnnnnnnnnnnnnnnnnnnnnnnnnnnnnnnnnnnnnnnnnnnnnnnnnnnnnnnnnnnnnnnnnnnnnnnnnnnnnnnnnnnnnnnnnnnnnnnnnnnnnnnnnnnnnnnnagcttcctgaggcttcaccagaagcccagcagatgccagtgccacacttcctgtagagcctgcagaaccgcgagccagtgaaacctcttttctttgtatattacccagccttggctatctctccattttaggcaatgcaagaatggcctaacacccccttctatgagtaagacatcatgccaagagacttgggatgcatacacatgaaggccggtcttgccataatcttgtgaaggacacacacacacacacacacacacacacacacacacacacagacatacacacacacacacacacaactaactgaaggaaccaaggctgcagtgagatgctggtggtcctctgggattgcagactcatccatacaactgcccactcaacgtgttcacagaaatgagcccacactgaagtatcttactggggcaactgctcaccttccatcaccacacagggaacaccaggctccacccagtcacccgaagcagacacatcagtgtccaccttgacttgtccatctcacctactccatccccgaatccactccactaactgagcatgtacaatccactcacttcccctacctctgggccactatcctagttcagacttctgtgatgtctaacctactataaatgcaacagcctctaaaagatccctgtcccctagccttacaccatgccaactggtctccgtagttgcaatcaaagtgcttaaaacaagcaaaagggtgtacatgtcactatgctgcctacatttcttcaagagggcctctccagccttattttccacacctcctcttatactccgtgatccagccatcctaaacaccttttaattcttgaaatgttccacattaccttttgacgcttggaagtcttctatccraaactggattccctaaccgctctttatctctttgcccagtgagttcctgttcattctctggtcgccattccctcttggtattcctccctaacctctttaagcttgccaggttcagtggttatgctggacatttttgcttttagggctacccacagcccaagcttccttctatttagtaggactcctttgaggtgtgggtctttgcragggataaagaccatctctctccatctctctgctccctgacaactacagtggcttggcaaaaaaggtcacaaagatgcaggagcaataagagatttttcagtggtagaagagagtcaacagtccagcaacagaggtggcagtttctccagtggcaatgtcaccagcaacaaaattctaggcaggctatttacgtgatattgccttggatgtggccccagccagccagcctcttttggttgctgcctattttctgaatccagttccccagccttcccatcaattctgaaagccatctatagccttccaataaattccttttctgcttaagtcagccaagtccattgccatggttgacaaccaagaatcatgaatggcactgtgacactctgtgggcaggccatcagactgcactgccaatgygcatttgcttgtctatattccccactatcttgttcatcattttactctagtgcaatggctggcacaaagcaagcatgcggtaaatgtttcctgaatgcattacttaattccactagtcatcagagttggaaagcaaggaaaacgctcagtggaggacyacagtgcattcctaaaaaaccaatctcaactacagtcgaaagagtcacaactatcaattagaaacatacagcttaatttattcgcctattcatagatttagaaactaggcttcttctcactatctgggatacaaaccaccttcttaaaggagatgagaaagagaagaatcaaactaggagagtatattttattaagattagcgagttctactctaataaaacaaacctaatcggaatgaatgttggggaaaatgtcccttcaaccaggtgaatacccactagtccttgagacctatctcaaatcacatatcctgcaagaagctytcaccactccccaccatcaatcagccgtaacttccactgtgctcccacatctctattttagtaagcagaaaaaggtattatatatatttatttatgtgtctattcaaccagatctcaaaatcctctagggaagtatattactatttccarcacctagaagggtgtttggcataaagcaagaaccagtgtttttgaagtggagccactttgctctgcttaaaaggtaccaatggaactgtcctattgtttgcaacttttctgtaaatcttaatttattccgaaataaagtttaaaaaaaaatgcaccagtagcaactgtgttgtgagcaattatcacacctgccttacatgtcaygcaagaagaaagctttaccttktaccagtagcagtaattttgtatatagcaaagtgagtctcagtttgtaaaaagggaataattcctactacacaagattgctgtactaaatgaagcacagtgagtatgccaaatgacatataagctcttcttaataaggttctgatgagtatatgttagggcccctgtctacagtgttctaaatggaccagcacttcaccacaaaacagatacatactacgactaggatgtcaccaggcatagactgcaaagctgtaactcaaatcactattaagactgtaattacttataaaagtattctacatgtgtgtccacggatgtgrgatgtcctattccaaaactccccaatgaaataaatggctactcaaaacccagcgcaaccgacagaggtcagcggccactgcaccccgcctccaccagcttaaactccagaaggaggccaagcacccagggcgtgctagctggctggaaagaggtgagcatctactgagaaacccactgctgcccgcagcggtgtcaggcagccgcgggtctccccgcagtggcgcaaagcgagctgaagtcgggaatggctaggacccttcgctgccaccgcggtgctttcggccaccgcacttgtgtgccctccgcccgcccacaccagcgtcgcttaacggaagaaggcgcgagtagcagcggcgcagccagggcacctgggggtgacacgagagtgggcgggcggtccagggagcccctgcwggaaaccagacgctaaagcttgcagctgtgcagctaggggagcatctgttttccacttgagagcaacccgggcacgcgagaacagcccgatttcggtgcaggggtgcgtcccgaaggaacgggggactgttactgcgcggacaggcggacccggcaggggaaaccgaggccacgctaggtccgcagccccgaggtgtccacaagagctccgctcgcgcaagggcgcggagcgaggctgcccgcgggaccggcctgcggagcgagcgggtgagagggcagggcggcagcgggggcctgggggaggagggcggcgaggcagcgtgagcgaacgagcgagggtgtgtgtccgggcgtgagtctgggcgggtgtcgggaaggaaggcgacagggagggnnnnnnnnnnnnnnnnnnnnnnnnnnnnnnnnnnnnnnnnnnnnnnnnnnnnnnnnnnnnnnnnnnnnnnnnnnnnnnnnnnnnnnnnnnnnnnnnnnnnnnnnnnnnnnnnnnnnnnnnnnnnnnnnnnnnnnnnnnnnnnnnnnnnnnnnnnnnnnnnnnnnnnnnnnnnnnnnnnnnnnnnnnnnnnnnnnnnnnnnnnnnnnnnnnnnnnnnnnnnnnnnnnnnnnnnnnnnnnnnnnnnnnnnnnnnnnnnnnnnnnnnnnnnnnnnnnnnnnnnnnnnnnnnnnnnnnnnnnnnnnnnnnnnnnnnnnnnnnnnnnnnnnnnnnnnnnnnnnnnnnnnnnnnnnnnnnnnnnnnnnnnnnnnnnnnnnnnnnnnnnnnnnnnnnnnnnnnnnnnnnnnnnnnnnnnnnnnnnnnnnnnnnnnnnnnnnnnnnnnnnnnnnnnnnnnnnnnnnnnnnnnnnnnnnnnnnnnnnnnnnnnnnnnnnnnnnngagaaagagcgaagggcccagacggggctctgggcgcccagccgcccggcttcgagccctcaagccaccgcccccaggccccgcgctgacgctggacggtccccgcctccaaaccccccgccccggccagagaataacttacctgtttggcgacggaatcgctcctgctcgcccctctgactgactcctccggctcaccgtcttccctttgggaggaagaggcgggacatcctgtttctccgtygaaggacttccggtggcttccaaggcgactccgtagtggatgcagcgccggacgccacagccgaaaaacagaatcttggaactggtttagtacaatccaggtcgagttccttgttttttatccgagtggccggcaggcccatgtgctgtcttgtttttaacacatcagctcttgccggaagccgctaagagataaaataggaagtcccacccttcccttagagaaggaaaacggagagccgaaggagtcaatctaaattcgatgagcgcgtcgggctccaaggcaggcgctgtcagcccgggagggctgtctgggatttctagagggtcccagaacgggttcttcccaggccgatcccgcctgcttcctgccccgtctctccacccgcctcccgccctctgtaagggaccccgagggcggcgccggaaacacggagaaggcccagaacggcgcgggacccgagaggcctacgttggcaaacgcagcccgctgcccctttgctcgcttcccccgggcctggagtggctcctgtcgcttctggcgctccgatttcgagaaatgactttcagctgtgcaaggcgagaatgctactttagatratgagaaaaaatctctcgaatggctcccaaaatgaggtccttgtttaagaggccacaggaagccgcyagccgaackctgataccamagaggaggccaagaagcggactgtggcttggtgacctgtttggtattgccaaattttcagcttttattaaagctgaaacaccttggctgtttaaaacgttcgacaaggacttttttatgaacgttaacggcacagcatacgggttttttggaaaaaaaaaaaaaaaaggcaggacttcagcccgtccgcccccttgtgcaggtccattcatgaacctcgagttagaggcctttcttctgaaactcagaatctagtagggaagacctgtgtagacgaataaaaataaatacatcacagcttgttaagtgctgtgacaaagaggcagtgaaatcctgcttgaggtcatctgccttgctaaagaggtttgactatgttgtaggcacagggttagggttagactctgtaatgggaagttatgtgatcagatttctgtttaggaagatcactggccaggcggggtggcttacgcctgtaatcccaatactttgggaggccgagtcggtggattgcttgaggctaggattttgagaccagcctggggaaaccgcgtctctactaaaaatttgaaattagccaggcatggtggtgcgagsctgtaattccagctacttggaggctgaggcgggagaatagcttgaacccagtggcggaggctgcagtgagccgagattgcgccactgcactccagcctgggcgacagagcgagattccrtctcaaaaaaatcattgtaagtaattggatttttgtgtgtgtgtgatgttctgaagataggctttctaggccaaatcgtcactcaaggcyaattcgaacacaattcagtttaaatcagaatacattcgagtgataattccttacctttttaaatagttcatagaaaactttttgtagacattatctggtttaattctgattgtaatccacatgaattctcttatccacagtaaggaacagtaatttagaagactaataaactgttccaagatcacacagctagtaaaagtggaactcaacctaaaactccagagtcaagcttttccatcatgtagactcagtttaatagtaatagttaattaaaaattctagagaaaaatgtgggaaacaatttcctcacaagtgaccagctgcaaatgttatttgtattccattaaccaacatttattgggtgcctgttatataaaagataaaactgggttctgccttcaaagagttcacttgaaatttaaaatttatgtgaaaatttagcacttcctacagtgttttaatagctatttcaacagtgttggtgttgtatgacaaggtgataaatttcttgacaataacaatagcacaattctgtatatggattgggcattctgtgatctttgggtgatttatcttgctacctttcttaccttgggggtttagttaacacttatgttcctcccctgagcagtgaagtaaaatctaagtttatgtttcagttctattttgagtattttgagttactaagacaggaccttaaggaagtcagtttgacctcatttccaactgagagagtccatagatgtcattcaagactaattttctgattctaaggaaaaagggaagtctttttttttcttcctctctttatttttgaatgaataatgcttgacatggacaacacagacttttagtgaagacagagagtcctagtgatgaaaccacctttgcaaaaattacaactgagaaaattatgacagtgaaagagatctgacctaaccaattccatcttgcttctaaactctgtccttgttcattcctgggcataggcagaactaactctggaaggaacttagtttatagtgtaactttgaaacaaagatgataacagctcattctgaaaacaaacccctttctggcctggggaccagactgcctttttagggctagcaaattagccacaagattagaaattacagtttaggaataatgcagctagaggccacaagattctaaacctccccaattgttcctaaggataatatcactattgtaaaacccaagattggtgcttaagatgtttttcagaccccgcactcatggatcagctggcatcactcagatggataaactggctcatctagtcctgtagcccccacccaagaactgactcagtgcaagaggacagtttcaactccctatgatttcatgtcacaccagagccatcaattctccccgctccctggtctcctactcccccaaattatcctttaaaaatcccagtctctgaattttcaggagactgctttaagtaataataaaactctggtctcctgtttagccagctctgtgtgaattaaactctttattgcaattcctttgtcttgrtgaatccactgtctgggcagcgggcaagatgaacccgttgggtggttacaatgacaccaggaacccctgggatcaagacttgctcgaagccagccacacttgagacctgttaaccaaaaaaaaaaaaaaaaatccttttcttatttaagtccagttttcttttacttgcatcatgaagcaacctaaatgataacagaagttttattgccaaatataccagttacagtcttaagaaagtcgcaaaggaaaaactcagagcaaagattttcagtcttcataagttcaaaatgtatacttttatcatgtctgagaaaagaaagcaatcaatatattcacatctttttctgggtatatgtgatatttttccattggataatgaatagtaaacacttttacaatagcaagttgacaaaatgagaatgtataaaagaaattaaaatatatcaactattaaataaatgccaggcattatgcaacaaaccttatatgcattatttcaaataattattataactactctgaatagacacattatttccattttacagatgagaaaaatgaggttcaaagaagtgatgtnnnnnnnnnnnnnnnnnnnngatgtcatgttctctgattctgtctatattggatacctggtgacgatctccccctgtctaataccctaaacatacgttcacctgcatgctgcttctgttctggacctttgcgctggatgtagtcccaacagagtggcttgctgggaggagggagatacttttcagataaggcactagcacttcatcctaacaacttctccatactgaggcaacatttttaaatacacagagaatgcctaggattcaattgttgagaaaaattgatgtaagtctgtttgtctcaaagaaagctatcaggaactacagttttattaacctaaatgwacacctggtttgatgatgactatgtaaatgtatttttagctaattaatttattatttctgcccatcagccaacgagtggataaagaaaatgtgatatatatgcactatggaatactaagccataagaaggaatgaaataatggcatttgcagcaacctagatggagttggagaccattattctaagtgaagtaactcaagaatggaaaaccaaatattgtatgttctcactcgtaagtgggagctaagctgcgaagatgcaaaggcataagaatgatatagtggactttgaggactcaagggttgaaggatgagactacacattgggtacagtgtgcactgcttgggtgatgagtgcaccaaaatctcagaactcaccactgaagaacttccccatgtaaccaaaaaccacctgttccacagaaactatcgaaataacayttttaaaactttactatttctgaataaaatttacatrcatttctcagaaaaaaaaatatttggaattgaggtatctaatagagaactgagttaaattattgccacttaaaaacacaaagtgatatagccactttrtgaattaatcagtcagcagtggctaggttatgcttagtggtttataaccaaatcttagtttataacaacaaatgtgtattgttaattcccactacaagtttataacgacattgctggatgctacactccatgtctctttgtgggacccaggctyatgggacttctgttayctgcattagagagagagaagacaacaaaatatgcactggttcttgaagctttggcccagaagtaaaatatgtcttttacctgttcacattgcattgggccagggcaattatcatggctgcaagtaacttcaaaaggatggggaagtgcgatcttggcatgtgtcrgaagaaatgaaaacatttggtgaagagcattaatgactgtctttacaggaaaaaagcaatcaaatagacatgattkcttgtttcagtttcatcatttcctactgtgttacctaaactttytgagccccagtttcttattactaaaataaaataawgataaagatgatattcacttcaaggactttgtgttaactagggtaaaaaaattgaaaactgtagtaagttwtgcaaattagaaatgtataatattactgctttgaaagtgatggtgaaatgtagaataattggaaggataacacaaagcacttataccaggaggcttttagctgcagataatagaaatgaacctccactactttaatcaataaaaaagtgtatcagctcacaaatttgtcatccagacataaaggaggcttcagaatttattgactcaggagttgaatgttggtatcaaggacctagatttttctcatcactctgcacttcaattctcaatgccctattgaacatcaggctgtagtaagatggctagagtgattccagggataacatctagagataaaaargagaactccttttcttatgatttttttcttaagagaaamggaatttcccaaaagcccccagcaarcatgccttcacatcccatggccagaagtggctcacatgtgtaccctgagctaagcactgcagacaggaatggaatcgcctgtaggcctcagagaccacctggatcttgggaaggtgtcagctctacctgtggcacttggctgagtgggaaagggatggaaacatgaataaagtaagaattaggaaggaaaaggagaaatggatccagggtatgaagccaatagtttagttatctcaacaaatatgattgatttcatctttatgaatktgatkayctaatttaatacattcaatcaatgaagtaaaaaaaagtgcaaggacaatatgacatctgtcattctctgttgagatttgagaggtaataataccaagaacgtgtggtgacctgggtcctcactgctactgtcttcctgtacctggacacttctagcaagagacttcaayttcagaacaaagaggatcccaacttgtagctgcattatacacaccccagcagcacacataagttgatttctaattattcctctttaagaaattgtttgtggaatatttatctatttataaatggaaaaatagaaaattaaaataacaaaaataagtaacaccatgtattgagtgtctactgcgtgctaggcactgtgctaagtgttctgcatatattgtcattgtgctgccaacgactctgcaataaagatgttcccattcctactttacagctaaggaaaccaaggatctgagaaataacgtattttgcccaagattatccaactggtaaaatctggagtccaaatttgaaccagagtccattcaacacactttcacctctacaccagtgctttctgagtttgctgaacattagaatcacctcaggaacttaaaaaaaattcccaggtgataccccatagcaagtaaattagaaaatcgggcaggggaagaggaaccctggcatcagtactttttaaagtccccaggtacttacaatgtggaggaaagtttgggaaccactgtgctatattatgttgcctcttcagccaagaatgtaaaccagaatcttttcttccaaggccaagagcagtgaatgatagcttatggtatatactctcattcccaagtgatcctcytcctccaggagttctgctttaggctaactaatttcaagtttccctttcactacatttctcacccatctgaagctaaaaatgttacaggagacatgctgaatttgttgctttttctctgttatctctccttttcagagccgcctccccttactttacttcacctgctaaagtatccctgaactctgccttctggggttgaaagtgggattttaaataaactrtagatggcttcctttatttggttataattatttaaaatttgaaggaagcattggtcatttttggtgactagtcatttttgatgactaagtgtcatttaaagtttcatttcctttaaattaacattttttgtcattccattcaartgcctacttacaatggcaataagaatatgctatgaacacttaaccacccacactagaattttaaatctaagttcttctcgaatgctgttttggtgaatttcagtgtgggaggtgagatgatttaaagcttcagattttctgttatagtcaaaggcataatttatctgacatcttttttcattctgcmtaaggaattacactagaataatgtttttaaataaaatttgtccacataatgacatttttttcaattctatccaaactaaaatagctccaaagcgtttacttatcataactgttaagaaattatacttgccaggcatggtagctcaagcctgtaattccagcactttgggaggctgagatgggtgacctccacttgaggtcaggagttcgaaaccagcctggccaacatggtaaaaccccatctctactaaaaatacaaaaaaattagctgggtgtggtggcaggcgcctgtaatcccagctacttgggaggctgagccaggagaattgcttgaacctgggaggcggaggctgaagtgaaccgagatcacgccattgcactccagcctgggcaacaagagtgaaattccatctcaaaaaaaaaaaaagaaagaaagaaagaaaaagaaaagaaattattacacctgccatcacttctcttctacatcatgctaggaattaaaaagaatgcatmattttgttgcttcagaaaatctcctgcattcttgtctttgtattttatcaattgattagggctttggggagctgagcaaagtatagaacatatccaacccaacctctgccttacaagaacttacttcctaaagaagaaagctttctcaacatggtaaagaggaagataagtgctctgcaatacagaatgtagatgttacatagttggtcagtggaagagcagaaggaatatgtgctaatgttaggacttggtttaagtttttcttcgttatgaaaggcagtagtattacagatcgttaacatagttatgctaggtctaaccatcgtacattaagatagaaacaagtgttttgtataatcaagatctcaaatcatgatttaattttttagccattacatgtacaattaatattcaaacttgatctgaaaaataacattaaaaataacagataacactgaattcatttaaaagtagacatttaaaatagtatagtacactttttttttttttaagagacaggatctccccatgttgcccaggctggtctcaaaactcctgggatcctcctgcctctgcctcccgaagtgctaggattacaggcaggatccaccacgcctggcccttaaaatagtatagtatactatctactaaactagattgtgtttaaaagtcacttggccctatcatgaaacagtttggggatttgtttttaagtgaaaacaactatccgtagaagtgagaagtcagataaaatagcatttgttttcttttgtgagctttctccttmctctgcttcttctaagaactttgktgagcatgtctaaatggtcagatgctgggcttcgtgctctcctcagcttagcttctcatcacctgcaggaatggcagagcagtgtcatctcactctgtcttctgattgctcaagaggaatcgtgtgtgtgtgtgtgaaagtgaaatcttccagttttgcaatgtcagcttcccattcaaaagtgcttaggacaccgtgaaagccacatcagcgggggtgagggagccagtgcagggctcccgggcttccagtttgtggcctctgaatgaaggtgtggcccctggtaagatacaagcactgctgggaagcctaacacatcgaacagttattagccattgacacctctgcatggcttgttttctgtgcttctccccagtactagctgctcccaagaaggtttcaaactaggaacaaggtgaagtggagagtataaagatgagagaagtccaggaagggnnnnnnnnnnnnnnnnnnnnnnnnnnnnnnnnnnnnnnnnnnnnnnnnnnnnnnnnnnnnnnnnnnnnnnnnnnnnnnnnnnnnnnnnnnnnnnnnnnnnnnnnnnnnnnnnnnnnnnnnnnnnnnnnnnnnnnnnnnnnnnngttgtaagggtgttgctggaggagggagagactctgagaaggctctgaggcagggaagctcttggatgtttgtgaaactgggaggatttgaaggatggggttgtcagggtgtatctagtgagggcagagcaagccagaagagtaagcagagagcaggttgagcaggacttgtagaccttcttgggatgtctgacttcatcctcagaccatgtcgccagttgagagctttaagcagggtgagagggacaagccagttgccgcatggcatgtacagtgagaggggctgtcgtgtaagcagtggctggttaggggcctctgcaataacccagcaaaactgaagagtgttggcttatgagctatgcgaggtgacagtggaactagaaggaagtggtggcttttgagaaacgggctggactggccctgatattgaattgcattggaaagagagggaagtgtggaagacgatgcagggctctgctatcaactagccgatggtccacttaccaaggtagggagcaccagaggggtaacagkctcgaggaatggatggaagttttcatactaggtgagtagagtttcagatgtgaaatgggcaggaagatgggtgggcctgattctcggaagagggggctgggttgggagtcatgggcatctggcgagtacaaaggccacggagttcccagcatgagtgtgaacagtgagaagtgtccgggagcaagccctcgggggagccctcgctcactcccttctcccagcagcaagtgcaaaggaacagtgtcactgaccagggctctcgcactgtctggcacacaatcaccgaagtttccaagccagtacattttatttttatgaatacaacataaagccagaaacattcccagcctcattgttttccagaaaagcatctaccaaactcaaatgatattcctaacccctaaacttatcacaatagttacgctttaatgcgctacgtctactaacaaagccagatacattgccctcctccaatacaacaaagtccccctgatgggcatgccacaatgtacgcccaactttactgggtgatcatttttgtccaagtgcatatatttcatcattaaaatgttaaaaaacaaatatttaaatttctcccttttttgcctccatatggctggttaatatatctgaataacaactgagtagctttcttttatccctttgagtacaaggagcttggaagatactcctttctgactcccacgtcagggtagggtctggatcaccacagggcttagaattgggtggaaaaacaggagggaagagctggggagaccagtcgtgaccctgggtgacagaaaaacatggactctgaactctggcaatccagggttggaatatcctagattctacaacttccataactattcattctcctccccttctctcctggcagcaacgtaataattgagacactgctggtctcagattcagcaggaatgaagatcagcgaatacatattgttgggtaacttcttaaatctgatggtacattagycagaaatgcttacagtgtattttataataaacttatgttaatggactaacatgaagactctaaatctctcttactgttagtccttatctacagtgccaaatgcatcaggtaggttcaacaaaatcgagaaacaccacgaaacyctgcataattagatgagmgcaaactacacttaatagcacaaaatatcaaacacctgctgctgttctttaacgatgacttgatattctatagaattggagatgtgatggcttgaagcctcctgcttccaaagaaaacactaactggaatccttcacaaatgcccacaactaggttgagctctcagttgggtccacttctatgactagagtcaaggtgaactgaatcactgcctgcctgctccagtccttttaaaggtggtacagcacgtttttaaactgacactgacatctcaagaaccaacagagtgatggaaaaaagttgaacgcaaatgtgttctgcttttttttttttttttttttttttggagacggagtctcactctgtcgcccaggctggagtgcagtggcatgatcccagttcactgcaacttccgcctcctgggttcaagcgattctcctgcctcagcctcccgagtagctgggactacaggcatgcaccaccatgcccagttaattttgtatattcagtagagacagggtttcaccatgttagccaggctgatctcgaactcccgacctcaggtgatccgcccacctcggcctccgaaagtgctgggattatgggcatgagccaccgcgcctggccctctgctttgtttttatttggagtcataatagaaaaaaattttaataagcccctaaatgattctccattaatgtgatttaaataataaattcataaagattgattttgtttatatacactcaactgtagaaaaatgactgtctttttttgttgtttacaccgtcaaatccaatcaagccaaacatgatggttaactaaaatgattaatgaatgcagcattagctgatggctttaaatttagcgtgtgttactgatgtcagggttgattagttctctatctaaaactgatgctattaaaagctttgagcaatttagatgttgtcattgagtaaaacttcaatggggtgagagaaattctatcaggataaattctgctctggtgcaacctgtgcacagatgttggatagagagagagtgggccttttctgatgggacaggaagaaggaacgggaggcagagaagctgacaaggtggcatcgatctcaggaaaggtaaagaagcttggaataaaaaaaaaaatactcatctttgcacaaggactcccaaatggcatatgggtatgaatattgatcatttcagcttcggaacttttcaagaagtgggaaaaaataaatgaaggggaggcaagaggttaatatagtaccatgccttagtaactcctctgaa

SEQ ID NO: 9927 - DNA, 14394 bp, Homo sapiens
acacacacacacacacacacacacacacacacccaccaccccgcggctccgcccccgacttccccacggaccgtcacttccggtctcccccaaacctgccaccgacggccacttccgtttccccgatagtatttggggatctcgaagcgatacttccggctccccccaggtccccaagctttacttttgtggggcacgacgagaaagtccgcagccccaaacagtgagtttctgagggcgagtcgggccggggccggcctakgtgggagggagccgagcaccccgaggagccgccaccgctgtcgcccgggggaccgtactacgcctgcgtgcgtcgcactacggatgcgtggacacttaagcatcgccccaccccctyccccctctggcggcgttcacgtctgtgcgcgcgctkgagcgctagaagattgaggtggctaccgtaaatgcctgaaaaacagtcaccagctgggactctaccactgcctcgagaggggctatggacggtcgtatggaccttggactttggagatgggggattatgccacattcatctatgtttaaatcttggcaggctgataatttcaggcggcactgtcctagccagctaaaactcttctccaccctattgccctcgctgcgccctttcttctgtgcctccggaagttactctttcagtaggcgtttgggggcggcactggtcaattttgttctcggttgcttggttgggctagatttcggttctgccgggtgggcgttttaagggctgtgggcgtcacattcgtcggtgtgtggccaaggggacatgacacgttttaggaaaagtaaacgtgctactaagttgcacgacttgtcaagaaaagaggcgcttccgagtttgagaattgggagcaaatggagtccgagtggacagaaagacaagaccctgaccgtggggaatttaaaggccggccagcgtgcttccgaaggccgggggtggaggcattacckcctctccgtgccctcttctcttaacctgccctgggccaagggcctcggccccgcgaaactgcgagtcctccagaaagacacatcgctgttggggtgtccaacctttctgggattcgtagtttatacccaggtcctggttatattttagttaagagttctaataagcagctgtttaatgagcacttgtgccagcccatatactacgggttttgtgtattattttaaaaagccttttaacgagcttttaacattttttaagtgagtacacttagacgaacataagtgtcagaattgacaaatccaggcctacaggactccagatcgagcacttgtactttactgccccaataaaaagctgttaacattttagcttatttttttgagagagggtctcgctttgtcgcccagsctggagtgcagtggcgcaatcacaactcactgtagcctctgcctcccgagcccaaccgatcttcccacctcagcctccctagtagggaccacagatgcacaccaccacacctggctaattttatttttatagagatggggtcttgctatgttgcccagcctggtcttgcagacttggcctcccaaagtgctgggattataggtgtgagctactgtgcctaaccacattttagctttttattacaaaaattttcggccgggcgcagtgactcacacttggraggatgaggcgggtggatcacgaggtcaggagttcaagaccagcctggccaaaatggtgaaaccccatctctactaaaaatacaaaaattagcctggcgtggtggcgggcgcctgtaatcccagctacttgggaggctgaggcagagaattgctttgaacccgggaggtggagattgcagtgagccaagatcgygccamtgcactccagcttgggcaacagaacgagactcccatctcaaaaaaaaaaaaaaaaaaatkcaaacattacaccaaaatagaacagtattaataaactctaatatactggtcacccaaattttgtttgttttttaactaaatcgcaagcctcagccctyggcaaattttttgtggcagtccatgggatataaatttatcaagctaggtgtggtggctcatgcctgtaatcccaacactttaggaggctaaggtgggccgactgcttgagctcaggagtttaataccagcctggggcaacatggtgaaactccgtgtctacaaaaaattagctaggcgtgatggcgtgcacctatacctcctactcgggaatcatctgagccggggaagtcaaagtcatgcctgggcgacagagtgagaccctgtcttaaaaataaataagtaaataaataatctatcgaggaagatccatctctcacagcattaactgctccagtcacttggtgctatccaaggacaacctatttggcaattcttactgcctattatttgagaacttattacccaccagaaactaagtgctttgcaaacattactattaattatagcaaatatatactttggamttaccatgtgcaagtctttgctaagggctttatgtgcattatttcatttaatcctrtaagattgatgatttgccaattttacagatgaaaaaacagacatagcagttaggggttggtggtgttttgtttgtttggagacagagtctctgtcgcccaagctggagtgcagtggcacaatcagggctcattgcagcctcgacatcccaggcycaagcaatcctccctcctcagcctccctagtagctgggactacaggcgtgtgccaccacatcggctaatttttgtaytttttgtagagacagagttttgccatgtagcccaggctggttttgaactcctgggctcaagccatccgcccaccttggcctctcaaagtgctgagattacaggcatgagctacctgccctgcctgtagttagggtttggacacattctgcctgacaccaacatctatcctctctaacagccagattacatagcctctttgtagtaataaatgttgagtgaatgtgtcagtgaacactgccagggtatacatatttttctaattgtaaactaaagagagcaatccaccgtgccccagcacctgcatcatacctgttctaaagcatttaccaagttgtattgcaatggtttgtctacacagctagttttccctctaacgacttcttcaagatcaggggctatgtcttattcgtttttttatgtccccggggattagctagttcttgggaaacaactgggacttgggattcaaaacagtttgctaagtgaatgaatgagaggcccagtcaagctacttcccttcagtgctgcacagtgcaacaaataaccagctcagatacaggttcaaagaccacaggcttctccctggacagctcagctctcctcataactcctgagaaaccctggacatgccagggtgtactatggagtggttgcatccggaagagggggaggaagtcccaaacactaagtaatccaggtttgggttggaaaacaaggttgaagttactcattagcaggtgaaagggtcaagggtcgaacgcaagggagctgaaagcagagtggactgagcagccagtaggggagagagcagttaaggcacacagagcaccagctccctcctgcctgaagatgttccaccaaatttgggcagctctgctctacttctatggtattatccttaactccatctaccagtgccctgagcacagtcaactgacaactctgggcgtggatgggaaggaggtatggactgagattrggggaagcctatggtggaggctctgagggacttgggtggatggcctaggatgactggagaccatcttgggaaaggaagagaggaagggggtgtgagtgttgtgataatgaaagcaagaagaaaaatatcagtactgtggccatcaatgcagaggcatggcagaattggggggtggggtggttacccaggttgactggggaggggcaaagaggaaaagtcatttaatgactctttgtcatggatccaatccccagttggaaagaggaaggcagccaacacctctacccctaaatcttgctgttttgactgatgaagaggttgaacccatcctgtgctggaacccaccctcttttgctcccttcattgtctctccagttcccagaggtccacttgggccagtggtactttatcgcaggggcagctcccaccaaggaggagttggcaacttttgaccctgtggacaacattgtcttcaatatggctgctggctctgccccgatgcagctccaccttcgtgctaccatccgcatgtgagtggtaaggaggcagaagcatcactgggttcagtctctgcccaaagtgtgagaatccacccaccaagagctggcctcttagctggtatatctactatgcttggcccacggaattcagtggctgtattaattgccctctggagaaagatgtgcctaaccaatgcttggtagcttgaaacccaaggagagctgggcttcaataacaaatacaatggagtaaatagaagccgggacaggccagacgtggtggctcacgcctgtaatcccagcactttgggaggctgaggcggacagatcacgaggtcaggagatcgagaccatcctggctaacacagtgaaaccccgtctctactaaaaatataaaaaactagctgggcatggtggtgggcacctgtagtcccagctactcacgaggttgaggcaggagaatggcgtgaacccgggaggcagagcttgcrgtgagccgagatggcgccactgcactccagcctgggcaacagagtgagactctgtctcaaaaaaaaaaaaaagaagctgggacactatggttggggtgatgctcattctttcctccttgccaccaccacctctgcaggaaagaygggctctgtgtgccccggaaatggatctaccacctgactgaagggagcacagatctcagaactgaaggttggttcttcccagccctcaccctcccttgagtttggttctgcatctctgttctcatacttctcccacctgccttgacaggccgccctgacatgaagactgagctcttttccagctcatgcccaggtggaatcatgctgaatgagacaggccagggttaccagcgctttctcctctacagtgagtagggatacaaggcaggaagggttggagggaaacaagggagggcaggagaactmctcactctgggtcctatgayaccctcccaggaagagctaggtgcttccaggggttttgactggcctgaccccaccttgcccttccagatcgctcaccacatcctcccgaaaagtgtgtggaggaattcaagtccctgacttcctgcctggactccaaagccttcttattgactcctaggaatcaaggtaaggkgttaaaatctcataaaacaggattaggactcacmaagtcttctggtgttacagggtgaaagaggctcgtgtgatgtcaccagagggatgtggctaagagctgtgatgtcacctgagggaggcaggatgggttctgggctactcaaaagagaggtttctgagtttgcactggataaagggggcagagggtcatacgtggagggaaaagagccttagagactcccctttgacacagggaatgaaagaacacgttctcccccaccccattactatcaactttgcttttctccctggacttcccttctgtccttctttttccctccccccatcacagaggcctgtgagctgtccaataactgacctgtaacttcatctaagtccccagatgggtacaatgggagctgagttgttggagggagaagctggagacttccagctccagctcccactcaagataataaagataatttttcaatcctcatctcattctggggtttgtctccagaygtcattcccactcctcccatttcaacattccccctggatcctctaccacctaaactcccagctggacggtgtcagtaagaacagagtggcagtaactctcactttgtagtgktwtatttaggatttgatgtgacacagttatttattgctgagtgagcaaacccctagcccccaagtggggactacaggcttcagtgcttcccccacactgcctgagctaccagcccttctgcactggccctcctgccaatactgcctgcactgtccccactccctctggctcccatgatcaccagatccgccctgcaggctccctgtcacctgtggggccctatccagaccccctaatccacttgcctagcagccccactcttccctcgatggctcagatcctgagatccaaggaacaccctgggtttcccaaccactctcttactgcagaggtctgtctatcctgccctggtctcctccaccccaggagagttttcaaaggtagagaggaccctttggtctttattcaccaccatcatacttttttttttttttgcttttaaaaagtggaggtggaaaaaaaaaaaaaactgaaggtgggagaaaagtaaaagcaaaaataacagctggtgaatccaagagcagtgccctcactgtccataaacacaaacaccctaaatagttctgttctctcctgtgtatgaaggggggccctgcaccctcgtactcgggtttcttccccatccctgaggtccctatgcttacaatttgggtcatgcctcacacttttctcctaaagcccacactctcttcaccctttgcccccaccccacggtcacagcccctttcccgggtctcccctctgctcctcaccttccctctccaacccctcactctcccagtcagtggccgcctcatccccattgggctcccggaggctgacagccagcaccaaggcctgcaggagaccaaagaggcaggcgaagtgcaaagggtgggcagtaagtaggctcagaacagcatggagcccatgcagggcagccaggaaggacagtaggccatgtagccagaggcccagcggtccacgcaggcccagtgtgtccaaggctgcccgcagtggtcgtgagcacagggccagcagggcagaggccagcagctccagaagatgcagggtcaggttggtggagatctgcagacactcttctgggccccccaagtaccgggagggagctcctggttccccccgcagccagcccaacagcttctcacgcctaccaggtttctccaatggggctcctggcccagggacgctcagtcccccttcaggggacacccctggtctcctggtgccacctgaatccacatgatcccatctgagtttgggactggcccctccagcctccagtctcccagactcttgagtgctagagataggctggtcccasttgagggaatccattcttttgctccctagctgctcaacttggggctcctccttgcttggttcggaagcagcccyagaaaccctcaatgcccccgagtccttagtcttgggatgccccacatcttccatggtttctggggcactatcccagtcacttcctgaattctccgaggagctgtccacccgtctgggttctgggtaaggcgggtcaggcctcattggtttccggcggccccaagggcgaggtagccagccaccaagccgtcgcaggaacatggctggggtgtgtaatgggcccccaaattctgaggctgcttcctggcactactcagactctcaggatctcctcagaagccagagtctttctggctcagaacaggtatttgcctggtgatgcagtcctactctgaattcagaagtggctcctcccttctctgaatagtcatgcagcctcaagtgtggcaagtagtttgcttcctcttcagttctggggtaaaggggggcatacccaaattcattcaccatccacacccccacaatctgagattccaagaatctcagatctgacaaggcctgggtcaccaccagagagtcctctctgcgtttccggatttccttcccagcaggcagcaccccaagtttcactcaccaaggccacaccccamggtgtcccagaaactggggaggcagtgctccatccaataaagcgggcaggaaggtggccccaggtcctaggtgctcctggatcgtgtagtctttaactgctgcccyaagggacctcaaggaataggaattctctttgttaggaggtggaatgaaagtgtccagcaaactccagccagcagcgttcgtcccttgatttagagggctatgatttctacaaagtggcccgactggcccgcgaacacgcagcagagacgcggcctccacaaggtcagaactaagatgtcctcagagatccccagttacgaagcaaagcgcgggcctacttcgggacctacgcgtccgggcgctgtgcgcggggaccgctcccgggcccagcgtcggggccgcggccttggggagccgccgggagccgcgaagcccggaagcagctgcaccaggactggaaggacccgcgggggcggtgccgcagctcatggggcggaccctgcgaatagaccgcccccgtataccccgcgctgtctgtgcgcgccggaccgccaaaccgagattagcaaggaccaggaccttaatataaacccagctccccattttcccgggtttctcatgcttccctaaactyggtcgccccctacagccccctgcccctgggttcttttccacatcccccaccactcctccatttcgcatccaagacttcatgaaaggctttcccagaaaagaaaaaatgaggagtcttgcgacttgaacagccctcccctgcccgtctgcaaatttgaattcctggatttcacaacagtgagctcttcttgtgcctaccacccggcatgagcaagacaagggggtgggtggtgggagagtggggaagtgtgggaaagaaaagtgtagacaaatgggtggaacaaagaagtytaaagtttagatttgggggctagagttctggtcccagttcaactaagtgtacaagcttgataatcgtgggccytcctatcacactggcctcttccagcaaaaccctacccattctcatctctagaggccttgacttcccttatcaccctgcattataatatttgataacatgggccgggagtggtggytcatgcctgcaaccccagcactttgggaagccgaggccggcggatcacctgaggtcgggagttcaagaccagcttggccaacatggagaaaccccgtctctactaaaaatacaaaattagctgggcgtggtggggcatgcctgtaatcccagctactggggaggctgaggcaggagaatcccttgaactcggggggcagaggttgtggtgagccgagatcatgccattgcactccagcctgggcaatgagagcgaaactgcatctcaaaaaaaaargaaaaaaattgrtaacatggcactttccctctccagctgtgaactctttgagggttgggaatgtctttacctgtattcttggcacatagtatatggacttatgtttgtgaaatcagtgaattggctgtagtcagggaactcctcctggggkaagtgagacttgcacgaagctgggcaattcttggtccagggggsttgaaagaataggtgggggactcccaggagggtctgggacctgaaagtgaacccagattggcagggaggtgaccttatcatgccacctggagaggctgccccttctgactcaggtgggacttgcatgtggctcccaggcttctgtttggcttcctcaaaatagcttccagaaaagtgaataaaccacaaatggttgatttatttctgactctcagcccgtctctcacgaagacagagcctattgaccaaaaacttcaggatctgcatctgrgcagatcccaggaaggggaagtcaaagggcccaggtcagagrcccaagttcagacttcagcagcagactagggtcagactttaccaaagtcagaactcgaggttcatgtaagtccttagatcccgctcccaagccctgtctttctcctccctccttctctcctccctccagctcagtgtggccacccgagggggtctctccctcccagccacagctcgkgtatcccaagctgggaaatgtgtcactcggggctggggtgctgatctgtagcctagtccttcctggtcyctcttgaggacagtggggatgggattggcacggccctcaccccggggtcccagccccattcctggctcccagccccccctcagcagcagtttgaagcccgggctggagatgggcaccccaagtggaaggttgggaggctgaggaccctgcgacagtgacagcaggtgarcagtggatgtgcggtggttggaatcttggaagtgggtgtcacagttctcgcagtactggagggagggagtaggagmcctgcagagaaagaagaaaaagcattaagggcaggggaaggaaaaggggaagagttgaggcctcagagggggctggcagggtagaataggatcttttcagcttttctgctaaggaacaaattgccagctaggcatagtggctcacgcctgtaatcccaacactttgggaggcagaggcgggcagatggctttgagctcaggagtttgagaccagcctgggcaaaatggcaacgcctgctttttttttttttttttttgagatggagtcttgctctgctgcccaggttggagtgcagtgccatgatcctggctcactgcaacttccaccttagcgattctcctgcvtcarcctcccaagtagccgggattacaggcacatgccaccatgtcccggcaaagcctgctttctacaaaaaatatgcttgagcccaggaagcggaggttgcagtgagctgaaatcacaccattgcacaccagcctgrgcgacagagtgagatgagtgagactttgtctcaaaaaaaaaaaaaaaaaaaaaagggacaaattgccttccttcctacttaacagtgagggatccaggctggtccaaaggtggtggtgagttatctgaattaattgttcactcagttacagatcaaactccttactccacttttcccctccttctcactactgcacttgacttgtcttaaaaacaaatttctttaaaccattgtgggatccagagcagaatagttgaaagaaaaaaatggtaaccagacctagcaaactcttgggcaaggggagggacattagtcataatgactatagctaacattcatgtattgcatactatgcggcatgcactattctagcattttacatatattaacccattgaatcctaacaacrattcttactacccccatttctaagatgagaaaactggaacatgtagacattargttgtttgcccaagtaagtggaatcaggctttaaatccagggagctcatgtttataaccacttgactatactaccctgtcaacctacacatgaggataaggaaagaactcttcagcactgtgctggggcgtctggtgtggtgtggctgggagaggcagaacacaatgagacatgggtctgagctaaagtttccccttaccggttttccgggctccttgtctctccatggctctccctgaccatgcgggctacctcagggaagccagcttcttcagcgagctgagccgcatccctgccactcagctcacagacccccacccaggcagccccacggcccaggagatagctcacagctgccccctggcccgctcgagcagcacacatcagtggggtccaccagaaggcatcccgggcgttgatattccccccagctcctcctgcctcatgcggttccagcagtctcctaagttctggcargtccccctcctggrctgccctcagtatccggtgagtcatcttatcctcagcctcaagggatctcccttgtccatgtcttcctgatgctccttctgccactgcttctgctgctggtgccttcattattcttcttttctttctctttctttctctggcaggttcagtctgagatctctgggastcaggagcgctgctctcatccccaatcagggcctcatagaaagctmgggctgcagccccatccagggtggactctggcttctcgggctgtggctgctgctgcccatccttccagaggtcgctggggtcagtggctggggtgaaggtgatgagcaagggccgggacatggcttttgggagaactgagaaaatgataccaggcaagggaaggatgagacaagtaagccaagctcgtggtgaccctgtagcaaccacagcctcagagacctgctgggatgagaaaaagtagtcaaaaacactttcctgccactaaagtaaccccacaacttaggactctgcagggcctaagggagagagactttgcgtaaaaacatggaaccctacaataccgactttgctccttagtaaagattaataaaactccatgagactgttgtccagaggtcctgcgtccggcccccacccccatcctcaccaacaataaacaccagcctctttctgaaaccactttcccaccccgtaagacataccagtaggaaaaaaaaatcagcctggccctttaaktcttccgcgatcccatttcggagtttcctcttccyaaacaaaaatagatgggtcactccctagaagatctcggggagagtctcctatacgtgttgctgtgtagcttccgtaccgcaaaatggcgccattctaatcagaagagttgacacaatcaaawagccacacggcacgaagacgcatgcgtggcgacaacaacaacaaaaaccacaacccacattacttgagggctcgggcgtgcgcaaagctccgggttcagtttcccgcgctggaactttttcaatagtaaacgagcaaagctccgcgcgcccaggtggcgcgagcactaggatctgtcggttggggtcctacttttacataacgcccccacaatgcccttcgccttcctcaacgtggcccccgctccaagcccattttctggagccaggaatccactctgtgggttaggaaaggccctcaggaggcggagggaaacctgtggaatgccgagaagccgtgtaatgaaataacgtcacgmctgcccctcaccattactctgaccagggttcgaaggtcacacttagagcctaagrggaaatggagaagtgcaaagggacgagcagaatggctggcaccacctcaggttagcgcamtgggacgttccagttctcacaccgcccaccccaccccacccaagtccctacgcacggagccaagccgcacctctcccctcatgaggcaggagcccggaggaaacagtatgcccgtcaagggtctctggcgggactgattcgcactaggggcccaacaggcaataaggacccagcggattggccgaggataggccagtcccctgggcagcagcgcckcgccgggactagaggggaacgtgaggagagctgcggaaagagatccagcctggctycctcctttccccgccctaagtcagcctcttcacccagtgagcacaaaactgtattgcccagactcccgggccccgaacgccatacctggcttccgcttccggtggcttctcgttgtgccccgcccgcaagcgccctcctccgggccttcgtgacagccaggtcgtgcgcgggtcatcctgggattggtagttcgctttctctcatttagccagtttctttctctaccggggactccgtgtcccggcatccaccgcggcacctgacccttggcgcttgcgtgttgccctcttccccaccctccctaatttccactccccccaccccacttcgcctgccgcggtcgggtccgcggcctgcgctgtagcggtcgccgccgttccctggaagtagcaacttccctaccccaccccagtcctggtccccgtccagccggtgagtctgaagtcgtcgctgctccgagtcccttgtcgctgggagcggcacatggggtctccggactttgatgtgggggcgggggaggaagcgaccaggtccggcacgaaggagggagaggtggcctgaggagcggaggggggatgtgtggattccggtgaaagggacctgacaatcgcccccaacccgtgagaaaaggaggagcccrgttcttgcttgagaatgataaacttggaaacccttgggaaaggcgtgggggtcatgcagagacttgtattggtagggagcctgagtcgaggtccctgccggagttgacacagaggagagagggccctggccttcgggagctccagggatgtgggtcgggctggtgggtcaaagtatctgttggcttctttcaagtggtgggaccccaaagaatgtttaacttcaaagaaaaggggctgagatgtaaattagaggagctggagaggagtgcttcagagtttgggttgctttaagaaagggtggttcc

SEQ ID NO: 9928 - DNA, 80581 bp, Homo sapiens
aattaacagtgattggccaggcacggtggctcatgcctgtaatcccagcactttgggaggctgaggtgggcggatcacctgcggttgggagttcaagaccagcctgaccaacatggagaaacccagtctctacaaaaaatacaaaattagccaggcacggtgatgcatccctgtaatcccagctaytctggaggctgaggcaagagaawcacgtgaacctgggaggcggaggttgcagtgagccgagatcgtgccattgcactccagcctgggcaacaagagtgaaattccgtctcaaaaaaaaaaaaaaaaaaaaaattaacactgattrtctttggagtggtagaaatatagactattttttcatctttctgctttttttggtttctcaaaagaaatgatttttataatagaaatagctgatttcaggccaggcatggtggttaattattgtaatcacagcatttttgggaggctgaggcaggtggactgcttgagctcaggagcaatatagcaagaccatgtctccacaaatgatttttaaaaattagctgggcatggaggcgtgggcttgtggccccagctatttgggaggctgaagtgggaggatccctcgagcaagaggttgaggctgcagtgagccatgtttgtgtcactgcactccagcctacatataaaaatcacatttattttatgtcttaaaaaaagaaaaatttgtctgggttgttgaaatgaccgatgtaacatctttatatttgcatacacagactataaacacctcacttggggtgacagtgataaatcggatactaaagtagctacccaaaattagtagtttttgatagcagggtctcctgagaaagratgaaaggtgaaaggacgccaagaattagtatgagaagctgtccttccattatgcagaatactcacctgccatctgtgttgtaatgcaattccatcactgctccactgtgtcccttcagtgtggcatagttatcacagtcaccatagacattccacagtactgttagggagatgggttctgtgagcattactaggcaaagggtacttataaatttatcagaacaacagttctcaggycaggcacggtggctcacacctgtaatcccagcactttgggaggccgagacgggtggatcacttgaggtcaggagttcgagaccagcgtggctgatacggcgaaaccccatctttaataaaaataaaaaaatcagccaggtgtagtggcagacgcctacaatcccagctcttgggagactgaggcaggagaatcacttgaacccaggagacggaggatgcagtgagccgagatcrcgccacggcactccaacctgggtgacagagtgagactccgtctctaaaaagccaaccgaccaaccaaacaaaaaaaactatgtagtttgtctgatgaaattaagcctatcaataattcatatatsttctgcaaagatccctaagcaatccagacgtttggccactagtaagcttaaggatcatagagccggaacatccaaatcaaaatgggcagtgaagacgggtatcatccacccggcaccgaggaaaagagttaacagaaaagagccaaataactcatttcatctcataatctggcaagaaagtagcaacagaagcatctgattttttttccttctggcttcatttgctggagtataaataaaacgactttttctacttacttctcaaaaatgggtatgagaaattcttatttctcaaaaatggaaatctggtagtagatcctaatgatgtacaggtagattatttaagggagttaccactttaggattccttccttcccatatgctagctaggattcygggtgtgaattaagaggaccttatacctttgggaaaataaaagttatttctctcctcattactgccattaacctgttatgtctagattgctaagtgccttggtaaattagctggagatttgcctctatgaggaagacattctcaaaccagaacaactcactttccaactagtaaaataatggcttctgtatttaccccatggactccaagttctacacccaagatcattcagcatgttcatgccccaattttagcatattagccatgcagcctgttatgttgycaacatagagtgataccttctgtggcacccaagatttaaaaaaaaaaatcactatctggcaggaaaaattattccagattcaaaaactatgcctcacatatcagtcggtcaaatcctgcagatgctaaggtggatccgttggggtggaacttgcagcagtagacttccccttcatgtccagagagcagcatgattggggcttgaagggaggaacatcttggaggtccctaaacaaaakagaagcacaaggtaactactgcatacagacaaaggaggctacaaaattagggggtggggagtggagggaaaagaccaagaaaacaatgattaagtgggtttcatctgacttacagaatggtagctcttctcatatgaatgcctccaacttgacactctctgaaactttccattatctacctgttataatgmctctcttgttcactctctcagctcttgttgtacgaccaacttttttttggagatagggtctcactctgtcacctargctggactgcagtagtgygatcatggttcactgcagcttcaaactccttggctcaagtgatcctcctgcctcagcctcctgagtagccaggactacaggcatgaactagcawgccatgctaatttttttagtttttgtggagatgaggtcttgctacgttgcctaggctggtctcaaaatcctggcctccctccttggcctcccaaagcactaagattataggaatgagccaccacatttggcctggctcatttaacaaatgatggaactgactttcccaacaactctgcttggtatggagtactgggtgaaatagttttgttttatttttaattttttttgtgtgttttgagacagagttttgctctgtcacccaggctggagtgcagtggtgtgatctcggctcactgcaacctrtgctttctgggttcaagggatctggtgcctcagcctcccgagcagccaagattacaggcatgcacraccacgcccggctaatttttgtatttttagtagagatggggtttcaccatgttggccaggctggtctcaaactcctggcctcatgtgatctgcctgccttggcctcccagagtgctgggattataggcatgagccactgcacctggcctatttttatttcttattttttcatagcaaacggatcctcagcatgggtgaagtagttktgattatggtcttggacaccaagatgacacttgggcaattcatctaaacatgggctgatatgctcacttgtcaaatgggagaagtatactacccataatccccaaatctcttcagtacttcccagcattttcatatttatttatttatttatttwttttttggggaaggagtcttgctctgttgcccaggctggagtacaatggcgtgatctcgtctcatcgcaaactccgcctcctgggttcaagcgattctcctgcatcagcctcccgagtggctgggattacaggcacccaccaccaagcccggccagattcatttagttttaaaaaatgttatgtgcaggctgggcgcggtggctcacacctgtaatcccagcactttgggaggctgaggtgggcggatcacttgaggtcaaaagtttgagaccagcctgaccaacatggtgaaactccgtctctactaaaaatatacaaaaattagccaggcatggtggcgggcgcctgtaattccagccactcaggaggctgaggcaggagaatcgcttgaacccgggtggcggaggttgcggtgcaccgagattgcgccactccactccagcctgggtgacaagagcaaaattccatcttaaaaaaaaaaaaaagaagttacgtgctaggcactgggcaaacagcaatgaacaaaataaacaatggagctcgctgttccagtgggaaagggggaagggagaagggaaggtgagagaaaacaagcaaactatatatgtggtgtcatgtgctatagagcaaaagaagggatggggatggtggctcatgcctgtaatctcagcattttgggaggccaaggtgtgcggattgcttgagctcaggagtgaaatcctgtctctacaaaaaaatacaattagttagatgtggtggtgtgtgtctgtggtcccagctactcaggaggctgaggcaggaggatcacttgagcccaggtggtggaggctgtactgagccagtggtcaacacagagagattgtctaaaaacaaaaaaacaaaaaaagagagagagagaagcaatgtgggttccacagtatgtggtactgcaatttaaaatagggtggtcaggaaaatcctcactgaaaaaattacatttgggcaaatattcgcaggagctgaatagtaaaccatgtaaacatttgtgaagagcaatcccacagagaggacagcaaatgcaaaggtcctgaagcagaggcttggaagagagagtaactgaagccaggtgagcaataagaaattggtcagagaggtaaagggaaagagggcaaataattacaagaattttggtttttactctggatgaagtacaaagccaccagaaagttttctgcagagtgtaatgtgatctgatgtttagaaggattcctttggttattggcttggtaacaggtgctgatacaaaggtagaaagtggaagaccagttagggtcccactacaaaaatgccagatgagataataatggcttaggccatgaggcaatgatggagatggtagaagtagcaattctagacctattttgaggacggtgccagcaggatttattgaggagatgtgaggacactcgtatttcctcgtctgagcctaaacaggacattagaagtgtgatcactatttctatcttacaaaaaatgtagttaggagcatggtttctcagttcgaaatctgcttctatcacgtacttggtaagtctgtttttccatctgcaaaatgggttaataacgttcctaacaggctgctaccaagatcaatggaaatttcatatacgaaacactttagtacaagagtcaatgaatgttagctgctatttagttgttaataatacyagtgcagagaaataaagggaaaagcaacttgcccaaagtcccaaaacgagccaacacaaatcatttcccttttttcttccctccctcattcattcattctacacactcttcggaatttttgttctatgccagatccatgttagagtcaggatgcttaaacccgggtcagggttttgagcccaaggtcctcaactctaattctaatgctatctcagggcagtcgagaggctgaaaacgggcgccaaacgggggaacacgtacgcagcattcgcaggctatggggagcttttacagtgtttatgtgctttaactctgcgtagaaactctcgttctgcccscgcaatgcgggaaagggtcagggatcaccagatacagcgctctgaggggargaagatgagctgagggccaaaggccgcctgcttcttcacttaccgcttgcagcaaggctcccggcgtcgcctgctgctgcccggctcctgggccagaccccgctcccaacagcaactcatgccgctgccgcttgactggaaccagsggcaactctgggcccttacgcttctgctgttctatcatggcggcaaccrgtctcttcagcgccgccactgaccgcgctgccgctctcaggcgccacgcaattggttccaaattagtccttcctccacaacttccagcttggaagaaccaatcggctttcaatatttccatttgcaccgycctcggayagtckcttgttattgggcatatctttctgacgtcatgagagtgcgataccaggattggtggacggagctggcgaccgccctaggcgcgctgggtcttgtgggtggaaacrcgctggctgactggggtcggcgtttagttcagcgcagcgactcggggacctggagctgacgcctagtacgtatgaggaagaacggggtgggtggctgcctgagtctggaggcgacgcctcggttgtgcagtctgaacctgcccttctcagctgagggtgctgacagcaaggggtgggaggcgggccccgagtccccagctgtggtaagtagtagcctgggctccctttcggggcaggagcggagccttggggtctctggcggcaagacccagcccctgcggctcccttcttcaagagcgcccatcgtggccagtcctgtgccgggcattcccagggagaaaggcctgcgtcccagcctcctccggtgccccatttggccgaggaggctgacttgtttctgccactgattttgcagtttttgatcagggcctactgtatgcccccctgagagagacagtgatgaaggaaatgtccgactccttctccagagcacagtcttgttgagaaatttgagactcatgcccatgaacgtggtcattgcctcagtcgtcctgctgatattcatttagcagcgcgttgggggtatgttgtgaaccgggcacggtccctactctcagggcgtttaactctggtggggaaaacgttaaacaatgacctcactaatacatggaaatgcctcctactgctgcctgatgctatgagtgcctgaaataagcaggaaggtttttcagaggaaaagatgcctgcgctggtagctgcaggaagtgttgtaattaattaggtgaagaagtgaaggcagaaccttccatagagaactacttgttcagagccctgaggcacttgggaggaaaatgactaaaagcacaaagagccagtgtggctggtacaaagagaatgaagggagtatggtacaagatgaagctgtacgtgatagcggtcagaccttgcaggaatttgtagcttttattttaaaacggatgagataccactgagccgtcttcccccagtggggtgtggtggaggaggggacttgatccctcaggctcagtggtgtgaacagacgggggttggggaagccctagtcgaygtatgtggaccacttgggatatgcagtaatcctggtcagagatgtcagtgaggactgagatatgggtggaactgcagagaattggacagattctagaggtatataggaggtaaaatgggtgggacttggtgatgggttgattttagggagtgaagagaggaatcaaaggtaactcctaggtttctggcttatgtagttgaatagatggtggtaccattcactcactatcacggaatccctcaagctggatagggaacactagaagatgattagagaccagttttttttkktttttkttttttttttgagacaggttcttgctctgtcgcccaggctggagtgtggtggtgcaaccttggctcactgcaacctccacctcccaggttcaagcaattctcctgccttagcctccccagtagctgggattacaggcgcctccactgtgcccggccaatttttgtatttttggtggagatggggttccaccatattggccaggctggtctccaactcctggcctcaagtgatccacctgcctcagcctcccaaaattctgggattacaggcctgagccactgctcccagctgagatcagtttttattgattgattgattgattgtgtggggtcattcatgacatccaagaggcagtttgaaatacagctttgtgctcagaagagagatttgtgttgggaatataaaattgggcataatttgtatatacatgaattgagccataggtgtgggtaaggtcagctaagtcagaaccttgactagttccaacatttaatggtgaagaacaggtgaacctacaggagatacagaagaaaggaaggaggactggaagaatgtctcagaagcaaaagaatgatttgtgatagaaatttctagaatttaaataacatgaagattgaaaaacatattttggcttttatcatcatggaggtcacagtaaccttagcaagagttattttgttggtgtgattgggccaaaagccagatatgaggcaaggatttggacaagaaaatgtaggtagtgaacctacacagtatttttcatagatctgattgtaaagaggaggagaggatgtgctaaccgatggggataagggattatccaggatccagttgaggatccagttttgagaaatttgagaatattgtagaagatttgaaagtcactgtggagtgtgggagaatgaggttactagagaaatgtaggatgcaaggaaaaaaaaaatttttttccagcatatccagcrgtttagtgcatgcatggagaaaacctttytgggtatggcaaggacatcgcttgctcaagacacattctaacctctaatatgtcttctcttcctgaaaaatctggaaaactaaaaaccattttcttgactcccttgcacctaaggtgaaaattgaatttggaactgagttaaatgtggaaagaaggagggtgtgagtcatccagttttgctgccagtcatggcagtaaatttctccagtcaatarctccctggtttggtggcttgctgcagtgatagccataacttycctggattgtggcaaaggtggtattattttgtgggttaggtgttgttcctggaagttctgccaaagtcttttattgcartacatcccttactgcttaagtgggttctrttgtctgcaactgtccctgaccaggttagaggtactgccagagagttaaatataaagacagagttaaagggagtttagggtgttgttggaatgatgggctatggaatctaagctggattggaagaaaactgaagaaaaaggggagggctgatagattggaagaaaatagaggccaataaatcagggttctaatgaggtcaaagaacagtattctctgctagaggatttctgtttatcctaaaaggcttattcagttatctgtttaacttctctacttcccccagaccctctttctcttcctagctactacttttgtttgtttgttttgagacagtcttactctgttgcccaggccgattgcagtggcatgattatggctcactgtagcctcgacctcccaggctccagtgatcctcccacctcagcctctccagtaggtgggataacaggtatgtgccaccatgcctggctaattgttgtattttttrtagagataaggtcttgccatgttgtccaggctggtctcaaactcctggcctcaagtgatcttgctgccttggtctcccaaagtgctacgattataggcataagccaccatgcctggcccccaagcttctgctttagcacttatcacattgcagtgtaattggtgttattttgtgggttaggtgttgttcctggaagttccgccaaagtctgttattgcaatacatccctttctgcttaagtgggttctgttgtctgcaactgtcccgggctaggttagacatactgccagatagttaaatataaagacagagttaaagggagtttagagtgttgttggaatgatgatatctgatatccctatcagattaggaggtctttgagaacagggactgtgttgaaaagggtgktttaggccgggtgctgtggctcactcctataatcccagcactttgggaggccgaggcaggtggatcacctgaggtcaggagttcgagaccatcctgaccaatatggtgaaaccctgtctctactaaaaatataaaaatcagctgggcatggtggtgtgtgcctgtaatcccagctactcgggaggctgaggcaggagaatcgcttgaacctgggaggaggttgcagtgagctaagatcgcrccattgcactctagcctgggtgacaagaacaaaactctgtctcaaaaaaaaaaaaagaaaaaaaagggtggtttagtggcaagtgtgtgtggcccttggaatggcctaagatttgtctctttcttgctgtgttgttttggacaagttatttcattcctgtaaaataggattacttgctttgtagaggagttttagggattgaaagcaggtttataaagtaccttatatataaacatcaatcaatagcatactgaattgatgaattaacaatttaaatggggtaaaattaaatayttcactattttagtagacaatttccatgtgtgttacactgtgctaggcactggagatttggggaggaaggatatgatgatgtgcaagacaaaggcatgcttacaagagttccacactctacaaagggaggaaaaaaatgtccctaaaaatgatttgaatcccatcyccatcattcatattttgcaatcttgagcgagtttacttagcttctcttgtgtcctcatttttaaaatggcaatgataattgcctgttttatgggatagtcaagaagagaattattgaatgtcatgaagataaaattttaaaaagaaaaattagttaagagaagtaaagctcttagattaatacatggcagatatgaagcactcaaatattagctattataagactttgaagggatcttaggaataattgactgaaagtgtagtgtcgagtggtagaataagtgctgatcctggggtcttataccartgttgctaactgtgagcagcctttgtcaaatcacttggcttcattttcagtggcctaagagtaataggtttaattatttccataattcctttaagtttttacattttctgagttcatcttttgtgtttttcctggcattttactattcctctttcctgcttttggctattttctcaacaggtccacgactggaatttgaaagcaagaagcatctatcttacatggtcactctagaatttggtgggagggaggaaagttggaccaccagtttgacatttgaaagtgtcccggccgggtgsggtggttcacacctgtaatcctaacactttgggaggccgaggcgagcagatcacttgaggtcaggagtttgagaccaacctggccaacatggtgaaaccatgtctctactaaaagtacacaaattagctgggcatggtgttgcatgcctgtagtcccagctacttgggaggcagaggtgacagaatcacttgaacccgggaagtggaggttgcagtgagtcgagatcgcaccactgccctccagcctgggcaacagagcgagactccatcttaaaaraaaagaaaaaagaagtgttccatctgttgatctgtccaacatattaaatgggacctagctccttcttcttctatatcctttagaccagaatgtgttcccccctctttctctacctgtgcttggcatatagtgaggctcagttcactcatttaaaaaaaactgagtacttgtagtataccagaccccaggaacacaaaatcaaatgagaaatggtccttggtttcatgtttgaatgaatggatccagacgttgctcatcctagctcttccatgaatgatatccacattgattcctctaatgttgggacctagttagtgttagagctatattctacaaaatttagatttagaccgtgtattagcccattttcacactgctctaaagaactccctgagactgggtaattataaaggagaaaggtttaattgactcacagttctgaattgctggggagtcctcaggaaacttataactcatggcagaaggtgaaggggaagcaaggcacgtcttaagtggtgtcagaggagagagagagagagcaagagaaactgccacatttaaaccatcagatctcgtgaaaactctgtcactatcatgagaacagactgtgggaaactgccatgatccagtcacctcccactaggtccctcccccaacatgtggggattacagttcaagatgaaatttgggtgaggacacaaagccaaaccatattcgattgtgaattctttttgaggtatagtgcttaagaatgcaggctcttggccgggtgccatggctcatgcctgtaatctcagcactttgggaggctgaggtaggaggattgcttgagccaggagttcaagaccagactgggcaacataatgaaatccagtctctacccccsctcaaaaaaaaaaaaaattagccaagctcgttggtgtgtttctgtcccagctacttgggaggctgaggcgggaggatagcttgagcccaggaggtcaaggctgcagggagccatgtttggaccattgcactccggcctggacaacagagtgagaccctgcctcaaaacaaaaaacaaagcaaacagtgcaggctctggagtcattattctgtctctgttcatatcctagtagttttagttagcttactttgctcacaattccagcacagcttaaagataaactaaaattcctttaaattcttagggttctagtcaattagtactcaagtaacaaaaaaatctaaatccaaacaagctggaaaatgataacaacaaaaatcttgaccaggtcagtaaggtgacacattaaatgaagttccaaaaaggctataaaatgtctggccaatttaatattgttctttaaacttttcattgcttgggggataggaggacaggatgtgtagggtttttttcccagttgcatgtgtactttaaaatttttttttgaaactatcacataattatggaagcatgtacagataacatttttctgaattatttgagttaaattgctgacccaataccccaacagccctgaaaactttttttcctacaaacaaggacattctcctctatagccacagtgtaattaccaacattatgaaattaacattgcattacttctttgatcctcaggccccacctcttgatgctcgagctctgactrcccattctgggctgctccagtgtgtgccttcatcaccttattcttccctatattgcagttctctttgtagatttcctcctcacccagcttagactctgacctcactctgggccaccatttcttctcctgtatcctttacttccatcccatactttcctttctctgtcccttgttttggaaagagagtggctagtaattggtcccctgttgcttccctatgtaacacagttgtttaaaacatgcaagcaaaatgctttgttctgcattcagagctattgcaaggcaactccaaatggtgtacctcaatccttgtcgacttactggctcttttaagtgtatgaatgtggtcctgtctgactgactgtatctatcttaatgttatatactcttttttttttttctttctgagacagagtctctgttgcccagggtggagttgcccagggtggagtgcagtggcatgatctyggctcgctrcaacctccacctcccatgttcaagtggttctcctgtctcagtctcccgagtagctgggattacaggtgcccaccacaatgcccagctaatttttgtatttttagtagagatggggtttcatcgtgttgcccaggctattctcgaactcctgggctctagtgatccacccgccatggcctcccaaagtgctggtattaacaggtgtgagccaccgtgcctggctcaatgttatatactcttattttttttttttagacggactctcgctctgtcgcccaggctggagtacaatggtacgatcttggttcactgcaagctccacctcccaggttcatgccattctcctgcctcagcctgccgagtagctgggattacaggtgcccgctgccacgcctggctaattatttgtatttttagtagagatggagtttcactgtgttagccaggatggtcttgatctcctgacctcgtgatccacctgcctcagcctcccaaagtgctgggattacaggcgtgagccaccacgcacggctgtatactctttaaaagtagcagaactctttttttttccaagtgaaatcttacacagaattttaatatgtaaactggatcaaagcagaatacgttgttacagtaggcacccttgcagtaattctcactcactccccctttcactgtggcccaccataaggttgggagattaactgtgaatcagtaataattgacctttgcctaattactgaggagaggcttctacccaactgctctgagtgggacttctcccagctctagtttctttgggggttctactccctcagcctttggtatggaggctcacctctggttggttgacttagaggcagcctcactggtctgggaccttgtggtgacctagatatttcagagttgactttttttttttaatttcttttttttgagacagggtttcattttgtcttctaggctggagtgcagtggtatgatcacggctcagtgcactctccrtctcttgggctcaagtgatcctcctgcctcagcctcctgagtagctgggacaataggcaggtgccactatgccgagctaatttattttattttttgtatttttagtagagatagggttttaccgtgttgtccaggctggtcttgaactcctgacctcaagcgatccacccaccttggccttccaaagtgctgggatacaggcgtgagccaccatgcccggccataattttcttttctttttttwaaaaartattttgtggagatggggtgtcgctgtgttgcccaggctggcctcgaacttctggtctcaagcattccttccacctcagccttccaaagtgctggaattacaggtgtggactactgtacctggcctggaagttgactttttaaaaataaatttggattaactaaggagcctctgagtaaccgcartagaaccctcggtttctacagaatttgaaaaaaagttttatattccatatttaaaaaatgacaaccatttactttcctgaaattgtaaacctgttatagtcatacccccttgttcatgggggatacattccaagacccccattggatccctaaaattgtgggcactgctgaacccagttgctatcaattggaagacgtttctgtttgtattttctacccacaaatttaatgccttctccatcttaactaagcacttatcatacactgtggctataactttagcagtttgaggtgcaacagcaaaactaacatgaatgtttttttcttcctcacaatttcagacatcgaagattcattcttactatagatcttagcaaccttagcatacaattttttttttccccttgagaactttcaccctttcacttaaaggaagcagtttacagcttctctttggtataccaaaattgccagcattactactctgcttcgtggccattattaagtaaagaaaggattatttgaacacaagcagagatacttcaacagtcagtctgataaccaagatggctactatgtgactaatgggcacttaatatacactgagtgactagtgtatgcagcatggatacgctggacaaaggggatgattcatatcccagatggaacagagtgggatggcacaagatttcatcacactaataagaacaacataacagttttaagcttatgaattgtttatttctggaatttttcatttggtgtttttggaccgtggtagactgtgagtaactgcaactgtggaaagtasaactgtggatgggaggactactgtactgttatatttcaggctttccctcaaaaatgcatgccagtttttttttgagataaggtctcactgtgtcgcccaggctggattgcattggcatgatcgtacctcactgcagccttgatctccttggctcaagcgatcctcttgcttcagcctcccaagtagctgggattataggctggtgtcaccacacctggctgattttttttctttttttctttttgagacggagtcttgctctgtcaccaggctagactatagtggggccatctcggctcactgcagtctccgcctcccgggttcaagcaattctcctgcctcagcctcccaagtagctgggactacaggtgcgcaccaccaygcctagctaatttttgtayttttagtagagacggggtttcactatgttggccgggatggtctcgaactcttgaccttgtgatccacccgccttggcctcccaaagcgctgggattacaggcgtgagccactgtgcctggctgattttttttttttttaagtagagatagartctcactgtgttgtccaggctggtcttgaactcctggcctcaagtgatcctcccgccttagcttcccaygattacagtcgtgagccactgcacctggccccagtttccttcttgaagaattgcatggggtttcttaggccactgttctacaagaggtataaatctgggagcattaaacctagctttttgtatgcttatcacagcagaagtctgtaagcaacaatgtaagttcatttctgctttagactttttttttttttttgagatggaatcttgctctgttgcccaggctggagtgcagtggcccaatcttggcccactgcagcctccacctcaccggttcaagtgattctcctgcctccagagtagctgggattacaggcgcctgccatcacgcctggctgatttttgttgtttttttttttttggagacggagtctcactgtgtcatcaggctggagtgcagtggcacaatctcggctcactgcaacctctgcctcctgggttcaagcaattcccctgcctcagcctcccaagtagttgggaccacaggtgtgcaccaccatgcccggctcattttttgtattttagtagagatggggtttcaccgtgttggccaggctggtctcgaactcctgacctcagatgatccacccgccttggcctcccaaagtgctgggattacaggcgtgagccactgcacctggcctatgacctttgtgtgtagagtaacagatgatagattaagatgtttgaagttaatttagatgtttcagctgctggtgcccctatggattctgtacctcactaatacgtttcaagtgttggagggataataaaagtctcctgatagaacctgatagattagtaactcctgttctagcatgtgaggtgagggatactggacagagggaaaggacaggctagagatgagattgtattgctatgaaatggaagaggcaggatttaaccagaatgtaaaacttggaattaacctgtttatgagctatttctcaagaactgacaaatctgcctgtattagctctgtgtacttttagtacagtaataaaaagacactttggctgacctaagcagaaaagggcaagtttagtataaggatataagattatcttagggagcttgaggacagggatgttcctgagctgtgggataatactagaacaagggtttggatgtcctgaaaggattttctttcatttctgtttcaagtgaagctgtcaatttaatggatggtcattgtaaatcrggaatacttaccaaaatcaggacatcaagtcatcctctgaaagtgaaaggaagcagtggggrttgaggagagaagaaagtatttacctgtgaaaacacaagaaaaataatttcaggtcttactggtgtcaaatgtaattgggaggaaagagaactgaggatagtaccattagatttatcttggcagtgatttatccaacagagtaaagaggcatgtttaagagccgctagattgctggtttcccctctgtttaagatcaggaggctgagcaagattatctctaaggtaagtatccaaagctgtaagttttgctacttaggcagtatcagtgtcacctagtagctggttgaaaatgcattatctcaggtaacacctcagacctactgaactgcaatctgcattttcacataattcagaaatagttaaatgaatttggtacatccaacaatggattattaggtacgtgttaacaaaaagttgtgtatgcgtatgaattgctgtagtaagaaaatgatttcatgattccattaaaaaaccacttctacatataaaaaaactgtaagaatatagatcaaattgaattacaggtgatttcattttctttattattaatgtattatctgaatttttttattatctgaactttcacagtgtgtatgtgttttaattttatcaagaaaaaaaaagtaagcccttttctctttgaagtcacttcagatttaataccttagcatagtagttaagagaatggactctggagtcagccagtttgrctccccatttcctggctttttgacatgcttagtaatttaacttctggaagcctttgttctctcatctgtataatataatagtaatagaacttacattttaagagttttgagaattgttttgttttgtttttgagatggagttcgctctgttccttagtctggggtgcagtggtgtgatctctcactgcagcctctgcctcccaggttcaagtgattctcctccctcagcctcccaagtagctgggactacaggctcctgccactatgcctggctaatttttgtatttttagtagagatgggatttcgctatgttggccaggctggtctggaactcctgatcctgagatcgtccgacctcagcaaccacagtgctgggattacaggtgtgagccaccatacccagcctgagttttgagaattaaacgagattgcatgtctagtgcttagcacagtgcctggacatagtaagtgctgcattaatgtttttatttctgttattccatttttttgagatccggtcaaacatacttaacatcttttcccaccctcccccaaaattcttccccggcaaaaaaaatagcaaaaatagcaatttaaaaaaaccaaacacaacaaaattagtagcctaatggccttgggtaagtaacaaattgttgagaaataggatcaaggtttccaaaactccccacaattagaataaacaaaagagatttggataaaagtgtatggtgttaaatctagtggtattattctgtagagaatagctgtggattgtctgcatattcatttctttaatgcagatatctctctaattggtgtctgatttctttatgacaggacacttgtattagctttaatagaagagaaatggaggagccatagaatattaaggatgaattcaggaaggcctgagaccatggaaaacttgcctgctctctacactattttccaaggagaggtatattcttttgtgctttgaaaacccaccatttatgttaaaatagattaagggtgacaactgggtttgttgttcctgtccacttaagtctgtcttgagcattacagcttaaatgggaagggccagcggaacatctggcaatcacatgtgccttctctaagctccagatatttaagtgcgtagttgacatcgtcattggaataccagcatgtgtaatttatgttttaaaatgaatttattttttcactgctgtggtttgaatgtgtcccctaaaaagcatgttttggaaacttaatctccagtgcatcaacgttgggaggtaggacctagtaggaggtatttagttcttgagggctccaccctcctgaagggattaatgccaattaytgaaaggcttgaggctgtgagtttgatctctttctctccttcttaccctcttrccttccaccatgggatgacacaacaagaagattcttgccagatgctggcaccttgctcttggactttccaacctccagaactatgagccaaataaatttcatttctttataaattatccagtctctggtattctgttaaagtaacacagaacatactgagacactcaaaaaattgtttctcttctagatgttttcacctcaacaaatagaaccactatcctgcaggttcccagactacacatctggccatcacccttgatttctcttcttgatttgattttgattttccctcccactccagtctatttgcaagtcctaattatatctctggtctatgtacttctttatccccttggcaccctattagttaaaactctctatctcttgcctggtctttactgggatccctgcttcatcgtagctcctctccagtctgttcttcacattgtagctagcataagatttttgtttttgtttttgttttttaattcttytttaaaaattgagctggggtctcactatgttgcccaggctggtctcaaactcctgggcttaagtgatactcccacttcagcctcccagagtcctggggttacaggcatgagccattgtgcttggcctagaataagatttttaaagtaggttggacatgttgctttctcacggctcttcagaagcttctcattacaattgaatacagacatggaccttccacagcttgcccctgggtgctctcacaatgttgtttgttctaccctgctcgtagtcaagacacactggcctccttaatagctttgaacagtctgagttcttgctctctctttaggatttgtgcacatgctgttttctttttagtctgtgctgctataacaaaatacctgagattgggtaatttataaagaacagaaattyatttctcacagtwctggaggctgggaaatctaagatcaagktgtcagcagatttggtgtctagtgaagactactctgtttccaagatggcaccttcctgctgcatcctctggagggaagaaatgctgtgtcctcacatgacggaagggacagaaggagcgaactcaccctttcgagcccttttatgaggcactcatccattcatgaggggcctaagggccccacctcttgataccattgaattggggattaggcttcaaagtgaatattggagaaataccaaagttcatgttgaactttagtcccccmcgtgggggtattaagaggtggtattaagaagtattaatcacttgggaagtggttaagtcatgaaggctctgcccttgtaaatgtgattaatgcccttatagaagaggctacagagagctgcctggcccctccattccttctgctgtgtgaagacacagcatttgtcacctccaaaggacacaggaataaggtgccatcttggaagcagacagtgagcccttatcaaacacaaaatctgctggcaccttgatcttgaacttcccagcctccagaattgtgagaaataaatttctacggtattttgttatagcagcaccaacagactaagacactcttccttttaactacccactttcccatcatcttgtattcatcctttaggtctcagccctaatgtctcctcagaattttttttacccatcataaataaatcggttcacactgtatttaattatatacttgtttaatgtctatcttcctcacargacactaagctccatgagggctgagttgtgtctgttttgttgtatatctcagtcttaggtggatgggtagaaaatagtaagtgcttgatacatttttgatgaccgaatgaattatcaacctttggtagagaaggcatatttgtttcaagagcagaggctttgaaaccagacaaaatcgggattctagtcccagctcttttgcttgctatgtgagcctttagggtgtcacttaatctctttgaacctcagttttcttgtttgttaaatggaggttccatttattcacagtaattctcttccatagaattactgtgatggttaaataagctatcatctataagaatacaatgcctgagacatagtaggaattaattaatgttggctccctcctcttgaagtgaaagtaaagccaaaaaattgttttcagtgtcttacaagagcatgtagtttgcttgttcatttgtttgagacagagttttgctcttgttgcccaggttggagtgcaatggtgtgatctcagctcactgcaactgctcactgcaacctccacctcccaggttcaagcaattctcctgcctcagcctcctaagtagctgggattacaggcgcccaccaccacacccagctaaattttgtacttttagtagagacaaggtttcaccatgttggccaggctagtctcctgacctcaggtgatccacctgcctcggcctcccaaagtgctgggattacaggtgtgagccaccacactgggcctctttttttttttttttttttttcttttttttgagacaagatctcactctgttgcccaggctggactgcaatggtgtgatttggctaactgcaacttccacctcctgggttttaagtgatcctcccactcagcccccgaggtagctgggactacaggcacacaccacaacacctggctaatttttctgtagagacaaggtctcactatgttgcccaggctggtcttttgaactcctgagctcaagtgatctgcccacctcagcctcccaaagtgctgggatcaggcgtgagccatcgcacctggcctgagcctatagtattttaatggtatcatttatacttgatattcatacttggcattcatacttgctttatatggttgacaaaagttttacatcctaataatgtgaggtcttggagggcagactttgtgattatcagtcagttatagataattgtggctcttgacttctgttaagttgatcccaacttgtaatataacagtcaagatacaaagtataataccattttaacacatagcaaacagctctgctctttaaagcctctgtcctttttctttatggctcatggtatccccaaaggttagtaaggtaccggagctcagaagaaggaagtgtagcactggaggtgaaactgatttttctgatcatgaagccctcactcatcaggtgctgcccaaaagaaagggaagaacactctgccctccacagaataactcggatttctaaagtggatcctaacctacagctcgctcttttcttttctcttctcttctcttctttctcttttttttttttggacagagtctcrctctgtcactcaggctggagtgcagtggtgcaatctcggctcactgcaacctccacctccgggttcaagtgattctcctgcctaagcctccagagtagcagggactacaggcgtcagccaccacgccyggctaattttttgtatttttagtagagacagagtttcgccatgttggccaggctgacttcaaactcctgacctcaggtgatccacccacctcggcctcccaaagtgctgggattacaggtgtgagccactgtgcctggccacctacagctttyttatatgagatggagcttgaattagtgcaggttttatatattactatcaaggatggatggtctttaggaatgttcagagagaactttatagttctaacttactatttcagtagcatattttgaaaagggatggtttagaagtgacttggagttagggaaagagaaatacgataaattggaaagaagaaacttttcagaatattcatccaataaacatttaatgagtacccaatatttacaaagaagaggagttacattaaaattgaaaaaaaaaaaaaaaggtgtaagcctaatctatgccagcactttcacacattctgtcttattgaatctctccaaagaaattgttaactctatttgatagatagggagactcttctcagaagttaagtaatcgcctagggattaataaatggcaaagctaggattctaaatcaggtcctctttccaagtttactttctgctaaactgcagctggggttgtgcaattgtacataaatgtgtggaggaaccaaaagacccatgagaattcttttttttttaagatggagtcttcctctgtcgctcargctggagtgcagtgggttcaagcgattctcatgcctcaacctcctgaatagctgggattacaggcgcatgccaccacacctggctaatttttgtatttttagtagagatgggttttcaccatgttgaccaggctggtctcgaactcctgacctcaagtgatccatctgccttggcctcccaaagtgctgggattatagatgtgagccaccgcacccagccaagagaattcttttgactgaattgagttataggaggaatatagataaatttgktggttctacagtcatttgttggtacaactctgttacagcatttatcctggtctgtcttgtattattattacttgtatgtgtctctctccactactagatcgtgagttactgtagagcagaggccatgattgtctcatatgtcttggtaactacttcaaatttatttaaaatgactgggcatcccttttttaaagttgtctttatttcatagtacctgacatggtatcttgtacatagtagataggtgcttaaaatggagcccaagcctcacaggactagttgtccttgaagaaggtggtgtttcagcccatgtcccagctcttctcttgctgaacttagcagggatttgggacctagtaattaaatagctgagaagccartattcatcctgtcatcctctgagaagcatgttggtagcagagtgcattatattaatacatggtaggrggtacgagcatagcartgagacttgggatttggcttaggcttgccatagcccaagaaatgctgaggggagattcatgttggtaaggtcgaaatagcattggactagaagtaaaaaaaaagtctgtgttgtacttggctgwgctactatctttgtgacttttgacaagtaacttatgcccctgagcctcaaattcttcatttacattatggtgacaacaagtttcaaggccatttgccacctataatctgaagatgggaaatttactttacccaagctctaatgaattcagttgagatagttactgaattttttcccctgagctatttgactaattattcttgggacaccaggcagactgcgtgatcatctatggcaggtgtgattgcaccctaggagacacagtgatgaaaacacctggtgctagaaatctgaaacaatgcctaaacagttgagtgcatccattctggagcatattaacctttccttttgggagaggccaaattaaggtctattatattacctctaaagaccataatgtgacactggagcttcaggattgaaaagtgagattgtcttaatttatagcagtgaggtgaatttggctctaacttccagatttatttatttatttattcacttatttatttatttattgacagaatcttgctctgtcacccaggctggagtgcagtagcatgatcttggctcactgcaaccatracctcctgtgttcaaacgattttcgtgcctcagctacccaagtagctgggattacaggcatgtgccgccatgcccagctaaattttgtatttttagtagagatggggtttcaccatgttggccaggctggtctcgaactcctggcctcaagtgatccacctgcctcagcctcccaaagtgctgggattataggtgtgagccactgtgcctgacccagatgctacttttaagtttgttggatgattatgttctttaataatgttgttacacagtatgagacttttcagccctctttctagaactgtggaacaaaagccaaagtgccttcagttggtccagaaagaagcgatttgcttttatttcaattaaaaattgggagacttatctttattatgtggccctcttttacaaagaacaaattgctttgtaaactcaggtaagcactttttatctctgatctctacgttcctcatttgaaacatggtagaactggaccagctaatctctgaagtcatttctttggctctaccttgccttaattttaagcatctgtgtgattgtactgtttctttgggactctctggttcctaacccagcataacatgttcattagtataaaacatgagtttagaacttttggttcgtaacccattcttcatgttttgtcttggagagttaattcaagtgctccrtccgatgtctccattaaaaaatgagaatgaaagtttttatctatttccatcctaacattgaagtgagtaatgatgatatttggttaagtataaggcactggactagggagtcaagggaccgaggttctatccctaactttttttcttttttttttttttttttgagatgaagtatcgttcttgttgcccaggctggagtacaatggcgccatcttggctcactcaacctctgcttcccaggttcaagtgatttttctgtctcagcctcccgagtagctgggattacagacgcccaccaccagacccagctaatttttgtatttttattagagacagggtttcaccatgttggccaggctggtctcgaactcctgacctcaggtgatccacctgcctcgccctttcaaagtgctaggattacaggcatgagcctccgtgcctggcctccctaactctcaagtagttgtgtgccttcctaccagtcactaatctttttgtgcttcagtgtcttagactgtaaattattgaaaagctacactttgttgaatgtccattatgtgcyacatacctatgtcagtcactttatgtacatcatttgttatctgcagcagcaaagtgagaacaaatgggaacttaggccctgaaaggcaagttgtgtgcaagatcctacaggtgggaaatggcagagctaggattagaagccacatctttcactccaaagcatgttcactttctatacctatactgttattttttttttttaaagcttttttagagatgggtcttgctatgttatccaggctggattcaactcctggcctcaggccacgctccagcctcagcctctggagtagctaggactacaggcacgttgcacagcacccagatacacctatactattccacttcatttgcaacataaggatctactgtatatgctttctaggattgttgctaggaatagataggatatcaaataccacattgcttttggccattagaattttatagttagaggggacctatgagcagctctagtgtaattaagactccggattcaaatctcagctctgctacttatttagctttggacctccgatatgttacttaatctcttcatgcatctttttgtcatctattggatgggaataatagtaccaactctgtacagtgacataaggattatgcaaagcattttgaatattattttgcatatagtgagtattcagtatatattagtaaatagcagtgcagtcaggattgttttatttactccccttgttttagttatggtgaagctgaaacagtgctcaagatgaagcagctaattgaagacactgaaaagaataaagtttatgtatgtaagattatattgaatattttacaaataatcatttagtgttaaattcagcatatagtgacaacattaccctcgatccacaggttgggggatggggtaggctacagggggaagagagagctagagcctaggttaatgatttatctggcaagggttctgggcctttcatcactaacatttattggttgcctattacatagacccatcaagcctctaacttcatcttagacaactctgcagaagactgaggggacaactcyttctctctgattagatcttttcaggttctgtcagatgtgtatgtattggctttttatctagttgtcttgatgaaacccaagactcagacttggagttaaatgtaacaggctgtatgctctggtttgatttgaagttcaggtatgaggggaggaatgccctgtgtgatccatcccaaatttattaaagttctctgtattgggtttggaggcctcagtcctagctaatataaartataactttattacctggttttttgctttttgttccttttgttcatgaaactcctctggtaatatcaatatgttccctttgttcatgaaactctgttggtgattttactaggtataggatttgggtattcctcagtatcatcacaccgtgtgataacactctaatctcccagtgtttttaatgtgtacacacatacctgtcagtctaaatttcaaaaaaaacccagaaagaatgtttgacagagcatcatttttaggcagttttatagcatacagaggcagtcaatatgaagtacagatttggggagactaggttaaatgctacagaagaaagattctcatgtatgtgacattgatttttttcccccatctttataggttgctatggtgacagactatggggcctttatcaaaatcccaggctgtcggaagcaaggtaggagtttataacttgaaattcagccctctgattctactctctgctaacactccaccacctcctaattataggctgtacatttttcagacagtagtttttcattcctttgttttctttttaatgtrtagatatgaatacaagatgacagttcatttttagcgggcagagaattgtggtctctgactcaggaggaagactggggtatagctaactgggtttacttctgaaaccagctcctccttagacttcacctgtgaccctaggcaaatcacttgacttctttagacacaggatttgcgggagggcargctacctctgtctgaggctgacagtgtgagttttctagtagatagcgcatgaaatgggaatagtattgcaagtgatacaaacatatataatatatataatgttttaagtttttttcataaagaggcgtctgttgaacatttttttgagaatcctgttataaatctataatcttatttatttaccaaaactatgttaagccgaaaaggcaggttccacagaccggttgtctgcccagagtgatttggctaggtagtggcatagccaagactagaacccaatccttctgattcctagcccctggatctttctactatatcacactgctggtggatccaaagattcaacttgctaacttcttatgctaaaataaggtttaattaaagattttaacattttaaaaaaaggcaaccataagaatactagaagaaaatctagaagaatatttcactacatgaaaattaaaaacttmactgcaaaaatcattgtaatcagagttaagtttggaaaaagaatttgtagtacatatgataaagagctaatacaaagggggtattaggaaaaggtgccaaggatatgaaaaacaactcacaggataaaaaaatattacttggtactatagtaaaagatactcattctccgtatgactaaaaagtaacttagactggtagattcatataatgggatattactcaacaatacaaaggaatgagaataaaatattcatacatgcaacaacctggatcatccctctccagaaattatactgagtgaaaaaagctaatctcaaaaggttatacactttatgattccatttatataacattcttatgttttacttgagatatgattcacataccacacatttcacctgcttaaagtgtacaattcagtggtttctttggtatattcagagttttgtgaccatcaccaygatctactttgagaacattgttgtcaccccaaaaagaaaccctgtacctattagccatcactccagattctctctatgcccccagctttaggcaatcattattctactttgtctctgtatatttgcttattttgtacatttcttgtaaatggaataatgcagtatatagtcttttgtgactgacttctttcacttagcacgttttcaaggttcatctgttttataatatgtacttaattcttttttattgccattacaaatttattgcagttccatcagttgatggatatttgggttgtttccacttctttagtattatgaataatgttgctataaatatttgtgtacaactttttgtgtggatatttgctttcattgggtatatacctgtgagtggaaatactgggtcatatgataactccatgttcaactttttgagaaactgccaaactgtttttccaaagtgaccacgccattttacattcctaccagcaatgtatgagggttctrttttctttacatctttgktaacacttgttattatctttctgggtatggccatcctaatggatgtgcacggacatctcattgtggtttgaatttccctaatagctaatgatgttaagtctcttttcttgggtttattggccatttgtatatcttttttggggaaatgtctattcaaatctgatatattttggctgtgtcctcacccaaatctcatcttgaattgtagttctcgtaatccccatgtgctgtggtagggaccaggtggagataattgaatcatgggggtggtttgccccatcctgttctcatcatagtaacacaagatctgatggttttataaggggcttcccttataaaaccatcattcgctgggcacttattctccttcctgctgccctgtgaagaaggatgtgwytgcttcccctttccccatggytgttaagwttcttgaggcttccccagccatgctgaactgtgagtcagttaaatctctttccttggtaaattacccagtctcgtatgtctttattagcagtgtaagaacagactaatacaaaatccttttctttttttgagacagagtcttgctctattgcccaggctagagtgcaatggtgcaatcttggctcactgcaacctctgcctcctgagttcaagtgattttcatgcctcagcttcctgagtagctgggattacaggcatgtgccaccacacccggctaatttttagtagaggcagggttttgccatgttggccagactggtcttgaactcctgtcctccagtaatctgccctcctcagcctcccagagtgctgggattaaaggtgtgagccaccacacctgccttttcccttttaaaaatagggttatttttgtttttattgttgagttaggtgtttctcatatattctggatactagtctcatatcaaatatatgatttgcaaagatttttatgtaacatacttgaaatgacaaagttatttaaatggagaacaaattatttaatggttcacaaggattaagaaggggaaggmagtagcaatatgaaggatccttgtggtgagggacctgttctgtatcttaactgtgscagtgtatacatgaatctacacatgtggtaaaattacgtggaactaaatacatacacatacagaaacacaaatgagtacaggtaaaactggggaaatctgaacaagagccagtcgattttatctgagatgtttttccctacaccaaccaattctccagttctctgattctctaacatcaactggatgtcccaacaattcaattcaattctgacactaactacctgggaattagtgtcagattccacaaacttaagggctcagtcccacatgactaccctcacttcagatgccagccccaatattgaatcctcagattacctacacttttgtctcacttggctacaatttttgggattcccagcacttccccccaargttggtaatttgctagagtgactcacagaactcagaaaaatgctatagttactattagtttattttaaaggataaaaatgagcagtcagatgaagaagtacacagggtgagacccaaagtgttccgagtacaaagcctctgtccccatggagttggggtgtgtcaccctcttggcacatggatgtgttcaccaactctccaaactccattgcttaggggtttatrtggaggatctgttatatagacatggttgattaaattattggccttcagtgatagagctcagtctccagcccctctccccttcccggaagtcagagggtagggctgaaatttctttttttttttttgagagggaatctagctctgttgcccaggctggagtacagtggtgcaatatcagctcaccgcaacctctgccttccgggttcaagcgtttctcctgcctcagcctcctgagtagctgggactacaggtgtgcaccaccatgcctggctaatttttgtatttttggtagagacggggtttcactatgttggctaggatggtctcaaactcctttccttgtgacctgcccgtcttggcctcccaaagtgctgggattacaggtgtgagccaccatgcccagcccaggctgaaatttctaaccctatctaatcacatcgttgatttctctgtttctgaagctatctagggacccacagtagtcacctcattaagggacttaatgaataacaaaagacacttctatcactcagaatagtccaagcgttttaggaactctgccaggaactagggacaaagatcgaatatgtatttcttataccacagtatcaatgccagcatcctggttgtgttagtgtactatagttttccaaaatgtcaccattggagaaaactggataaagtgtacataaaacctctgtattctttctttctttytttyttttgagacggagtcttgctctgttgcccaggctggagtgcagtggcacaatctcggcttactgcaagctccacctcctgggttcacgccattctcctgtctcagcctcccaagtagctgggactacaggcaccygccaccatgcctggctaattttttgtatttttagtagagtcagggtttcaccgtgttagccaggatggtctcgatctcctgacctcatgatctgcctgcctcggcctcccaaagtgctgggattccaggcgtgagccaccgagcccggcctagacctctgtattatttcttttgagtgcagatgaatgtacaattatctcaaaaattttttttcacatagggcagcaaagttatcaaatatttttaaaaaatgatttaaaacactcctaaaatctttgagattaataaatattttaaaagattgctgttaatacccagtgttagaaatggatacttttactctctatcaggagcataatttcacagactttggcaatgcctattaacatcttttatgtgcttattaccctttaatccagaaattctttgaagaatttagtgtaagtagagaattacataaattatgtgcatctgttttgtagactatgcagatgattgaaagaatgactgtatttctaagacataattatgcctcatcttaccagaaagatgccatggaaggttttcatacaattccatcacactgctacctgactgataacagttgtaaaacatcattgattatgagaagcactccaatttcagagagattaaagtgagaggaaaaraaagtgcatcttagaatcaatgaaacacaataaatgtcagtttactgacatgagccaggagtggtggcatgcacctgtaattccagctacttgggaggctgaagtagtragatcacttgaggccaagagttcggggccaggctgggcaacatagcaagaccccactgatggcgatggaggcctgtctagagtggctgctgcaaagatgccagccatagtgggggctgtgcggccagggctgcatgttctatggagctggcaggagccctgcccccttatgagttagtggggtgggagcccaccctcatgggtgcagctgccgccacccagccctggctgcagacccaggcatccctgcactcttggaggtccgggaagacccctttcccccatagtctcagaagtgcctgctcccactgcctggactctccaagctcccggctcctgctctgattttggagcaaagtcgaagctgagcctgggcactattgcaacctggctgggtttgcacaccttggggtggtgctgccatgccagcttcctaccatcttggccccctctggactttgggtgccagtgagcacaggagggaggcyaaaggggtgctragggtggctcagcatgggcctgcaggtgcccctgggcacagaacaactgggcgtcatggacaacatgattgatggtgacaagaggcagacaggctcctgggtggaaaggggcaggtctcggtgaagccgcaccttcaagccagggatggcctaaagcataggggccaggctgtcagttccaggtggagtctgtggcccagagtgagaacttaaggtgcttttcctgggcctgcccatggaccagtcagcacacacttctgaagactgtaaaaatcctggactcagccagacttgggcagacactgggaggacttgcctgtggaaatgggttacccacactgggtctcctctccgtcaagggctgcagatgttgggatgacctgcctgcagataagagctgcccattctgggtctcctctctgctaagagctgcactcaacaggttgacctgcctgtggaaaggagctacctactttgggtctcctgagagctgtaccatcactcaataaagcaactctttgccttgcttaccctccagttgtctgcttacctcattcttcctggatgcaagacaagaacttgggacccgttgaatggcgggactgaaagagctgtaacagatccaagggctccctgagccagagctgtgacacctctttggggctttatggttcctggcctctccaagcttctgggcaccaccatgttccccagagtccacagtggaagccgcttgtggtatgcctggtccatccacagcctcacatggagctggtgcctgtgccagcacctggagctgcctgcccagccacagcagccagtgtgcctggctgtgcacagtggctggaccccatgctcactcactcatgcatccctcgccactccgagcctggctcgcccttggcaggtgtgggatctgggacggcagcatgagccaagcgcagcccattagaccaagtggatggaacaggcctagtggccccaagcaaagctgaatgcagcctgccaggccaagtgggcagaacgagcccagcaggtccaagcaaaactcgggcaaaggtgctgctggccacagcagcttctggctggaaaagtgacacctgaagaatcttgtgacaccatctttacaaaaagttagctgggtgtggtggcagaaggatcacttgggcccagaagttagaggctgcagtgagctatgattgtgccaccgcaccccagcctgggtaagagtaagaccctgtcccttaaaaaaaaaaaaaaagaaaaaactaacatggaaagaagtctaagataataaaatttaaaaacatgttgcagaagactttgtatagcatctctcttccccttttaaagcaagtgtgcatatgcctttaatatcttttttctttatatagtttaaattactgcctatgtttagaagaaaggctggaggaatattcaacagattaacaatggtcacttctggggagttggttttgctaaggaagggatgtacatggaagagggactttgacttctggaaattttttttaagttttttctgttaaaaaaaaaatccaagaggtgatctttggataataaatccatgcctctaaccttgtagactactattctgcaaattgcatctttgcttaagaaatggtttaccagcagttttcaagctggcagtcagcagtctgtaattaagtttctcattttatgttgtctggaatttaatgacatcgaactcttccccaccccacaggacattcatctctttctgtctgagcacaggttttcttgttagtatasttgccatagctgccagtgcctgaaagtcccattctaatttgggcatatgtgacactttggggactgtgtgggattaaaggcctgtgaccttccagcagtcaatcttcaactcattttatccataccctgtcaggtgatgcctctgattgtggctgacagcttacaagtgaatctgtcagtctgacagctgggctgaggcaagcctcagagggagagctcagggagccaaataattaggtggaaactctgtgagttttaatcctgagatctataggtttattggataacttgagcaattgacttccttacagtgtatcttagtttctctgcccataaagagggaagattattaagtctcagcctgaaaggactgagttagaaaataactctgrtctgatcaggtcttaacatctttggctcaggtaggtagattctaatttgagctggtttcccagatgtcatgttctcagaatacttcagccamcactgagttgaagaccccttcctactattcaaacctaagctagattttctttcccctctcatagtattatccaatataactttctgtgatgatgaaaatattccttatgttctctgatttgtttcctgacaccaaccaactccccaattctctggacaccaactgggtgtccagtgactcagttcaattctgacattatttatctggagcttgtgttagatctcacaaatttaagggactcagtcccacaaaatttcccccatttcagatgccagctgcaagtcctgggccacttgtacttctgaccaatcagctgtaaacaggggttccatgaccacctacttaggtttgagactttgccagaatggcttacagaagtcaggaaaacactttacagtagtccccactcatctgtgcctttactttccacggtttcagttaccctaggtcaactgaggtttgaaaatattaaagggaaaattctagaaacaattcataagctttaagttgcagttgcagtgtgatgaaatcttgtgctgtcttgccrcattccatctgggacttgaatcatccctttgtccatccacactgtgtacgctacccacccattagtcccttagtagccttctcagtgatcagatcgactgctgttgcagtgcttgtgttccaagtaacccttattttacttaatggccccaaagtgtaatactratgctggcaattttgatatgccagagagaagccataaagggcttcctttaagtcaaaaggtaaaagttctcaacttaataagggaaaaacagggacccctagaggggggactgaggaagggggagaatggttgaaaaatttaactttgagtactatgctgagtactwctgtaaygggatgattaatatcccaaacctcagcatcatgcagtgtacacagataacaaacttgaacatatgtacccccggaatctaaaataaaggttaaaaacaaattaaggaaagaaaacgtaatcctgtcctgtggttgctaagatctaccctaagaatgaatcttctgtgtgtgaaattgtgaagaaggaaaaattcatactagttttgctgtcgaatttctaactgcaaaagttacagcaacagtgtgtgataactgttcttacagtatgttgttatgttattattgttaatctatttctgtgcttaatttataaattaagcttcacagccaggcatggtggctcacacatgtaatttcarcactttgggaggcgaggtaggtggatcgcttgagctcaggagtttgagaccagcctgggtaacatggtgaaaccccatctccacagaaatacaaaaatttactggtcatggtggtgtgtgcctgtagtccaagctacttgagggggctgagggggttgtttgagcctgggaggcagaggttgcagtgagccgagatcatgccactgcactccagcctgggtgacagaacaagaccctgtctcaaaaataaataaataaataaataaaaattaaactttatcttaggtgtgtatgtataggaaaaacatagtatgtataggattcagtactattctttgccagtttattataaaggatacaacttaggaacagccaaataattgaagagatacatggggtagggtatggctggagtggagtgggatcgggtaaggtgtggtggggagctttcatgctctctggtatgccaccctcccagcactaggatgtgtttgccaacccagaaactacaaatctcatgtatgggagtttttatagagctcagtctctagctcccaaccctcctctttcttcctagaagtaggagattggtgggtgggattgaaaattccagtcctctaagccagcatggtggtgagcacctgtagttccagctacttgggagactgagacagggggatcagttgagccgtccaggagtttgagtccagcctgggcaatatggcaagatcctgtctcaaaatagaaaaagttccagccctctgatcgcttggtctttctggtgactagtccaycctgaggctatctagggatcccactctgtcacctcattaaaataaactcaggtataatcaaaaggggcttactatgaataacagaatacactcctatcacttaataaatcccaggagttttagaagttctttgacaggaaaatgracaaatgtatttttgtattatactacatctgtgctgatacatgactttttcattttatttatttcaactaattgaaattgaaacttaaaacagctacatgactagtgactatctattaggcagtgcaaccctatacaattataaagttcttttttttttcctactgtcttctgccrtccagcactaaactatgaaattttgagaacagatttttcaacattatactttcagagtttcttgcttatgatagaagctcaaatatatttagcagtggattcagtttagcaaataattattgagttctattttctgattagcttttttggtgggaacacagaggtaagagaaacataatcccttgctgccctcagattgcttacagtctagtgatgtaaacaaattagagtggcgtgtaataaaaatgagtgttgttgcacttagtccatggaattgtggaacggttaggctgtttrgatgagtcagggcatagtacaatacytgaggtatagtgggtgggtgttcagtaaatctcactgaatgaatgaatgaattatagcctcagttctaccattaactggcttcttggcaagtctcctagtctttgagccttaatttccttatccctgaaatgggaatgatgtgcatattttagggtcttgagtttttttgactgggaggaccatgtttcattaacgcttggatatatttttgcctataatatagtttaagcgtttagyaaatgttttagtgaatccttaatcccaacaagaataaagggtgttaaaacactttcacgaatgtgcttatattattgtcatataccattgattgggagatgaattgacttaaactgtggagagggaattaagattacccaagggtaacagtgaccttttgttttgacatttttttggctgcagctgtcctctaatgatttgagattttcacttctttcctttattgccagtggaagttgtggaagaaattaatgttgaacctaacgcagttggggtaacggttttaaggggactataatgggctcactctgttactctcatgtggtgattgaggagctagccctttccaagttgtcaggtttcgtttttttcctgtttttaccagcagacactcagatgggactaattctgtttaagtgtcatgttgggtttattgaacttgatgatggacttgatatgcctcttgggcatttatttatggcttgatgtcagaaatccatgcacaggttgctctgaagagctccctttggtgtagcgtggsaagcaaagcatttttgtttgtttgtttctgtttgattttggagcatatgctagaacagaattagatgtactttcctctatttgtaggtaagttcatctttctccttttttwaattgtaaggataatatagattaataataaaaatggggaaaatattggtatgatgtaggagacctgataaactcatatttgaattgcacttctgttatttatcagccttgtgatcctggataatttatatgatttctagatgattttttcccatgaacctttgtcaaagaggattaaatgaatggatggatgtagtatatatagtgaggtactcagcacaaagggaaggggcctcaaatattttatatggtgtcctctactgcatacacgtcatctgacttttggtggtgtgtccatgttaacaatgaagtctctcccaagaattcagactgctttctgagaatgaatctagtcatgaatccctcccatacagagtatagtttcagccatagatagaaataaaccaggtaattgcctataaaacagactgaagagatgggagcactcaagatgcaaacaagataatctgggtgtaattccagggaaaagggattggaatgaaattgtaatttaggagactgaaatctagttgattgtatcataatattcttttttttttttctcttgagacggagtcttgctctgtcgccctggctggagtgcatttgcatgattatcagctcactgcaacctccatctccggttcaagtgattcctgtgcctcagcctccctagtagttgggactacaggcaagtgccaccatgcctggctaatttttgtattttttttttagtagagacggggtttcaccatgttggtcaggctggtctagaactcctgacttcaagtgatccgcccacctcagcctcccaaagtgctgggattacaggcgtgagccagcgtgcccgtcctgtatcataatattctaccgagggagagattatgggaacaagcagggggttgtcagcttaaaacatggtaaacatagtaaaagacaggctgagtgcttgaagttggcagagtttatcttgccttatttatggcagaaatgaatctaatgataggaactgtagagatggattttttttttttctttgagatggagtctcgctctgttgccgggctggaatgcaatggctcgatctcgggtcactgcaacctctgcctcccaggttcaggcaattctcctgccttagcctcccgaatagctgggactacaggtgtgcgccaccatgcccaactaatttttgtatttttagtagagatggggtttcaccatgttgggcaggatgctctcgatctcttgacctcctgatccgcctgcctcagcctcccaaagtgctgggattacaagcgtaagccaccatgcccggccgagatggatttttttatgaggaagtgatagtacactaaaccttcatggmcaaaaaaagtatctcaaaatagttgtctcccttttgttctgattccatgtggaagcaatttctgatcactaatgatcactaatgtaattgttcaggtatttaatctgaaggcagcagytagtttacctagatgaggactgagaaccttccaggtataaggaaagtatatcttgtattgtaaattaataaactggtgtgtgtctctcyctgaaccagtcactaaactgacagtctggttaatgtattttagtatataagcatctgcatgctaaagactcctgcacttatatctacagttcatacccttcccctgagctacagacttggatatgcaactgcctacctgacatttgcattcaagatcgagggcgagggctagactgtgtcttttgtttaattcactgcataagctaaggccttttggtaataagccattaatgtctcaactttaataatcctgtaccccgttataactatttttatgtttccttttggtctatgtccatatraggcatagtttcacattatttcatagtgtatatattatttaattataaaaatatataaatttttatgattggaaataatgcatgctcatcatagaaaaatagagggaaaaacacacaatggaaaatgatcattatgtgctattactaccatacagagataggcactgttaacattttggtgtatttcttttttttttgagatggagtcttgctttgtcaccaggctggagtgtagtggcatgatcctgggttcaggcaattctcctgccttagcttcccaagtagctgagactacaggtgcctgccaccacacctggctaatttttgtatttttagtagagatggagtttcaccatgttggccaggctggtcttgaactcctgacctcaagtgatccacccggctcagcctccraaggtgctgggatcacaagcatgagccaccgcgcttggccaacattttggtgtatttctgtatattcacatatgtgtacacaatttaatatgttgagattaagattatactgtatatttaaaatktgtagttttttgcacgtaatggaccttaaacatttccccattaaaaaaatattttctataaacatttaatggctttattctgtcattcagatgtaccacataatcattttaagttgtttccagtttttcrctgctaacgcttctagwctggtcatgtttatccagsagagagctacctgtaccaaaaataaaataaaataagtacaatawaataataaaatagaattwaaaaaaatgccggrtgcagtggctcacacctgtaatcccagcactttgggaggccagggcgggtggatcaagagatcaggagttcaagaccagcctggccaacatagtgaaaccctgtctctactaaaaatacaaaaaattagccgggcgtggtggcaggcacctgtaatcgcagctactcgggaggctgaggcaggagaatcacttgaacccaggaggtggaggttgcagtgagcagagattgtgccactgcactccagcctgggtgacagagtgagactccatctcaaaaaaataaaaaataaaatacatatgtgtgtgtgtatgtgtgtgtatatatatagtttactctcactgactcttagatatactctaaagacccatggaaattcagttgtagcataaaataaatacatttatagcgtaaaagagcaaaatatttcaaattaacttgcttaagctacttaaagacaaaaaaagttcatttgaaatcttttgtcattttttcactggttatatggaatcaggtgagagaaggacaagttttgatgccattatttctatgtggtactccagtaaatagactttctgttttagggaagaagaatagtgttccctcaagtatattaggttcaacattaatttccwtcataactttcattagcaatagaggaaagagatgaattttaaccagtagaggacagttgcagccaaaaacaagtcaagatgaagggcttcccctttatgggatctgaatttcctcttcaaactttaaaattaggctagttggctcattacatcataggggaaaaaaataaaccccatttgcatgaatttcaccaaatttggagattgtgtgttgatctaaaattaaaaacataatgtatataaaacattttagaggccccagagttgtttagataggtaggctatcaacctccagaatcagcttatgtaggtatgtgggatgtagtgatgatggatagagaaagtagtggctcccagtaggagctctaaacagaaagggcaggtattttgagtttcaggcatctgcaggcatccatgtgcatctctctctctctctctctctctctctctctctctstgtgtgtgtgtgtgtgtgtgtgtgtgtgtgtgtgtgtgtgtgtgtgtgtgaaagagagagtgggagaatgagaatagaggtggataaatttcccaagcaacttcagggagggcagttattttagacaggatgactgatttttattcattcagagtaattatttatgttcattttctccagaattgaagtaatcctctattattatttattatcgaaaataaatgaaaaggttaacttgtaatactataaccactgttggcatttcaagtcatttctttctaatttttaaaatgtttttaaagcatttgtaatcatactgtataattttgcattatgcttttgttatttagtatgggaaaatgctagatacctacagtacttgatacataataggcactcaataactatttactaaagaaggaattattgacttgtttaaaaatcttttgaatggaccatcaagcgactataccataattgacctaattgttatcctttgttgtttctaaattttcctgtcttaaaaatacattraatattttgatgtaaatcacttttcctgaagcatatagtttttcctatgtataaagttattttcttaggacaggttcccagaagcaattaggggtcaaataaagtattagaactcttggttgcaaggggcagaaacttaattgggaaacattttggccaatcttgtcaggggcttccaggataactctcagttatgtttctcagttatgtttctgccccttgtctctttcctctattgctgggacttcagcctttgctgtattgggtgctcagtttatactcccagggctttgcttcttgtttaccagtgctcttctttgcttttctctggcagactcttgccatctggtggtaaagattggctttggcaattttttgtagtttacaatcctgatttgtatatgtaaaatgtaataagcaaggtggttctcccaaggaaaggattttggacagacaggaaaaggatgtttgctataagtgttttattaaatgttattaaaatattatttgatttatttttgagacaaagtctygctctgtcacctaggctggagtgcagtggtgccatcacagcttactgtagccttgacttcctgggctcaagccatcctcccacctcagcctcctgagtatctaggactacaagcatgmaccaccacatcctattaatttttctgtaatttttctagagatggggtctcactgtattgcccaggctagtcttgaatacctgggctcaagcagtcctcccaaagtgctgggattacaggcctgagcttccatgcccagcaattatttcattttaaattatttttattaaatgtgtaatagtttattagtattttatcattcttgatagccattgatagtgacttccaaaagtttattctagccttagtaatagttcttattttactatcctttcaccacattgaatattattttctaaatactttgctaatttaatggattaaaaatagtagcttgtttatatttccttttttaacttaacgtctatcataaatattttttgtaattaatttaaatggctgtttacttttttattccacagatttactatgtttgccatgctgttttccagttattgttcattagggttgttttatggttcttatatattttttaacctctgtaggtaataataccgcaagttatttatgtatttatgtatgtatgtatgtatttatttatttgtgagatgggggtcttgctctgtcacccaggctggagtgcagtggcgcaatctcagctcactccaacctctgcctcctgggctcaagcagtgctcccacctcagcctcttgagtagctgggatcacaggtttgcaccaccacgcccaggtaatttttgtatttttggtagagatggggttttatcatgttgcccaggctagactgcaagttatttcagctctgtaagttttttggctcttgtgagtttttcctttgaaaaaattctattgatgatattcttgcatcaaagataaacatctttatctttttgctttcaaataattttaccaacttatatttctatcagtattgtgtaactacagatattttatcacatctttactaatatggagcattacattttttaaattttttgttttttatttttaaaataagatttacaatatttaaaaaatagagatggggtctcgttatgttgaccaggctggtctcaaactccttgcctcaaggtattctcccatcttggccttgcaaagtgttgggattacaggcgtgagccactgtgcctggcctattttatttacttatttttttgaaccaaggtctcactctgtcacctgggctggagtgcagtggtgcagttgcagctcactgcagtttcagcctcctgggctcatgcgatcctcccatctcagcctcctaagtagctagagctacagrcacgtgccaccatgcctggccaggttttttttttttgtattttttgtagagactgggttttggcatgtttcycaggctggtcttgaactcctgagctcaggcaatctgcccgcctcagccttccaaagttctgggattacaggcatgagccactgtgccyggccactttgagcattattttaagaatgtttgttggttgattgggtataaaaagcagtctcaatttgcagttttaagtttcacgcttttcagtaaaaattttcatttttcccttgcattccccaactcttaccttcttatccagtttagagtataaataccagatatgccctctgctttacgttatttcttcttcttgtgcccaggtctggtccatcgaactcatatgtcatcctgtcgggtggataagccctctgagatagtagatgttggagataaagtgtgggtgaagcttattggccgagaggtaaagttctgtgcggctcccttgtggttagaaaggattaggaagagctgggatttttgatattttatgatagtgagtgtgtaaattttgttaattgtgctgataatcttatttttaaatcctgccattagaatctattctgaattcaaaccttctggtagactgtcctgcaaactcagaaggaatgatatgagctataaaagtgtggtgcaataagtgcacgtttgtaaaacttccctccctgaagtttacccatagggtgggccggaggagagaaaaaagaaccaaaaagagagaaggaaagttgacctatgggacaagtgtttatcacagacttcaaagaatacctgccagatacacttcagtttgggacaaaacaaaaagaacacagatagtttacagtcattttccctaatatctggcaccatgcaatgtgcagaaagtgaaaaaaatctgaaggaccctgttactcacttgagggtatgagggctgtgggtgtgggccgaccacaggagaaataagagcatacactgagtcctgttctaccagagacagcacrggagataggcatgaaagaactattattcaacaatatttaagtgcttaatatgtgctaggtttgggagatataagagcgaaccagacaaaaatgatcccagctattatggagttaatatagaatataagtagagacaatttttctttcttttttgagacagggtctctctttgtcacccaggctggagtacagtggtgccatcacggctcactgcaacctcagcctcctgggctcaactgatcttgccacctcagcctcctgagtatctgggactacaggcacgcaccactaaacctggccttttttttttttttttttttaatttttttgtcaagatggggtctcactgtgttactacccaggctggttcaaactcctgggctcaagtgatcctcctgcctttgcctccccaagtgctggaattacaggcatgaatttccatgcctgaccaagacaaatatacataaaataattgcaagttatattaagtgctatattgggttcaaacactattggaagaagatttctagttgtcaggaaaggactctttgaggagatagaatatgagctgagaccttaaagaaaaggaactagtcatggaagacttgggataggaacattccaggcagagagaataactgatgcaaagaccctgaagtgaagaagtgcttcatgtgctgcgggaagcaaaagaagaccaatgtgacaaatgtcttcatgcttaaagaagctctagaccaagtccagaaggagatctagtctcttgaagtattcaaaaacctattctggacttagggatatctcaacaaatcactatgctgaacttacctggaagaaaaacttttattttctgcctggttacttccacaagccatggattttttgagctaccatttttgtctttccctcagagggacaagaatgagattaagactgtttcctaaaattcttctgccacagggtctacctgttatgcttatttgtatctgcaatgttcctagcacagtacctggtccattaaagaagctcaatgttatgatgaaaacgttgactcttaattttagactggccatctaaatgatgtatttaaagtttttggtgactttttttggtctctttcagatgaaaaatgatagaataaaagtatccctctccatgaaggttgtcaatcaagggactgggaaagaccttgatcccaacaatgttatcattgagtaagtaaaaggtttggaaaggtgaaaattcttctgcctcccaaatcataaaatggtttagtaaatcagactgaactggtaactctaccatttatggactttgtgatattgataagttacgtaacctttgcaatctttggtttttagaaatgtaaaatgaagttagaccaggcgtggtggctcacgcctgtaatcccaacactttgggaagccgaggtgggcggatcacctaagaggtcaggagtttgagaccagcctggccaacatggcgaaaccccgtctctactaaaaatacaaaactagaaatttgctggatgtggtagtgcgtgcctctagtcccagctactcgggagactgagtcatgcactagagtctcttgaacccaggaggcagaggttgcagtgagctgagatcatgccactgcactccagcctggatgacagagtgagactcggtctcaaaaaataaaataaagtaataaaataaaaatagttaacaccttgctgcatagagttctaagatgaaacgttaacgtaccaagctcctggcattggagtgctccatcaatggttttgtttcctttcccttaatctctttctgtttctgccctttaacgagttagctaataagcattcatgaagaactattctttacctctctcccagtgatttctgcaggtggggttacgtgggtctcttccacatagagaccacgtggaagggtagagtaatccaggaacaactccagcggggtttagactcccacatcttgggatacactgtgctctgaaaacaacatcttactttcgttggctcttctgacctttcatttaggaatgggaaattatctatgtaggacaatgtctggcaatacaaggaatgttctgtctgtctcaagtctttcttggatttctttttttttttttttttttttttttgaratggggtcgcccaggttggagtgcagtgccataatcacggcttactgcagtcttgacctcccaagcccaagctatcctcccacctcagcctaccgagtagctgggactacaggcatgcgccaccacacctaatttttattttgtagagacagggtctccctatgttgcccaggttgttcttggacacctaggctcaagcgatcctcccaccttggtctcctaagtgctgggattacaattgttagccaccatgcccaggcttctttcttaaatttctcatcggaggttcttggatccctaaagtctcttaaagggggatcttggagggttttttttttttttttttttgaracaagtttcactcttgttgcccaggccggagtgcaatggcacaatctcggctcaccgcaacctccgcctcccaggttcaagtgattctcctgcctcagcctccacagtarctggrattacaggcatgtgccaccatgcccggctaattttgtatttttagtagagwwggggtttctctatgttggtcgggctggtcttgaactcccgacctcaggtgatctgcccgtctcggcctcccaaagtgctgggattacaggcgcgagccaccgcgcccggcccttggagggtttattaactgtttttagtgttttagaaagccatccaaaattctatgtgtgtcctcaggttaaccatgctgttattttgttgcttttgatgataaaatatcacattgtttgtcttatgttaattaggtacgctcaatgacaattatgtcattgatgaatttaaaagacaagaaaaatgatagaatgttatttgagtgggatcttattggtgaaaagtttggaaagccttatgtttatagttctgagcaaaatcactttgaatttgaaggaattttatctggaagtaagggaaatgttattgaatacatactgcagtgccaggcattttatgtacattcttgggtacataacaacctgcaaagtggatgttatctccattttaccttatattcctactttatagcttggtgcctggtgataagtaacttacctgtggttacatagaaaattatcagggactcaaaactcagtctctctgaccttaaagctaatgcccttttcaccacaaaatgcttctcactcttgcatgtgacttacagaacttttcatatttctgtggtttagtctctaaatattaacatgtttgtaaggctgattattgacaaaatactgtcagtaatagtaggaatcttttataactcagagtgcagaagtgtttaaatctggctgtggttcaagttagtgttgggaaaaggaaaaagaaaaaattctgatgattgcattgtaataaatagcttctgctccaaaaaatccaatgctatatggactcattaaaaaatagtgaaatttcccaaagccacccttacagtgataaaatataaaacatgtaagataaaagagctaaccctgtttctcagaaaatgggtagggaagggaaagggctccctggttttgggctgtctctgtgtagaactatttttagtaataatcaagtggctgaaacagtaacttttgttgtaaattatgtctatagctgcatccaggaaggaagcatggcataatggaatgattagaggatttagagctagacttgaatcagaaagagtactggttctgctccaaactaatatatgactttgagcagattaattagtctatctgaatcttagcttctttactataaaaggagacagtaacatatatctaaggaatgcttgagtgatttaagtaaaatcttatttgtaaggagccagcttcatgtctagtctatggtagacatacatgtagctacttgtagttattgttttaaatgccgctttgttttatcctctaatatctgagattatagcaccttttcttttttcctcatactatggtgtacggaaccacacctttgcttttgaaagagtgtgtgtgtaagacccacaaaaacagagaccatgacttgtctgccattgtgcctgatgtatagcatccatagtattcatttagtttttttgagatggagtctcactctgttacccaggctggagtgtagtggtacaatcgtggctcactgcaactctgcctcctgggttcaagcaattctcattcctcagcctcccgagtagctgggattacaggcatagtccaccatgcctggctaatttttgtatttttagtagagacggggtttcaccatgttgaccaggcaggtgtcaaactcctgacctcaagtgatcccccgcctcagcctcccaaagtgctgggattacaggcatgagccactaccgctcagccctagttagtactttcatttactcatttgttcaacaaatataaggcaacttgtaataaatactaaaagagtagtttaaagcagttgtccccgacctttttgtcaccaaggactacttttgtggaagaccaatttttccatggatagggggctggaatggttttgggatgaaaccgttccaccttagatcatcaggcattaaattctcatagggggtgcgcaacctagatccctcacatgtgcaggtcacaatagggtttgcactcctatgagaatctaatgctgctgctgatctgataggaggcggagctcaggtggtaatgctccttcacctgctgctcacctcctgctatgcagcttggttcctaacaggccatggaccagtagcagtctgtggcctgggggttagggactccctgtttaaagaaagggttctaggaattcacttgaggaggaatagtttacttcaggccttgatggtcagagaataggtggtatttgagttaggttttgaagaacagataagatcttgtcagacagcaggggaaggaatggtatttcaggcaaaagaaatggtttgaggaaaggaatgaggcagaaaagcacatagtacatttgggaaccttgtttaaggaaagaagaggatatggtcaagtactagaatggaaggcttgaaagataatttagggtcagattgtggagagccatgaatatcagttaaagaatatgaatttttatttatttattttttgagatggactcttgctctgttacccaggctggagtacagtggcatgatctctgcctcccaggttcaagcaattctcctgcctcagcctcctgagtagctgggattacaggtgcccaccactgcgcccggctaatttttgtatttttagtagagacggggtttcaccatgttggccaggctggtcttgaactcctggcctcaagtaatccgcctgccttggcctcccaaagtgctgggattacaggcgtgagccatcrcacccagcccatgaatttttttaaaaaagcctttggacagagaggcttctcgtcagattaacctccccaggaatcccattgtctggccttgccctgttatgctcagtattctcatcctgtcttcagccatccatagtttgttagccacctttcattttccataaaaatctaactcttatattcatcccctcaggtcccaaagtgttaatgagataatctaataagtgactctgtaaatggaaaggggctaaaagcagtttccaattaggcatagcctgcaaagtacagtctttttcttttttattatgatcaagatcagaattgagtgtagtatataatttttttttttttttttgagacagggtctttgtctcccaggctggagtgtagtgatcatagctcactacaacctcaaattcctaggctcaagtgatcctcctccttcagcctcccaagtagccaagactataggtccatgccagcatgccccactaatttttttttttttttttttttttttgagacaagagtttcactcttgttgcccaggctggaggcagtggcacgatctcggctcactgcaacctccacctcctgggttcaagcaattctcctgcctcagcctcccgagtagctgggattacaggcatgtaccactatgctcggctaatttttgtttttttagtagagacggggtttctccatgttggtcaggttggtcttgaactcctaacttcgggtgatcttcctgtctcggcctcccaaagtgctaggattacagatgtgagccaccatgcctggcctaatttttaaattttttgtagagatgacgtcttgctgtgttgcccaggctgatcttgaactcctggtctcaagtgatactcccaccttggccttccaaagtgctgagagattataggtgtgagccacaactgctggtccatagggtagtctttagaaaaagcacatatgacttaactctgttaaaatttttcatttgtatgtctccctccattgccagactattagttctttccagaaaagaatcatgttttgttcgttttggtatacataattattactatcactagtattagcactggcgttatccacttactagctgtactgaaaaaatgagattaatctcagaatctgtgctgggatggattggaggaagaaaactggaggcagggagaccagtgagggagttattactctagatgaaacatgatgggagcctaaactagaatgatggcaatgaggacaaaaagagagacrtgggtgactgacacatttgttgmattgagtgttaagtgggaagtatgatttggtttgtagtctggkagaagccacagagtattggaattgattgtcatgggggttgcttaagctgcaactcacagccacttgaaactcatctctacaaatagataggtgaaagcaaaaaccatgtttgtgagttccttgagttatgtcctcaagtttctgcctttgttatgggtttttttttgttgtttgtttgtttgtttgtttgtttgttttggagacagggtcttgctctgtcacccaggctggagtacagtggtgcagtccgctcactgcaacctcaatcttgcaggcttaagtgwtcctcctgcctcagcctctcgagttgctgggactacaaacacaagccaccatgcctggctattttttttttttttttaagtaaaaggaatctgtactgttagaaattagaattgtgattacccttkggggaggcaggtaactagaagggagcatgagatgggcttctgagatgctggcaatgttctgtttgtttgtttgtttgtttgttttgagacasagtctcgctctgtcgcccaggctggagtgcagtggcgcaatctcggctcactgcaagctctgcttcccaggttcatgccattctcctgcctcagcctcccaagtwgctgggactacaggcgcccgccacctygcccggctaattttttgtatttttagtagagacagggtttcaccttgttagccaggatggtctcgatctcctgaccttatgatccacccgccttggcctcccaaagtgctgggattacaggcataagccaccacacccagccttaatrttctgttttttgatctgagtactggttactttggtatgttcaaattatgaaaaatcaagtgagctgtatacttatgacagacatttatatatatatatatattatattatatatatatatattataatatatatatataatawwawatatatatatawawtatawtatatatatatatattagttctcacactgctataagaactacctgagactgggtaatttataaagaaaagaggtttaattgacttatagttccactgcctgtataggaggcatggctggggaggcctcaggaaacttacagtcatggctgaagggtgaaggggaagcaagcatatcttcatatggcggcaggagagaaagagagagagagcaaaggggaaagtgccacacacttttaaaccatcagatctcatgagaactccctcactatcacatgggggaaatccgaccccattatccaatcacctcccacaaggtccctcccccaacactgggaattacaatgtaacatgagatttttgtgtgtgggggaacacagagccaaatcacatcaacatatatattatattttggtaagaagtctaaaaatgttttaaaaggctatgagaaatgcaacaaagagattaattctgtctgaggggctcagaggaaaagacttgatagaaggagagctagtaactgaactgagccatgaaatgtctaggtatagtgaagtggtgagrtgagagtcaagtggggaaacagagcatttcagagagggggagaactgcctgagcaaaagcactgagccacatggataagagaaaatagacttctttggccagagcatattgtgtgagtaaagatgaggctggaaaagtagtttagagacaractgtgaaagaccttgaatgccaaggtaaagaatttggagctgattttctagaaagcctttgaaggtcttttaaacctatgagtgacctggtaagggttgtagggtgtttagcatgttgagtaattatatattttcatcctctgtgcattagtgagatgaaggttagtctcattcgtaattgytaatttagggctatttcacatcattgcatttactgcctgtctcgttctgtcaaaaactttctttctttctcccctttccctgccaaaaacaaaaamccaacatacaaccttaccttgtagtatctctggccatrtctcttaagggggccggcagtyggtatctttttcattataggcaagaagagaggcggaggcgatccttccaggattacactgggcagaagatcacccttgaggctgtcttgaacactacctgcaagaagtgtggctgtaaaggtagggtgaagcctctgccctttccacgtttctctccttgtggatggacccttttctggaagaaggaggcagcccagtgtgagtttagtttaccctgttttttagccaagtgatggcctttgctgttttttccaccagactcacatcagagttcatggggtgatacattttctgttttcttttctgagtgctggccctaccagatactataccactaccaccactcctcccaccccacccacagcatatgccttgtctgggcaagacccccatgaactatgccaggaggagtaagagtgttggattatgattaacactctaattttatctccaaggatgatgattctgcaaaaattaagcaacttagacatatataacttaaagatccaagtcagactctcatctttatctctttaatgtcagagttctgaatacaatatctttttacaggatattgaataaagaatacaggatagtcacttctttttagctctatttcctcaggtttcctctactcttactcaaattttaaaaggtctttcagcctgatccctagttggagctataatgagagagattgccagcttctcattttcaggttgacctcaattgtcaccccttctccctagtcttccrtmtaccctactgtgtgatttttctacaataactggtagcagatttgtgccctggttgaarttgtggggttttaagcccctatttatcattagcatagaggggagaaggaaaaaataaaattgagagaaagaatacctcctcaggaaaactgtgggaacattccaggtatttggaaaactctgctatatttccctgccaggtgccacccagctgttggacccagaggtacagagtactttacagatagctttttttgttgtttttaaggtagggtcacccaggctggagtgtagtgttatgatcatggctcactgcatctttgacctcctgggctcaagcaatcctacctcagcctcctgagtagctgggaccacaggtgtgtaccaccatgtccagctaatttttaaaaattttttgtagagacggggtttccctgtgttgcccaggctggtctccctgggctccagtgatcctcctgcctcagcctcccaaagtactgagattataggcataagccactgtgcccagcccacacatagctttttgattatctcatacaattcctctgtgcccctaagacaggatctaccacaaactcagacacaactagcagtgtagagcatagcatctgttaaagggcccctcagtaccactataggctcagtgaaggtgggggtcttttaaccttaaccgtgtccaacaggcattacataaagaagagaagaataatgagaggtggaatttgtcccagttagtaaaggtcaggtcaaaggtagttggttttggtgcagcagaaagcacagggcagggaggcatgagacccaggataagtttgaactctgcttctgtctatatgaccttgagctacttctcaaatctgggctttcatcttctacaaatgtaggatggatttaatgatttccaaggtgcttgccagacctgacagtctgtaaatgttcagtgcccctaggtgactgtgcctatttctctgtgtgttagcttagatgtgagtgcccacttgctaccagctacctacaagctatattcctttagggcttggcctgccactcagctccttctgctaaacatcctgctctctggagcagtctttgattgtcaggaatatgttccaaaatagatcttaaaaaattaataagccccattgttaatggagggcagtaaaaacctgcatcctcatatsctttgccatttcgagaacagtaccagtgttccccacagccctgagaccagctgctagtctggctgtggttgagtgagcagtgtcatgttgaggtggtagaaaatctaccctgaatcaaacagctgctttgaatgaactcaacaatatttcctgagccagctagcccatttcaggagacttggggaaagattcacttgctgagaagagagactacttcctttttctataccttttctacttttyttctgcaggccactttgcaaaagattgtttcatgcaaccaggtgggactaaatactctctgatacctgatgaggaagaggaaaaggaagaggcaaagtcagcagagtttgagaagcctgaccctacaaggaatccttctagaaaaagaaagaaggtgaatgctactttgcttttattttatcatgtctttttcaagttttaagatgaaaatctgaaaagcctcatgcagcagtacacacctgtagtcccagctacttgggaggataaggtgggaggattgctcgaggccagaagtttaaggctgcggtgcgctrtgattatgcctgtgaatagccactgcattccactctgaacaacatagtgagacccaatctctaaaaagaaattttttttgttaaaaaaaaaagaaaaatgaaaatgtgctttttgcagaaattttagaaatactgaaaaacataatgaagcaaaccaagatcttctgtaacctttctacccaaagagactcttattggcattttgtggtatattctaatcttttttctttttttgagacagggtctcttgcagtggtatgatcttggctcagtgtaacctctgcctcccaggttcaagcgattctcatgcctcagccaactgagtagctggaactacaggcatgcgccaccatgcccggctaatttttgtatttttagtagagatgggggttttgccttgtgggccaggctgatctcaaactcctggcctcaagtgatctacccacctcggcctctgaaagtgctgggattacaggcatgagccacgacacccgtccacttttttctaggtaataataaatacagatatatatagctacacatacatgtaaatacaaaattgtggtcatactagctatagtttatacctttttttcatttcacttatcaaaagcatttcctagtatccttaagtgttcaaaaacttgatttaaragcaacataatattctaccctatggctgtatgatgatatatttaattatttttgtattactggatattttttattacttccaacctaaatttttggccacatctcttattgttttcttggataaattcctaagtaagattactgagttagggctttaacgctcttgatacattttatcaaattgccttccagaaaatacttatctgtccctagcagtgtatcagagcacctgtctcactgaattccatctcctatatctactayttatggcagagcaattcataaaacagatattattgtggtccagaaagaaacagtgcatttgtagcatgctacacagacaataaaaactattctgtaggttgatcaggaaatatttcttctatcgtgtaggatttttctaactatggccagtatattgacttttgtttcgtttttaaatctttggcaaacttttgttgaggggtcattttgtaccaggcattgtaactctaggaatacaaaaactgatgaggtccttgccctcagtggttattatctatagattaagtattatcttaattttctgggtgaggaaaagttctctataccattacaagaattagccaagtatatgaataataatttcccaatctatatattctctttctcggtgatcctatccctcctgagactttagctgcattattgacttccacattcttaactaggatgccatgggtacctcaaactttggctggagtcagtcaaatccagacttgaggctcttctgtgctatttactagctgttaatttggggctttatttttkattttctttttgttttttgagatggagtgtcattctgtctcccaagctggagtgcagtggtgtgatctcggctcattgcagcttcygcctcccaggttccagcaattctcctgcctcagcctcctgagtagctgggactacaggcgcaagccaccatgcccggctaatttttgtatttttttagtagagacagggtttcaccatgttggccagggtggtctcaaactcctgacctcaagtgatccgcctgccttcgcctcccaaagtgttgggattacaggcgtgagcctccgcrcctggcaaacttccgttttttcattttcgaagtgggattgttgtgatctttgatgacaatgttcttgcagagggatgcctgactcccaaaaataagatataaagcactgacaagtaagttcctaattagagttggctgttatgacagccctaattatcttttttagtcctccttcctaaacatacacacacacactaccaccatcaccagtaccaccaaaacccttgtttctacctttctatcatatattattacctattaatgtcagcaatactctcccartctcccaagaaagaaaccaatgtcatttattttcctctccttttccatcccacatctagtcagtcaccaagtcctggcagtggtgccttttaagtgcatatctcaaaattgtttatcccattcccattcccactgctactgtacagtttatcccctcacttctcttacagtcagactattgaacgctgtggcctagggagttttaaaaaatacatatttgccctctacctcttaggtaccatgtttacagggcctaggtctgggcattttttttttttttaaagcaccttttttggctgggcatggtggctcatgcctgtaatcccagctgaggctggaggatagcccaagtccaggagtttgagaccaacctaagcaacatagggagaccctgtctctataaaacatagagaaaattagctgggcatggtggggcacggactgtggtctcagctactcaggaggctgaggtgggaggatctcttgggcccaggggtcaaggcagcagtgagctgtgattatgccactgcgctcctgtccgggcaacagagcgagaccctgcctcaaaacaacaacaacaaaaccacctactttatgtcactgcccacttctgttcattgttgatttctcaccctatgctttaactctgaatgttggagtgttccaagggaatctcatcctgtcctatggttttaaatatcatccctatactcataacccccaaattaagtgcttgtgtctgtattttatccaaatctgcattgctattcttgactttttctctggaactccaaatttagttaatagactgcctacttgacgtctacatctggttgtctagttagcatcaagtttaacatacctccaaaacttaattttcctagccaaagctgttctttccacatttggccctgtctcagtgattggaactcattgacccatttgataagccaaaatctgcagcctttttgtatagtgttttttgtttgtttttatggtaaaatacacataacataaaatttaccattatagaagtgtactgttcattggcattaaatacattcatattgttgtacaaccatcactgtctttgatctcgagaactctctatactcattaaacaataacgccccccattcacccttcctccctgcacttgcaaccactgttctactttctgtcttgaaaccatgtggtatttgtttttgtgactggcttatttcacttagcataatgtccttaaagttcatctgcatcatagcatatgttagaattttcttcctttttaagcccaaataatattctgttctatgtatttattttttgaagcagggtcttgtgctgttgcccgggctggagtgcagtggcacaattatgtctcactgcagcctcaacctcctgggctcaagtgatccaggagtgtgccaccacacccagctaatttagtttttgtagwgatggagtcctgctatgttgctcaggctgatcttgaactcctggcctcaagcwgtcktcccaccttggcctcctaaagtgctgggattacaggcatgagccaccacatcgagccccattttatgtatataccacattttgcttatccatttatttttggtgaacacttgggctgcttccatattctggctattgtaaataatgctgctgtgaacatggatgtataaatatctctgagaccccactcttctttctttttggtatatacctaatagtagaattgctggatcatatattctgtttttaatattttgaggaagcactctgtttcccattgtaygttcccatcaataatgcacaagggttcaagtgtcactacatccttgccaacacttattttctgggttttgtgttttttggagagtagccatcctaatgcgtgtaaagtgacatctcattgtggttttgatttgcatttccctaatgattagtgatattgaatatcttttcatgtgcttattggccatatgtatattttctttggagaaatggctatttaagttctttgcctattttgcataagcttgtttattttgttgttgttgttgatatgtaggaattttttatatgttctggatatcaatcccatcagatatayggtttgcaaatactttcttctaatctgtggattgtttttttactctgttgatagtgtcccttttttccctatcagatttagactttttaaaatagtggtaaagaacatataacatttaccatcttaactatttttaagtgtacagttcagtaatgttgagtatgttcatgatagtattcattgcacaaaaaaattttaatcttggttaagttaaacttacctttttttctcttattgctgatgcttttaatgtcatactcaagaaatcattgccaaatccaatgtcatgaagcttttcccttatatttttctaagagttttgtagctttagctcttacgtttaggtctttgatccattttgagtttatttttgtatatggtgtacagaaagggtccaaaatttctttgcatgtagatctctagtttttaaaacaccataggttgaaaagactgtccttttccccactgaatggtcttggcccctgttgaaaatcatttgaccaaataagtgaggatttattctatcactggtctatatgtctttatgtcagtaccacactgttttgactactgtagctttttagtaagctttgaagttgggaattgtggatcctccagctttgttctttttcaagattgtttgggctatttggggtcctttgaaagatttcatatgaattttaagatagatttttatatttttgcaaattctgatagagattgcatttaatctgtagattgctttggatagtatggacatttcaactgtattaaatcttccaatccatgaaaattggatatctatttgtatcttctttaatttcagcaacattttgtaattttctgtatacatgtctttcatctccttggttaagtttcttcctaagtatttttttctttttgatgctactgtgtgaattgttttcttaattttttttctgattgctccttgctactgtatagaaacacaactgattttagcatgttcgttttgtattctgcaactttgctaaattcacttaytcgttctaacaggatttttttgtggactctttagggttttctacatagaagatcatgccatctgtaaacagaaataattttcttgcagatttagttttttttttcttttgaggcagagtcttgctgtatcacccaggctggagtacagtcacatgatcgtggctcactgctgccttgacgtcctgggctcaagccagatctagatttttaactgtgattctatttgtatgttccaagcattattctttctcttttaaccttttagaggtaaatggtacttgttacattcctaaagagggtatatggatatctcacttctgtggatctttggttgagttctttttgctgaatatattgagtataatttgttattcctttgtttctaaagctgctttgagatatgtatttcagttcacaaaaccaattactgaggctctatctgctaggtatgaggctctttatgacctgcttagtcaacctactacccagccctccattgcctttcacttagtagaggaatggtctgatgaacaatggcagtaataatcattatacattattatttcttaaaagtatctttggccgggcacggtggctcatgcctgtaatcccagcactttgggaggccaaggcgggtggatcacttgagatcaggagtttgagaccagcctggccaacgtggcaaaaccccgtctctactaaaaatacagaaattagccaggcgtggtggcgagggcctgtaatcctagctacttgggaggctgaggcaggagaattgcttgaacccaggaggcggagggtgcagtgagccgagattgcgccactgcactccagcctgggcgacagagtgagactccatctcaattaaaaaaaaaaaaaaaaaaaaagtatctttgtgtatatgaacttctaactcatgagtcctctttgattaaaaagtgttctagggagtgtagaagggtaaaactttcctcttgatgcccactatttctaccaagatagcatttagcatcgttgtcttttcacctcattgttaatcccgtcattaccttttatgcctcatatttgtttagtgcttacagtttataaaatacattsctgtttttgtttctttttatcattatacaattctatgagatagccagaacaggaattattatcccaccattttacacatgagtaaaatggagcttcagagaaattgacgtaactcaccggaagtcacacaaatataagagataatgctgaaaaaataacccatgtcttcagattactaacaatattcttttctgtatatcacacttcaaccatttatttaactcttcaattattcatttactgaacaaatatgtattatctgcttcataggtatctagcattgtgttaggtacttgacatatcaggactcatcaagtcagtttttggtgggtttttgttttgttcccagctaccgttagccatcatgtgatgttatctattgatttgtttctgctcacaactgtaaatcaagattccagccctcctgtttccttttaccctctaaatcttggattccagcaggaggttggttttccttaacagtaaaatcttctgtctgagatggcttttttggtgtgtgagtggcagatttggacacttgtttcaggactagtcagctctgggagccaaatatggaactgagtagatttgtgaaggaacatgcctttagcagtccatgctcctgagttggacagtggagagtaggaatgcctggcgtgtggaagggcatatatgatagtaactcatgtaagttcagttaatgcatttctaacagttaaaaaagtaactcatgaaataaagatcatatggtacctacactcaagcggctaatcatataaggagaaagataagcagccaagctatgtatggtggtaaaggatagaaacacattccaaggaggttatttgattttatggacatccaaggacaggaaatgcagtgtagtcaggccacctaggactagaactggaaagtctcattaggttctcatctccgtttcttcacaagtctgtttcattacctcactttttatagtctagtggaagacaatgcaaagcctctaagaagacagaaaatggtagacctgttgaggaaccaccagaaatagcccaggataaggaaaggatgtcaccttttacaaataatgcctggtacttaataggaatacatgcactaactacctgtgaatagatagacttcataatctgtgctctctgtcattccttgggtgtcttcactcagtgaaacctgccctcagattgcagagtaataggtattgactcctgctgctggcagtgggcgataatgaaaggagcaggggcaggagtaagaataacagatcttcctaaccttgagccttcccacgtcttttcattaaaacatacatgtattgaatgccttttcccacaagtccaggatgcattgatttagttgtgtgcatctggcaccatgaacaatttttgtcccagtgactgaatgttataaataatttttgttgggcataattagaataaaaggaaactgtgtgttgcaattggaaatgggctatgaagtggttggtaaaataggaatggaggttttgtagtgaatccctggataatcttctgatgaacttgtggtctgtgctttactggcctctttcattaatcatatgccatcgtaggtctttctgaatyggtgttatgttatgaagaagtaagtgccttggggaccaagctgcccactgattatagtaaactttagatatgtttgattcagaatataattttcttttgattttaccatatgattttctgctgtaccatatatagaagaacaagaaataggaatgtcattctttggctgcagtgttggctctgtcctgctgtccagagaacttsttctggkgcctatatagagaaaggttgccagtcctgagcccactcagggacacattctctgcctattcagatacagcagagagcgttgcccagtgttgcctactcagaagccttcagtggttcgctttcttctatgacataaagtctaagttcctttaagactcttcacaatctgcccagcttcctagcatcatttcccaccagtctcttcccacacactatactccagcttcattcattaatagagcttctactgtgtgctaagctctgttctggccattgcaggtaaagtagtgaacaaaacaggtaaaatccctatcttcatggcacttagattctaatggatggggtcgattgacacagataataaactggtaaacaaatacaaaatagtaaaaataatgtatcaagtagtgataagtgctatagagaaaaattaatttgattaagggagatagggagtcctagaatgaggatgtggggagcaggtgactttcattttagataggatggtaaggccaggcctttctttttttttttttgagacggagtttcactcttgttgcccaggctggagtgcaatggtgcgatctcagctcactgcaacctctgcctcctgggttcaagcaattcttatgcctcagcctcccgagtagctgggattacaggcatgcaccaccacgcccagctgattttctatttttagtagagacgggtttctccatgttgttcaggctggtcttgaactcccgacctcgggtgatccacacacctyggcctcccaaaatgctgggattacagrcgtgagccaccgcgcctggcctgggccaggcctttctcataaagtgttgtttgagtggatatcagaaggaagtgaggacacaagctattcaggtaagtggagagagagcatttcagcaaatgtaacagctgatgttgggaaagagtgtggcatgattaaagaacattaaggacgccagtgtggctacagtgaaatgaatgaaaagagagtggtaggagaggaagttagatcagaaggaacccagatcactggggccttataggtgattgggaggatttcatctttcacttgagtgagakggatgttattagaggttttgagcagaggaatgacatgatctgacttccttttaagagaattattctggctgctatgtagaaacttagatggtcagaaagcaagagtagaagcagtgagttgatagataatccagatgatggtggcttggactagaatgacagtggcaaaaatgatgagaaaggagttgaagtgtgtatatattttgaagatataagagcaggtgaggatggcatcaaaatttttggactgtgtaactggaagatttgagttaagagaaggaatgcaggagaagtaagtgtgggagtagggagcagtcaggagtttagtttgagttgctgtctacacagatggaaagatagctgggagagtctaggtttgggagggggcggggcatagaaattgagttgcctatcagatattcaagtagaccatagagtagacagtggatatatagtttggagttcaagggagaggcccaggtaagatatataaatttgggagtcatctacatatagatggtatttatgttcatgagatcacctgcagagtaaatatagggaagagactgagccccagagtgctcaacacttagaggttatggagatgaggatgaactaacaaagaagacaggaaaggaacagccaaggaagtttgtagaaaagtaagagaatgtaaaatgtggtagaaatamcatgaatgtgttctaggtaagatggtctgtatccatcttgactgaccaagtaaataagacccaataattgaccactagatttggccacgtggaggttactggtaattttgtttgtttgtttttgtagagacagggtctcactatgttttccaggctggtcttgaactcctaggctcaagagatccacctgcctttagaaaattaagtactggctgggtgtggtggctcatgcctgtaatcccagcactttgggaggatgaggcaggtggatcacttgaggtcaggagtttgagaccagcctggctaatatggtgaaaccccgactctagttaaaaaaaaatacaaaacttagctgggtgtggtggcatgcgcctgtagtcccagctacttgggactacaagcgattcaaggagaattgcctgaacccaggagccagatgctcyagtgagccgagatcacaccactgcactccagcctgagtgacaaagcaagactccatcctaaaaataagtaaataaataaaatagaaaattaagtactcaataaatgttcactgctatattctcttttttcagtttttgcttttatttttgtttttctgtcacactgggctgctgctatcctgtttcagaactatagtgaaaatgggtasactagctgctctaacaagggatatgtgcttttcctagagagcagtctttgagatgtttgaccagtggcttccttccagtgcccccttgacctgcgccatgggctcacactcctatgccatttaaaaactgttttatgtttaattttctatttccatctgatacttgaatccatgtcatttttttttaacccattatcttctgtttcccttctcacttgaatgaagttgagagagcagaagcttggttcatcttctggctctcagtcttcccccaccccaactcccaactttgcttttgaactacaaccttttttttttttttgagacggagtttccatcttgttgcccaggctggagtgcaatggcacaatcttggctgaccccaacctctgcctccgggttcaagcaattctcctgcctcagcctcccgagtagctgggattacaggcatgtgccaccacgcccggctaattttgtttttgtgtgtgcgtgttttgttttgttttgttttgagacagagtttygctcttgttgcccaggctggagtgcagtggcgcgatcttggctcaccaaaacctccgcctcccacgctcaagcgattctcctgcctcagcctcccgagtagctgggattacaggcatgtgccaccacgcccagctaattttgtatttttagtagagatggggtttcttcatgttggtcaggctagtctcgacctcctgacctcaggtgatccacccaccttggcctcccaaagtgctgggatcacaggcgtgagccaccgcaaccaggcgaactacaacttcggatgtgattgttcttttgttctgtagctcaaggctagacacgtagggaaaatgacgccatttgctggaggattggattgtctttgttcaggctgcaaaacagcttttgcatcaaagttgaggtctaggagaaggccacctccttgagcccttcttgctagctagagtccatgttccrgcatgccaggactctccagtgatttgtttttatcttccctcctcctgagccttcatctttgagagagaacaaagtggaaatagtgccaaactctgtgttataaagtatagtggttttgccgctttagccttggtcgactcactttacatttctgagttgcagtttttccatctgtaaaatgggaataataactcatgaaktttgactctacagactattattgtaagataaggatgcaaaaagcttgataaactaaagcactgtttaggtgtaaggcagtattattactctcctcacttctttatccaggctggaccaggcttgcagggaactggtgccagactctgtattttcatttttactttcccaggatattcacctatataaggggcagaacccagtgaggctcctgaccccataatatcttgtgatggacttccatggtcttgccatccaggaaggttcagcaacatagctaaactattgatttgccaactctcagctcctcccagccatggttgttatagctcggtaatgtgggtctgagaagctttgttgccttctctctactccattggagatgccaaggaagaattgttatttcatcttcycttaaaactttgacttgtctcctgtagatgcttggccaggctgtcagaacatcctrggagttaatgagagaaaaatacatatagctcccactaagtgcctataatgtgtcaggcactatagttagtgcttatcttgtttaaacctcatagcatcctttgaaataggtacttattatttccagtttactgaaaagaaaactgaggttcaaaaaagttaaatcccttgttctaagtcacatagtgagttaagttgcagagctagaatttgaacttaattctatcttattccaaaatttgttgttctaatgaccataccatgaggcctcctgttaccatacagaaagaggggccatgtgctacataggaaaactcaggagatttccattcatatgatctacatgaagatcccaactgcgcctatgcgatctgggacaagtggctttcaacttgtccaagccttagatactatctcattaacttgtcaccataggtgttttttttggggagagggggagattatttatttatttatttatttatttattyatttatttattttgagacagggtcttgctcagttgcccagcctggagtgcagtggcaggattatggctcactgcaacttccagctcttgggctcaagcgatcctcccacctcagcttcctgagtagctgggactacaggcccgcgtaaccacacccggccaatttttgtatttttagtagagacagggtttcaccatgttggccaggatggtctcgatctcctgacctcatgatccacctgccttggcctcccagagtgctgggattacaggcatgagccaccgcgcccagccagtagatgttattcttatcyccagtttacatttgaagggaacaggcctcagtgagttcagatgacttgcccacggatgcagaatagtaaatggcagagccagaactcaggtccaggtctatctaacacctgcttcagtgttctttccaccatttttcacagccagcttctaagacctggtgtatcattcagctagatttatagctctgaggctgctggttggaagctggcatccttttctgctctctttctcctcccatactttctccctcttcttagaaaccttacagaggcaatataggtatttgaaattcaaagaagagatttatgccgtgcttaaaatctgctcatactgccccattagacacctgggaatctgcctctcgtcttttgtatgggtttgtactgttactttggtagcatgatgtggtgggtatagttttgggaatgttctttctcagctcttttctttatgagtataatcttgtgaggtggctgtaaagttagagatgatgaatattcaagggtagcaagtacaggcttattatttgatggcagttatttcccctggyaccaggatctaatagaaaccagaatagcagtcaggagttctaaatcttttactcctattctttgaccttgratatgtgagtcactgtttctagatagactggctagtctttaggggcgcctttcagctttaatgtcctgcactttaaaaaatgaaagtaataagatacttgtttaaaaaaaatcaaattagacagaagtatttgaaggaaaaagtgaaagacccatatcctttcccccattcagttcattcccaatgtgtaacacttattaccagtttgatgtatccttttcagtgttctctgtgtatactaaatatacacaagtrtgtgtaacatacacagtttatatcatgtgcatatatatataaatacamatgtatatgttatacgcactggaacctacaatacatattatgtcttggttcttttacttaacatgttttagctatttttttcttgttggcacttaaagatttactttattgtttgcaatgtcttatactttttttttttttttttttgagacggagtctcgctctgtcgccaaggctggagtgcagtggcacaatcttagctcactgcaagctccgcctcctgggttcacaccattctcctgtctcagcctcccgagtagctgggactacaagcacctgccaccacgcctggctaatattttgtatttttagwagagacggggtttcaccatgttagccaggatggtctcgatctcctgacctcgtgatccacctgcctcggcctcccaaagtgctgggattacaggcgtgagccaccgcacctggccacaatgtcttatactttattaagtgttggctggacatggtgtctcacacctgtaatcacagcacttcgggaggccaaggtgggcagattgcttgagcttaggagtttgaggccagcctgggcaacatggagaaacccaactccataaaaattagcagggtgtggtggtgcatacctgtggtcccagctacttgggaggctgaggtgggaggattgcttgagcccaagaggttgaggttgcagtgagctgtgatcgtgccactgcactgcactctagcctgggcaacagagcgagactgtctaaaagaaaattaagtggtcccctattgattgtgtgctataatttttctttttttctctttttagagatgagatcttgctatgttagccaggttgatcttgaactcctggcctcaagcattcctcccacctcggcttcccaaagtactaggattacaggtgtgagccactgcacctggccaattatgtgctatgattgttaaaagcaaatatacacatacagtgttgatttttaaaattttcttttcaggagaagaagaaaaagaaacatagagataggaagtcatctgactctgacagctcagactctgagagtgatacaggcaagagggcaaggcacacatcaaaagacagcaaggcagcaaagaagaagaaaaagaagaagaagcmcaagaagaagcacaaggagtgagagtataaagagtgtagggggtggttgagagtaagaaaccaggagcctygtgccttgagactcctggaaagactcaatagtgagaatatagcctcccaccccattaacttcgctcccatgggagatggcttccsctcatgcaacaggcaggtttgkgagttagaggtcaaaagcagctgcctgaatgagttgttgtttccttatcactcctggtccctttgcaagtgaaccctgcagctcacccattcattcacccaacttccttcattcagcaggaggycctattaccctctccagctgccactgccagagctggattcctgtaaaggagtccaggctagagccacagagactgttgtggaggtgagttcggctgtagttagagtgattggacccttcctattggtctgtcctgggccaactggtgggtgatctctgctgcatccaacatgggagcagagactggcagcaggaggggggaacatggtgagaagtggtgctcacttttcccattcctcctaacatagttctactatgctagaagtggcatccagcggccacagctagaaaacagtctgcagtgtgacttaacttgtgtattgcattccagcagaccactgaaccagacagcgaagccaagatcattgttctactttgtatttactactgtgtgaatcagttgattctacttcaggtccttgcttaaattcctgtcactaaatggaaatgtgtttggttttaaacttactgagttatttttcctataatccttcttcctgggtaacttayagacttaaagtcactgagcctgcattagctgacaaaaacatttaatatgttaccttagaccttggagagatgcccagcagaggtacagagccaaaggcactagcagatcactgccttcttgggagatcacttataagccctcccttttgtaatgatcagatgccctcttccctcagagttgattagagaagcagtaagaatttgtagtcataagtactagcctggtgcacaggtcagcagtcctcttggccagtggtcattttctcccaccaccatggtacaagcctgggttctgtgccctgaacctgaattctggaaagggagagactacagcatttcacagagaacagccagacccaagagctttcagtgtaggatgggcctgaagtgacagttcaatagccaaacctggggaagccccatcactgactgaactaggtcatttgaccatggagggggggcagtgtaaaggcaacgtgtaggtacagctcttttattattaaatgtgtaaggtgatcagctgattaacaggctccgagactgtccatttcagtctcccatccagtgcttcttcctcagtaaccttcaggccgttatttctgcccactctytgacacacaggataaaccaagactcccagagttatgttaccaaaggcaaaaaggcaactgggtggccttggctytgctttattgacctcagagcaccctatgagtgcagttaaaaaaaaaaaaaaaaaaaccacatacaccatgggaactggaactggatcccggtcagtggcacctgaccccagaagaattcgtggatttgtacaaaatgcagaggaagaaatgaggcaatgtggtgctgagtcgaggggtagccgattggcagagtagtagtcagcaacagtgcagtcaggtcatgcctctttctcrtaagtgcgagtgcaaactgcagtgccgtgggtgagtgtctggaaggaaagacagagtgagatggggggtggagccaggaacaccattgcgagcattctaccctcccttcctcctgataattgtcacttgagtacctactatgtgccggctatatgtatgtatgtgtgtgtgtgtgtgtgtgtgtgtgtatacatacataattttttttttctgatatgcacagcaaatccttaagayaggcattgtaattcttattttagagatttggaaaaaacgagcctttagagaggaagtaatttggtcaagatcctgagtgtttttccttcccttataccatttggcttccttcatccttagtgtctaagatggtgcctggcrtatagttgacaaataggaaaaatatccagagactcaggaaaggactgtgtttggstactaactccaatccttccctaacttagagtagtgccagggccagagccctgtacctcccactatccggtctggcatcatagagccagacccatggcctcaccatagttcagctgccactgagaatttggtcctgcatatcacatccccaccaaagctaggcacctcattccaaacttcaaggggacccctgtcccacatgagtacaagaatgcagttaacaggttatgctgacccaagaaggtgtgcagtgaagatgcctaggtgaaaacctgaggccctgtggttaggcagaatccacagttggctgctctccctgggtctggggggaattcagtcaaggctagattctccaagtgaagtccccaagcttgaacagatctgccagcctggctgtggtacttcctacccaagcagtagtcaagtagtttcagtaggccagacatagaaagcatgaaaatggggtaggactagaatggggaagaaaggactgtactgtcattcagtgtccccaccagtcacgagcctgtccctgcaagtgacaatgcagtcctagggaggagaggaaagggaatgctgagataggcaatgggagcccctcctagagggcctgggatcagatttggccctgttttctacttcttcctgaggkgaggcaaggtagaaacacaggaagagcaaacaaaggacatggagcacctgctgtgttcctcaatcagtgatgctttgtgctgtgcatacactgtctcttacaggcttcccagcagccctacaaggttggtattattaatacccgttttacagttgcacttggaaaaggtgatttgcccacagtcatgtagcctataaggtaagatttgagttccggcctgtgtgagtccaaagccactacacagaaaattcccacctgataccaccctgacccacaaccactctcttgtcccagcttctacagctctcaggggaggacttggctttttagaacaggcttggctgaaagagcagtagtaataaccaatcagatatagctccaaagttgcccatcttaccaggatgagttttccatcaattagctcccgcacaagtgtggtctcttgcccgtcccatttctgcaggtgaacaagtttccctccatccagtgtcacaatggactgtggaaagagggtagaggcctgagctgtgatcttagtcaggaattgaggggcagggtggggtctggacactgggccacagagsacacagcctttgacccaaactagtgatggtgtgaggacaagagctcaggcaatccgcctcccagctatccctgcaagacatctagttcacctccagcctctgctccactactgcctttctggggaagaggccttcagatattaggcaaggagggagaggcaggcagtatggtggagccagagagcctggctctgagaagtaccacaagccttcaagacagacacttatctgtactctaggtgattcccgtagcctggtcccctcagatacaggtgggatttactagtctatccctgggaaagactgactgaggaggaggagtagtcctgagaatctttatccagccttgtggttagtccacataatgtctaaaagacccttagtgataggaagtattggataattagacttcctgccctgtattcctacaccttttcttggtccacatcatgtgacctctttagccaacaagagggcagcaaccacaaagtcctgtgactggatgcccttgaagtggttcctcagctctgggtgctgccagcatacatacatcagctggttctcatttggcagctcttccagctctctttcctaggagtttgggggccacaaggccaggctaagggatcctgatgagcaaggtggttcagtaggagaatctgagaaggttctgtgtattgtttaggtgataaggggtatgaggcctgtctcttagtgtgctcttttttatccttaccttactccttgttctcattcccctagttttttttgcctactcagagtagatatttttgccctaggcattccacagggctattgtgtttaattggggttcttgccccttgagaaagtaggcaagtccaaggaggtatgagcaggtggtggggcagccacctttatccaaggtagactgccatctttgggcaccatccccagctctgctgccagccacctgtgtgatcctgttctttctggggacagctatgaggaagaggaaacagctgatggggctgaatgatagtgtcatgatagaacactgctatagggacaccctatagaggtcaaagcccttaagttctctcgctcccatgcctggcctggaaggctgaggcaagctgccaagacagccactgcagggtgatagaaccctgggaggaggggctaaggcttggtgggaagacactgcaaacacrttcatgacaaggtgaatgccctatcacggaacatagctcttcctgcctgtcagctggcaacactggaaatagtttgtcagggtcattggccatgtctgggagttagaagttgaagcggcatctgagtaggtgcttctagttcctggctgccttttttgctgctggaggtcacaatgacctcactcagtggagggccctgacttctgggcatcattcctaaagcacttcaggtcacagccatggccacataactctgccatctatggaaggggaaagaaacctagagctactgcataccttgcacagggtcacccagctggagctggagtagatactgaggtcagaagaacatcctggctctgtgctgcccattccgaggcagacaatagatgaatcccaagaagggagggaagaaaacaagaggacagaactgacatgtatttagcatcagtggcattccagcactacacaggctttatgaatcttgtttcatttaaattccccatgatagtctgcccctcagggtgcaatacyagggagccaagactaccagcctattctcttttagagtctcagcactctccattccccacccctgtttccctgacttaccttgaccttcctgtcatctgctgttgtctcatcgaactccacccccaacttaaagctgatctctgtgttcttgaaggtgctgtgtgttyttagggtgagaatgtccccattcttttcgatgattgtggtaggcttggtcatgctggccacctgcctggtagcaaaacccacacctgagggtagggggaaggttatgagtatatgagctggggtagagaagcagtgtacaagaaactcaatgaataactctcaggcctgggtatggggaagtggaggactgtatctttcaaagcctttgcatgggaattttaaaattcagtcttgcgcttagttctgtttggtgaacacagataactgatcccattagatgagagatacttaaggaacagcagtgccatagcaagtcagtggcagagcwgggattagaataagctactattgggccaagtgtggtggctcacgcctgtaatcacactttgggaggccaaggcaggcggatcacatgaggccaggagtttaagaccagcctggccaatatggtgaaacccgtctctactaaaamtacaaaaaattagccagatgtggtggtatgtgcctgtaatcccagctactcaggaggctgaggctgagaattkcttgaacctaggaggtggaggttgcagtgagtcgagattgtgccactgcactccagcctagccaacagagtgagattccayctcaaaaaaaaaaaaaaaaagctactattaagtactatgagctttttgtgtagtaagaactgtacatgttatctcatttagttcttcctgttcttctgaagactgtttccacgttacagatacaaaaacagaggtaaagcccrgggtcacaaatctgagattgaagcccagaattgtctgagtccagagcttgcttaagtgctcagctatactacctcccaaggctggagcataaggctgccttccagggcacctgaaaagctctcaaagccttaggaataaggctgaggaaagaagagaaacatagactttcccttccaaagccttaggcataggagttttccaactttggaagtttttaccctgaaactaagaagtgttagtgctcttgtcccttatacatggcaacccatcattttcaaagcctgttatctatgatctaggagttaggtacaaaggaagtatttgtcctattgtgcagattcaggaggagcctaaagcggtagcaacaatgagttagactcaaacccgtctcctgactcccagtctaaggctttacagagactctcttcctgacccaagcatggcttccttgggtactgggcaaagtcctaagtgtcctgcaaccaagtaaagaacaaagaactaatcatgactgccccctctccccccagcagcttaacattgaactgtcttccaaggcaaaggtgaggcaggaggcagcccagtgtagtgaggtggtgtgtgtaaagtctccaaatgtacctggctacatagtgcttgctggaagctaggtactctgcacatgccctacatgggttgttttacttaatgcttgtaacagcctcgaagcgtagattatccccagtttacaatgaagagtgcgaagtgtcttgtcgaaattcaaagagaataaactactgacatagatttgaacctcggctccaaaactgwtgactattttcactgggcgattctgtccagcacatactcaatccaggccagcagttgtgcctgtggtcactggtactagacgggacctctttgccccttgagagccctaggtctacagcaggaggggcaggggctgcctctgctgttatgctgtcagcccacccttgcttggccagtgaggaacttggcattgccccttggtatcaggatgagtcaggccaatcacactcccttgcacagagcaggaccttgtcacggcactgggagctctgttcacttaggatctacccagaggtatggagtgtttgaaaaggaaaccactgcgggatgagtgagggtctgaaccaagagaaactaagaatattgagctgacagaatttaggagactcagggagatctgggttctacttagaaatgaagccagcactacttactgagagctgagga

SEQ ID NO: 9929 - DNA, 25740 bp, Homo sapiens
  misc_feature (6523)..(6523): n is a, c, g, or t
  misc_feature (17472)..(17472): n is a, c, g, or t
atggtggtgaataaagaccaaagggtcctctctacctttgaaaactctcctggggtggaggagaccagggcaggatagacagacctctgcagtaagagagtggttgggaaacccagggtgttccttggatctcaggatctgagccatcgagggaagagtggggctgctaggcaagtggattagggggtctggatagggccccacaggtgacagggagcctgcagggcggatctggtgatcatgggagccagagggagtggggacagtgcaggcagtattggcaggagggccagtgcagaagggctggtagctcaggcagtgtgggggaagcactgaagcctgtagtccccacttgggggctaggggtttgctcactcagcaataaataactgtgtcacatcaaatcctaaatawamcactacaaagtgagagttactgccactctgttcttactgacaccgtccagctgggagtttaggtggtagaggatccagggggaatgttgaaatgggaggagtgggaatgacrtctggagacaaaccccagaatgagatgaggattgaaaaattatctttattatcttgagtgggagctggagctggaagtctccagcttctccctccaacaactcagctcccattgtacccatctggggacttagatgaagttacaggtcagttattggacagctcacaggcctctgtgatggggggagggaaaaagaaggacagaagggaagtccagggagaaaagcaaagttgatagtaatggggtgggggagaacgtgttctttcattccctgtgtcaaaggggagtctctaaggctcttttccctccacgtatgaccctctgccccctttatccagtgcaaactcagaaacctctcttttgagtagcccagaacccatcctgcctccctcaggtgacatcacagctcttagccacatccctctggtgacatcacacgagcctctttcaccctgtaacaccagaagacttkgtgagtcctaatcctgttttatgagattttaacmccttaccttgattcctaggagtcaataagaaggctttggagtccaggcaggaagtcagggacttgaattcctccacacacttttcgggaggatgtggtgagcgatctggaagggcaaggtggggtcaggccagtcaaaacccctggaagcacctagctcttcctgggagggtrtcataggacccagagtgagkagttctcctgccctcccttgtttccctccaacccttcctgccttgtatccctactcactgtagaggagaaagcgctggtaaccctggcctgtctcattcagcatgattccacctgggcatgagctggaaaagagctcagtcttcatgtcagggcggcctgtcaaggcaggtgggagaagtatgagaacagagatgcagaaccaaactcaagggagggtgagggctgggaagaaccaaccttcagttctgagatctgtgctcccttcagtcaggtggtagatccatttccggggcacacagagcccrtctttcctgcagaggtggtggtggcaaggaggaaagaatgagcatcaccccaaccatagtgtcccagcttcttttttttttttttgagacagagtctcactctgttgcccaggctggagtgcagtggcgccatctcggctcacygcaagctctgcctcccgggttcacgccattctcctgcctcaacctcgtgagtagctgggactacaggtgcccaccaccatgcccagctagttttttatatttttagtagagacggggtttcactgtgttagccaggatggtctcgatctcctgacctcgtgatctgtccgcctcagcctcccaaagtgctgggattacaggcgtgagccaccacgtctggcctgtcccggcttctatttactccattgtatttgttattgaagcccagctctccttgggtttcaagctaccaagcattggttaggcacatctttctccagagggcaattaatacagccactgaattccgtgggccaagcatagtagatataccagctaagaggccagctcttggtgggtggattctcacactttgggcagagactgaacccagtgatgcttctgcctccttaccactcacatgcggatggtagcacgaaggtggagctgcatcggggcagagccagcagccatattgaagacaatgttgtccacagggtcaaaagttgccaactcctccttggtgggagctgcccctgcgataaagtaccactggcccaagtggacctctgggaactggagagacaatgaagggagcaaaagagggtgggttccagcacaggatgggttcaacctcttcatcagtcaaaacagcaagatttaggggtagaggtgttggctgccttcctctttccaactggggattggatccatgacaaagagtcattaaatgacttttcctctttgcccctccccagtcaacctgggtaaccaccccaccccccaattctgccatgcctctgcattgatggccacagtactgatatttttcttcttgctttcattatcacaacactcacacccccttcctctcttcctttcccaagatggtctccagtcatcctaggccatccacccaagtccctcagagcctccaccataggcttccccyaatctcagtccatacctccttcccatccacgcccagagttgtcagttgactgtgctcagggcactggtagatggagttaaggataataccatagaagtagagcagagctgcccaaatttggtggaacatcttcaggcaggagggagctggtgctctgtgtgccttaactgctctctcccctactggctgctcagtccactctgctttcagctcccttgcgttcgacccttgaccctttcacctgctaatgagtaacttcaaccttgttttccaacccaaacctggattacttagtgtttgggacttcctccccctcttccggatgcaaccactccatagtacaccctggcatgtccagggtttctcaggagttatgaggagagctgagctgtccagggagaagcctgtggtctttgaacctgtatctgagctggttatttgttgcactgtgcagcactgaagggaagtagcttgactgggcctctcattcattcacttagcaaactgttttgaatcccaagtcccagttgtttcccaagaactagctaatccccggggacataaaaaaacgaataagacatagcccctgatcttgaagaagtcgttagagggaaaactagctgtgtagacaaaccattgcaatacaacttggtaaatgctttagaacaggtatgatgcaggtgctggggcacggtggattgctctctttagtttacaattagaaaaatatgtataccctggcagtgttcactgacacattcactcaacatttattactacaaagaggctatgtaatctggctgttagagaggatagatgttggtgtcaggcagaatgtgtccaaaccctaactacaggcagggcaggtagctcatgcctgtaatctcagcactttgagaggccaaggtgggcggatggcttgagcccaggagttcaaaaccagcctgggctacatggcaaaactctgtctctacaaaaartacaaaaattagccgatgtggtggcacacgcctgtagtcccagctactagggaggctgaggagggaggattgcttgrgcctgggatgtcgaggctgcaatgagccctgattgtgccactgcactccagcttgggcgacagagactctgtctccaaacaaacaaaacaccaccaacccctaactgctatgtctgttttttcatctgtaaaattggcaaatcatcaatcttayaggattaaatgaaataatgcacataaagcccttagcaaagacttgcacatggtaaktccaaagtatatatttgctataattaatagtaatgtttgcaaagcacttagtttctggtgggtaataagttctcaaataataggcagtaagaattgccaaataggttgtccttggatagcaccaagtgactggagcagttaatgctgtgagagatggatcttcctcgatagattatttatttacttatttatttttaagacagggtctcactctgtcgcccaggcatgactttgacttccccggctcagatgattcccgagtaggaggtataggtgcacgccatcacgcctagctaattttttgtagacacggagtttcaccatgttgccccaggctggtattaaactcctgagctcaagcagtcggcccaccttagcctcctaaagtgttgggattacaggcatgagccaccacacctagcttgataaatttatatcccatggactgccacaaaaaatttgccragggctgaggcttgcgatttagttaaaaaacaaacaaaatttgggtgaccagtatattagagtttattaatactgttctattttggtgtaatgtttgmatttttttttttttttttttgagatgggagtctcgttctgttgcccaagctggagtgcaktggcrcgatcttggctcactgcaatctccacctcccgggttcaaagcaattctctgcctcagcctcccaagtagctgggattacaggcgcccgccaccacgccaggctaatttttgtatttttagtagagatggggtttcaccattttggccaggctggtcttgaactcctgacctcgtgatccacccgcctcatcctyccaagtgtgagtcactgcgcccggccgaaaatttttgtaataaaaagctaaaatgtggttaggcacagtagctcacacctataatcccagcactttgggaggccaagtctgcaagaccaggctgggcaacatagcaagaccccatctctataaaaataaaattagccaggtgtggtggtgtgcatctgtggtccctactagggaggctgaggtgggaagatcggttgggctcgggaggcagaggctacagtgagttgtgattgcgccactgcactccagsctgggcgacaaagcgagaccctctctcaaaaaaataagctaaaatgttaacagctttttattggggcagtaaagtacaagtgctcgatctggagtcctgtaggcctggatttgtcaattctgacacttatgttcgtctaagtgtactcacttaaaaaatgttaaaagctcgttaaaaggctttttaaaataatacacaaaacccgtagtatatgggctggcacaagtgctcattaaacagctgcttattagaactcttaactaaaatataaccaggacctgggtataaactacgaatcccagaaaggttggacaccccaacagcgatgtgtctttctggaggactcgcagtttcgcggggccgaggcccttggcccagggcaggttaagagaagagggcacggagaggmggtaatgcctccacccccggccttcggaagcacgctggccggcctttaaattccccacggtcagggtcttgtctttctgtccactcggactccatttgctcccaattctcaaactcggaagcgcctcttttcttgacaagtcgtgcaacttagtagcacgtttacttttcctaaaacgtgtcatgtccccttggccacacaccgacgaatgtgacgcccacagcccttaaaacgcccacccggcagaaccgaaatctagcccaaccaagcaaccgagaacaaaattgaccagtgccgcccccaaacgcctactgaaagagtaacttccggaggcacagaagaaagggcgcagcgagggcaatagggtggagaagagttttagctggctaggacagtgccgcctgaaattatcagcctgccaagatttaaacatagatgaatgtggcataatcccccatctccaaagtccaaggtccatacgaccgtccatagcccctctcgaggcagtggtagagtcccagctggtgactgtttttcaggcatttacggtagccacctcaatcttctagcgctcmagcgcgcgcacagacgtgaacgccgccagagggggragggggtggggcgatgcttaagtgtccacgcatccgtagtgcgacgcacgcaggcgtagtacggtcccccgggcgacagcggtggcggctcctcggggtgctcggctccctcccacmtaggccggccccggcccgactcgccctcagaaactcactgtttggggctgcggactttctcgtcgtgccccacaaaagtaaagcttggggacctggggggagccggaagtatcgcttcgagatccccaaatactatcggggaaacggaagtggccgtcggtggcaggtttgggggagaccggaagtgacggtccgtggggaagtcgggggcggagccgcggggtggtgkgtgkgkgtgtgtgtgtgtgtgtgtgtgtgtgtgtgtgtgtgtttggctgtgggttagttgtgccgttctgctggaacaccgtgggaaggcagtagacgcgggcagtcagctagcaggtcngtcgccccgtgagtgccgtttcgggtctatagtgagttaggagggttcgatgggcgtggcgcgcgtgcgcgaaaccactttctccgcagagtgtggggcgaccaccgctttcgcgttgtcccaggattttccgacctctggggcgcttgtcctgccgtgaccggtgatgacactagtctctggtctcgtgcttccttcctaatctgactggctccctgcttattgtgattggcgtcgtggagcccctcccacctctcgtcctccagctccctaagccgtcgatctcctgccctttgtgtttctctccctgtgccccggaatcagaagggggatggggacaggtgtgaatgtgtgtgtgtgcaggagawactttttaggtattggggcagggattaatgctagggagtctttcgggtacactctggtctgggcaacagcgggccytccttccttcgttcttctttagagacctgtcggccatggagcctaatgatagtaccagtaccgctgtggaggagcctgacagcttggaggtgttggtgaagaccttggactctcaaactcgtacctttattgtgggggcccaggtgagacacctcactagttctggaagacacctttagcttttcctcgtttaggccccttagcctgagagatgagcttgattttctggtcaccagattttctttttttttcttttttttgagatggagtcacgccctgtcttccaggctggagtgcagtggcgcgatctcgaytcactgaaacttccacctcttgggttcaagcgattttcctatctcagcctcctgagtagctgggattataggcgtgtgccactatacccagctgatttttgtatttttagtagagacggggtttcaccatgttggtcaggctggtctcgaactccttacctcaggtgatgtgccctcctcggcctcccaaagtgctggtattacaggcatgagccaccgcacctggcctcagattttmtttttattgatccctttgttygtattccagtagaacgttttctgatgttttgtgagtgaggctgattttgttctgtcctccacatggatagaacttaatgcagagggaaatacagaggaaggaagaatctgtgtgtcatcatcatgggtggaccccaacccaaagggacaggcatggctctggcctttgggaagggaaacagcacaggaaccctaagcaagtgtgtcttactgatagacattggtcaggtctatgctgtgttyttaaagggtagaaatcagaacccataatggagataggkccttgatagactgttgagtgaaattactaatttttatggcatagcttgagtctcttgagcttaaagccttggacatagctatctgtgtctttactcctgtaatacttggagacaaattgcatgtggggtggtccatggttttctaaaatgtgataytacctggatataagaaagccatatatagacttgtgattagatgtatataaatactctggtacttcccaagagtcagtttgtagttaggaaaaatatttctctttttgcttttttttttttttttgagatggagttttgctcttgttgcccaggatggagggctggggcgcaatctcagctcactgcaacctctgcctcctgggttcaagcaattttcctgcctcagcctcctgagtatctgggattacagacgacgcctactaccacgcccggctaatttttgtatttttagtagagacagggttttaccgtgttggccaggctggtcttgaactcctgacctcaggtgatccacctgcctcggcctcccaaagtgctgggattacaggtgtgagccactgtgctgggaccttttttgctttcttatcttcttagtctttcttcaktaacctgataccagaccccatcttctttgccattttttaatcttggaaatcacaggagagtctggtaaataaactggtatcatcttgtgtttggaaaggggtcactgatgtctctagacacatactcccttggatgccagacagataatataatgtccatgtgktttttttttgtttttcatccgtgttatttttcctggatctataacctgagcttcattaagtttatttatttaattttttgagatggagtccctctctgtcacccaggctagagtgtagtgatgcgatctcggctcactgcaacctccgcctcccgaattcaagtgattctcttgcttcagcctccctagtagctgggattacaggcgaccaccatgcctggcttatttttttgtatttttggtaaaaaaggggttttaccatgttggccaggctggtctcgaactcctgacctaatgtgatctgcctgccttggcctcccaaagtgctgggattacaggtgtgagccaccgcgccaagccaaatttattgtctgtattttgacagctgttactttagtttaagggtttgcacagtaatgatctcacggtcaagacaaacgggtagtgattctgtggtggtttttacccctcacctccacaactcggttgtctgtctttgttcttcctctttcctccattctttccattcctgtgcatgcctcttcttttcagatgaatgtaaaagagtttaaggagcacattgctgcctctgtcagcatcccatctgaaaaacaacggctcatttaccagggacgagttctgcaagatgataagaagcttcaggaatacagtaagggggctggggaggcagttcagaggttggggctactgtctggagggatgaactgaggccatgggtttacctgttcatactatgttttggtgtgtgtctatttttctgcagatgttgggggaaaggttatccacctggtggaacgggctcctcctcagactcacctcccttctggggcatcttctgggacggggtctgcctcagccactcatggtgggggatccccccctggtactcgggggcctggggcctctgttcatgaccggaatgccaacagctatgtcatggttggaaccttcaatcttcctgtaagcttatgttccacaggggagggcttttgtgggtagctttggttgtggtagcaccagggaattaataagatagatgcttccatctttagattgggttcagggggccctgtggtgtgctattggtctcagtctttaaggagaaaaggaggtagggctccagggaatgaattggaggtgtggaggccttagtgttggcttctcccagaacaacttcccttaccctttccccagagtgacggctctgctgtggatgttcacatcaacatggaacaggccccgattcaggtattgaggggcctccgagggtcagggaaggggatctgggagaaggaggctgggaggtggggtggacctggctgagagatggctgggacctgatttagtaggtggtagaactcatggcttcatctgyaacctaccctgataaaccttctctcattgtagagtgagccccgggtacggctggtgatggctcagcacatgatcagggatatacagaccttactatcccggatggaggtaagtgggcaaggctggctagggtctctctccaccctccctctcccttttctctcagcctgggagttagggcttcactggccacatycacagggtttggccttcataatctagtcttctctgcagtattcattcttttgggcagaaaaagtatctttgtgaggctctctcatttctgccaatcctcttggtgcctggtatctggggagtttgtttcagacttagtctcatggcatctcttttcaattaaaggattctactctcttaacttgtggaggctgggaaaccaacttgtggaggaaaggaaaccacaatctctactctttgttagaaatttatttacaaatattacagatgctgtggccgggtgtggtggctcctgcctgtaatcccagcactttgggtcgccatggcagggggataacgtgtggtcaggagttccaatccagcctggccaacatggtgaaaccctgtctctactacaagtacaaaaattagttgggtgtggtggcacgcgcctgtaggcctggctacttagaaggctgaggcaagagaatttcttgaacctgggaggcggaggttacagtgagctgagatcatgccactgcactccagcctgggcaacagagcgagactctgtctcaaaaaaaaaaaaaaaaattacagatgcttattatgcatctaatttgtgtcagtcttatgctagttgctagcgagtcggagataaaattgcagagccatgccttcagggagtctagttaggatactttctctgttcagtctcctgtagagtaatcctctgcagcagtcttaccctgcctttggtatcctgactctcccctaccttcagtgtcgaggagggccccaaccgcagcacagtcagccgcccccgcagccaccggctgtgaccccggagccagtagccttgagctctcaaacrtcagaaccagttgaaagtgaagcacctccccgggagcccatggaggcagaagaagtggaggagcgtgccccagcccagaacccggagctcactcmtggcccagccccagcgggcccaacacctgccccggaaacaaatgcacccaagtgagagatggagggaatctttagtgggtggggaatcctaagtgaagtatggggagaaggaaatgaaccatggcaagggagggaaaggattacttggaggtcttagttgaagggttagcattgaggggcgaggaggggctctctcggtataggtaaatgacgctaggacaggcagctgagaagaactgctgctctccctayggcaaggaaatccaaatggtatctcctgagcctgatcggaattctcctctgagttcacgaaggcctgctctctttcttagaattagtctttcaccattgtaggtgcaggattgtggtggggagggtgggagcagttcattttcttctccctatcctctcatgggtgggagtaaagaatagaagctttggctgggtgcagtggctcatgcctgtaatctcagcactttgggaggcagaggcgggcagatcacctgaggtcaggagttcgagaccagcctggccaacatggtgaaaccctgtctctactaaaaaatacaggccgggcacagtggctcacgcctgtaatcccagcactttgggaggccgaggcgggtggatcatgaggtcaagagatcgagactatcctggctaacatgatgaaaccccgtctctactaaaaatacaaaaaattagctgggcatggtggcgggcacctgtagtcccagctactcgggaggctgagtcasgagaatggtgtgaacccaggagacggagcttgcagtgagctgaggtcgcaccactgcactccagcctgggtgatagagcgagactctgtctcaaaaaaaaaaaaaamaaaaaaaamcaaaaattagccgggtgtggtggcaggcaacttaatcccagctacttgggaggcagaggcaggagaatcgtttgaacctgggaggcggaggttgaagagaatagaagctctgctggtccagagaaggattgggccagggctctgggagaccagggagaaagagggcacatgtggtccctgttgactgtgagggtgggaatctgaggaaggctttggctcattgccccttgggtttgtccacagccatccttcccctgcggagtatgtcgaggtgctccaggagctacagcggctggagagtcgcctccagcccttcttgcagcgctactacgaggttctgggtgctgctgccaccacggactacaataacaatgtgagccctttgatggccctgccctttctcctcagccccagtactcccaaaacagaacaggctgaaatrcagataactctttccctccctggaaaaacattgcaacagggccaggtgcagtggctcacgcctgtaatcccagcactttgggaggccaaggtgggcggatcatctgagatygggagtttgagaccagcctggccaacatggtgcaaccccatctctactgaaaatataaacattagctggatgtagtggtgcacacctgtaatcccagctactcaggaggctgaggcaggagaatcgctagaactcgggaggagggggttgcagtgagccgagattgcactactgcactctagcctgggtgacagagcgagactgtctcaaaaaacaaaacaaaacaaaaaaacacacattgcaacaaaacartttctctctaaacctgtaagtgattttgtcctcccttacagagaaggtgataatctttgctgtaagcactgtcctcgtatcgtaccccttgtgcccctgaatgaatttagaaaatgtaaagtacaggagatcagtatatgatgacttactgattcatagtagtgttttaataggatgttccttatgtgaataagatataatttatttgcaaagatttggtctacatgtaaacttccaaggatataactgaaagttttggaggacatggtattctcagtaggcattattgcttttattagtgagatggactccagcttgatattttctgcctttttgtgtttggctggttgtgcgcagcacgagggccgggaggaggatcagcggttgatcaacttggtaggggagagcctgcgactgctgggcaacacctttgttgcactgtctgacctgcgctgcaatctggcctgcacgcccccacgacacctgcatgtggtccggcctatgtctcactacaccacccccatggtgctccagcaggcagccattcccatacaggtgggttagggggagtctggcctgagggagagtgaggggtgttgatagagtgacccagggtagctactgggcctgaaggaggttaggaaaggaggagactggaaacatggtgatgaaggctggagatactttagaggtttatcatgaggttttcttggttaggctcttgtatttttctcacatctgcctgtccatctgtctttttcagatcaatgtgggaaccactgtgaccatgacaggaaatgggactcggccccccccaactcccaatgcagaggcacctccccctggtcctgggcaggcctcatccgtggctccgtcttctaccaatgtcgagtcctcagctgagggggctcccccgccaggtccagctcccccgccagccaccagccacccragggtcatccggatttcccaccagagtgtggaacccgtggtcatgatgcacatgaacattcaaggtgagaatagttgctggcgagaagagcaggatcagcatgatgagggaggttcatgctgaggtgtgagggaacagggtggggaagggagaggcacatgctggtggtggtagcctggggaccagagcagaagcttaagtagacagatgwggggggtgtgggggttggtttgtctttggaggtgtgtttgtgtggtgaagggagtacctctccctgtttagatggagggaaaggcaggctttctgattgggggattatgggcctgaagtatgcctgatctcagaaggatatagttaggccttggccctacctacctcagggccactgtctctgtctccctgcccagattctggcacacagcctggtggtgttccgagtgctcccactggccccctgggaccccctggtcatggccaaaccctgggtaagagtgagggcatcagggcaggctgagctctgggtagagaaagggaagggctgwgtgggtgggttgaaggggtccaggttcaaggttacatcagacccgccccccaggctccaccctcatccagctgccctccctgccccctgagttcatgcacgccgtcgcccaccagatcactcatcaggccatggtggcagctgttgcctccgcggccgcaggtaatgacctggaaggggaggcttgggaggtagggcacagtccatggtggcagctggctggcaagggcctggccctcagccctcttcggtctgtctcttctgccacccacaggacagcaggtgccaggcttcccaacagctccaacccgggtggtgattgcccggcccactcctccacaggctcggccttcccatcctggagggcccccagtctctgggacactggtgagcaagggtcggggakttctagtgcgtaacagtctagggagagactcctgtggtggtgcatggaagggcaggtctgaarttctcccttgctctctatccagcagggcgcyggtctgggtaccaatgcctcgttggcccagatggtgagcggccttgtggggcagcttcttatgcagccagtccttgtgggtgagttttcattcttccccactcagagtttaaactcctttcctagtytgctcactggcactttccagttctttccatattttsttggttcctgctttcctggaatggggctgctgtagtgtcttgtgtcttcaggtttcagcttttttttttttttttttttttttttttgaratggagtctcactctgttgctaggctggagtgcagtgtacaatcttggctcactgcaacctctgcctcccgggttcaagtgattctcctgcctcagcctcctgagtagctgggactacaggtgcacgccaccacgcccagctaattttttatgtttttagtagagaagggggtttcaccatgttggccaggatggtctcgaactcttgaccttgtgatccacccaccttggcctcccaargtgctgggattacaggcttgagccatcgtgcccggccagcttttttcttttttttttaagttacagagtcttgctctgtcacccagactggagtgcartggtgcaatccagtgagttaaagctcactgtaaccttgaactcctgggctcaaacagttctcccacctcagcctcctgagtagctagcagtactakctcctggctagtaattgtctttttttttttctggtagagatggggtcttgctatgtggcctagactcctgggctcaagcagttctcatgccttggcctcccaaagttgctaggattacagccaagagccaccatgctcagcccagctttctttttttggtttcttacagctcaggggaccccaggtatggctccaccgccagcccctgccactgcttctgccagtgctggcaccaccaacacagctaccacagctggccccgctcctggggggcctgcccagcctccacccacccctcaaccctccatggctgatcttcagttctctcagcttctggggaacctgctagggcctgcagggccaggggctggagggyctggtgtggcttctcccaccatcactgtggcgatgcctggtgtccctgcctttctccaaggcatgactgacttcttgcaggtgagtggctggcttgccattcacctcatcttcctgtcccccggcccagccaggcagtggtaccttcttgccattayataaccactgggtaagagcccctagtgacatgttaggggaaggggccctrggaattcattgactctgaacctttcattttaaagatgaagaaaatgaggtttagaaaaagaaagtatagtaattagtgtcactgctttctgacarcctgttcagaggaagaggtaggtaagttgtgctgcctgactctgttaaatacctaccatacttctgctttaagcagtgaagatcagaatgtaactccccatcttcccagacccgttggtttgtgccctcttgatgccgtattatttccgtgtgtcttcattctcacctcactttctgttctttgttctttatttgccaggcaacacagacagcccctccaccacccccacctcctccacccccaccacctgccccagagcagcagaccatgcccccaccaggctccccttctggtggcgcagggagtcctggaggcctgggtcttgagagcctgtcaccggagttttttacctcagtggtgcagggtgtgctcagctccctgctgggctccctgggggctcgggctggcagcagtgaaagtattgctgccttcatacaacgcctcagtggatccagcaacatctttgagcctggagctgatggggcccttggtgagcaaaaaggatgctttggcttgctccaggaaggggcagccagaggaatgtagatggccttggtttaggggtrttgccaaggtgggatgaggttgatgatctggttgtgggtgggcaggccaggtggtaaaggccattgctaacatctgcccttgtcccccaggattctttggggccttgctttctcttctgtgccagaacttctctatggtggacgtagtgatgcttctccatgggcatttccagccactacaacggctccagccccagctgcgatccttcttccaccagcactacctgggtggtcaggagcccacacccagtaacatccgggtaaatgaaggccaggggccccagaactctcctcttttgcacattttattccttatttctgactgcttctctgccaggtaaagctccaattgcccccacacaagccctggacttgttggggtcgaggtggaagtcttgggaggactgaggctttgaactaaacctgttctgtttcctccacagatggcaacccacacattgatcacggggctagaagagtatgtgcgggagagttttgtgagtaacccttctctattcctttcctctcctgggtctggtcraggcagctgcctcctccactcccagtcttatgattcttgattttgggatctttgtgttatcttgtctctcagtccttggtgcaggttcagccaggtgtggacatcatccggacaaacctggaatttctccaagagcagtttaatagcattgctgcgcatgtgctgcattgcacaggtcaggggctggccaggcgggggcaagnggggcctgttgcatgtgcagggctgccacgtgccagcattccctccttgtattttgcccacagatagtggatttggggcccggttgctggagttgtgtaaccaaggcctgtttgaatgcctggccctaaacctgcactgcttggggggacagcagatggagcttgctgctgttatcaatggccgaattgtaagcaccacctagccccagatccttagccttttgtttcctgaggtttccattctctgcagttttcatttttcttttctaaactgacattctgtaacctggatctaatctatttctaaaggtggttgagggttttgtgttctaaatctgctttctgtccctcagcgtcgtatgtctcgtggggtgaatccctccttggtgagctggctgaccactatgatgggactgaggcttcaggtggtactggagcacatgcctgtaggccctgatgccattctcagatacgttcgcagggttggtgatcccccccaggtaagggacctgttgggcgatggggtcagggtacttgagagaactggagagatctgagaggaagtatggtgttctttaatttcacagccrcttcctgaggagccaatggaagttcagggagcagaaagagcttcccctgagcctcaggtactctagagagggggaggttgaggggccagataatgtggagtggagggctgggggagaaaggtttggaggctaaaaattctgaagcctggctcttcccgccatctgacacccagcgggagaatgcttccccagcccctggaacaacagcagaagaggccatgtcccgaggtccacctcctgctcctgaggggggctcccgggatgaacaggatggagcttcagctgagacagaaccttgggcagctgcagtccccccagtaagtgtcaggaagtaatccagtgggtcatggcagctgaaagtcaaggacattactattttctcttttcctccccaggaatgggtccctattatccagcaggacattcagagccagcggaaggtgaaaccgcagccccctctgagtgatgcctacctcagtggtatgcctgccaagagacgcaaggttggttttcctcttccctaagcctctctctctrtccaggtttccccgtcatgcctggaatcaaactatgtagagatggtgggagctcttgttattcagtctcccctcccctcgtttaatgaggaaactttttctgggattcagacttgctcttggttgttgcataaccatacaggacttgaccttagtctgtttgctagcagtcctgtattagttgctcagctgcctaatccccatgtgcttagatcccattttcctttaaggtgggtttcctcttgtggattacctagctctgaatcccggatggcttgaccccttctgcctttcgttttgaagagcacgttcaagcacattcactttagttttggctagtgccaaagagaattaggaaggcatttctgctgtaaaaaccacatcctggactcttaatttcccctctctccactagcatggagactcagtggagtggttgactcatggaaagggtgagccggatggtggcactggatctgacgttgatcctcttttccctcccaaccccctgtcccccagacgatgcagggtgagggcccccagctgcttctctcagaggctgtgagccgggcagctaaggcagccggagctcggcccctgacgagccccgagagcctgagccgggacctggaggcaccagaggttcaggagagctacaggcagcaggtgccaccttgaagcagaatagggatggtctagtgggaggggttgggctagggtccctcttccctggatcccttcagcgatgaactggtcagcctggtgctaccatttgttttcccctttggcatctgggaaggcttgacagtgccaccccgggctatttgacagygtgcttggggggggaaatgttagcttctgagggatggccttgtgtgcttgctgggatcatrgggacttggccagcstttctccaacctgcttrctttttctctttagctccggtctgatatacaaaaacgactrcaggaagaccccaactacagtccccagcgcttccccaatgsccagcgggcctttgctgatgatccttagctctttgctctatggcccttcctcatcaggggaccgtttcccccctcttccttcacagtatttaagaaataaaagtcggatttttctggctgctttctctctacattgtctccattaggtagtgtgtcccttaatcttgtgtgaactttttwaaattaatacttccttggaacactgttgtgttctactcagcacgctaaattgtacaagccagttttgatgtttgtttttttttttttttgagacagagtattgctgtctcccaggctggagtgcagtggcccgatctcgagctcggctcactacaacctccacctcccgggttcaagtgattctcactcatgcctcagcctcctgagtagctgggactacaggcgtccgccacsacgcccggctaatttttgtatttttagtagagacagggtttcaccatattggccaggctggtctcgaactcctgaccttgtgatccacccgccttggcctcccaaagtgctggaattacaggcstgggcyaccgcgcccagcctgrtgtttgtattttttgtgcgaaagcactttatatataaataaaaaacctgtattttgagttgggagcatattccaggtgcacactagcatagagctctcaaattacccatcaaaaaaagtttctgagcagctgcagacctaagtatagtctttagcataactagcatgcagcgttaccatgtgaaatcccacttagtttgacaatgctggaattggtctatccaattcaaagagccccttaagtgtgctccaacattgaggccttaacagagatttccccttagttcatcataaagaactgaagtcccatggctgcaaattctttgctagtccctttgagatgcagttgaagtcccttctaaacccccccatcccctaccttggctagtttagtgctctatcaactaagcatggcataagcttagaaaattccagctagacctcttggaacatgagctcacggacatttaacaggcctgctggagagtccatgtgaagacactggttgataacccagtaatgttacagatgtcycaccaaggccctagatatgcaaaggaagccatattgggaccagcccaggtgtcagctgcagactgataaccagttgacctcgctcactggcacaaaaaagcagatttatccagctgagctcagcccaaattccagactcacaaaaatttaaagatccaatacgatggtcatgtttttagtttcaacagctcactggaataagtaatgaatatttccctgactgaaactacagatcactcagcaccatgctttaagacaatgcaaacaactcatcccccaaatcattgtagaagtttttttttttaaatccttttattactcttttttaacaaacagccccagggacaggggaccaggggaagggggaggaggggaagtgaggccccagccccrsaacccctccccgcccacccctttcccccttatatatttataatctatatacaagccccgggggtagggggcaagaggaactccctcagcggggtgggggcaacccaggctccttgtcccctcgggacccaggctcctctgcccgtcgggagggcccttctcgaggtggcrgccctgtccgctcccaaggcttaggtatccagcgcagggcatctggtggggaggcctaggggacaggcatgtgttaaasagtgagtcacagtgagaggtcagcgatgagayggaaggacaggaaatcargtggcaactcraatttagagttggggccacaagggtttctccttcacctgctggtaaaggtcgacgcgctgggtgcggaagactccactgtaggtggaaggcgtggccttsagacgggaattgaggccagagraggacctaagggaagaagggcgtctaaggcaagcctaggatccagaccctggttccaaagtaaggaagcacttggaaagtccacatccctattccgtttcaccttccagttgggggagtccrtgatgatccaggtcccccaaggttgctgctcagtttttgataatcctggaayggctttagttccactggatgcagctgaggggaaaaaaatcatgagctgcctaccttgaaatacagaatccctactcccaagtcttggcgctccctagcccctcagttcctgtaccttacctctgctcgccccaagctagcggggaagggcctggcaggtgaaggcagcacccgagtagcaggagcaggtgggggccgcacagccaggctggggggctgcagrgcagggcccacaggtaacagagaaagggraggtggggcaggaggtggtgctggcggcagggagccaaagttcaccacaggcagctgtgagtctaccatgggtagaagcatctgtaacaagaaatttgggtgtgcatgttgggggcagggaggaatgtcagaaaaccagggaaaatcaaagccagcaactggacagagaaatcaaatgaaggggaagtgtgamgatacaatatacctgctgggcaggagcccctgaagggagaaakccactttggccaccaggctgcagaggagtagaataaaaatccgaaggggatggcagatcctggcgtacctgtcgggaaacagggagaaatatatcaacccccacaaaatcattctccctaccctatcccccaatatctaatacctgcccccctcttacctgaagcaacgatgtgtcaggcaaaggactggggcagaaagccggagagtagaggaaggaaggtggagggtagagaactcctccagccggcaacttccccagctctgtagcttgcattgtggagaaatccagaaactggcccttgagagctamcccagagagcagtgctgagggaggggctgggcysgggggtaggtataggggctgtgatctgaaaataaattgtggggagaaaagctgttaggaagccagagtcctagcaatgccttaagtccactagcttctagtaccctagaactgtgtcttccccttccctctccccgaaacacatctccaagtacttctgtgatccacaggcatcgagtcttacctgtaagggtgcagtgagggtgtcccagggcggaagcctccactgtttggatgtaaytgagagtccatggctcccccagagatctgcaggagaggagcacggttgaaacagctttagtatctgtggtcaagaaaaaagatcaccatcccacccatagaagcaaaaagtagggagaaaaatgatgtgacaaagtggtatctcacaactctgcaacgtagaaaggcttgattataaayacataccaggcagaaaaaaattattattcactgaaggggtcatgcaatgggaagcggggcctacctgagaactggaaggcccagcactgccatagaaaacctcaggatacaggcgctggcctgaggagctgggctccgggacacagtgcccagaatccaggttcttggattgtggctcagcagaggcagcagcactgggaagcagctcccagtctcgtgatacaggaatggcctgggaaggagaggcctcgtggagagggatgtctggcatcctggacgccctggtcactcccagcaatcttccccagaaatcttgggcctttccaccaaactcttactcccacttayctcagtgactgatgctgttagctccttctctgctttcaagctgtctcctaccaytaggcgtaagtctgagtcctgtgatcacaagaaggcaggagacattgtcccgtgacagacatgtgtcctctatgtcccacctttagtccttcccttctctccacccaactcaggatacccagatccagcccacacagaccttgycactagtgccaaactggactgggggaccaggtcgatgggatggccgaatggggccaggctctgtgsctcggtctgtaygctgtgatcgttctgtgccaatggggccagggggyagaggctgctcccggggcagctcctggattgggcacacagtaaagtgcattgggggagggaaagggaaatccaaattggaatgcccagaacacacacgcagagagaaaaagcagaaaaaggtagggccaaagtcagattcctggaaacattccccttatccttttttggtcttttacctttctgtccccatcgtggggggcaggtggtggtctcctaggaggttcagagccaggtggaccctcacaaggaacagcattcaggggtgaggagcctccaggcctcttggggggtccctctgctgcccccttgagtcctccatcaggggaacttcgctggctgcagggacctgatgacacctgagaatccccactcaggtccaccccactgtcagactgactcatctgagaggagtggagaaggagctagttaagtcagggtagaragcaccccaatacctgactgatgcacacatacaaactgcagaaaggggacagccaagtgagaraacagctccagactcaamccagagcaggtggggggtatgaccagtgctcaaaaaagtcccagctcagacacaccctcccaccctcactcacttctgtgccagccacatcctcaaaaggactcaggggctccatccaaggctccatggagctgggccggtaactctttcggctagtggctggagaagggagcaccaaccagaagagaagtgaggagatgacagttcagaagcccctctcattcttaacccttctaccatagtcctttcactcagctttactcaccagtatgtaaacggttccagatgtgaggggtcagggcctctgtgcctgtatctctggactctgcctgagggcctgggccctcaggcttagagcccaagaatccagagctatgaggaggtggcaaagattcctacagatgagaagggccagaagcaaaacatgaattgggtgggaattgggaattataggaagccaggacagagtggggtgacacagggtgtggggacaacaagggagacacatgggagactaatactgagaattctggagtaaaaacacagtgaaagaaacaggaaagaraacagagaaaacataacccagaagaawtttcacgagtaagagtgcagtgaagcacaatctcaaacccatcccttacctcctgtagcagctctggttttctgggaggcygctcccgacgtttagggggaaagggactaaccccggcagagtcccgaggagtcccayccacccctctcaccattggccccggctcctcaaagtgggggtctgggaaagagaaaaagggtcagcatctgcctggctctgccactgaccctaacttttcctctctactccacctcccaattcttctacccttgctccctgcagaaacgcacccagcrgcagggyccctaggccaggttctccacccgctccctccagcacttgaccttctctggggatggagatattcccacccataacccctccagcttaccagaactgaggccgctgttgaccctctggggctcgtatcgggttgggggcctaggagaggggccctgaggggcttggggargcccaggcttgtgccttggatgaccccctggtgcagttacactcccttgacggctactaagctgggccagagcctgttggatgccagcagggttgctgtggataacttggtccaggcggaagacagcagaactgctgggaggtgggggaggcaggggaagccccgggggacgctcctctggaggacgactggagaaaacagagcattagctccagtatccactaaatcgttaytttttcccacaagttatgtttcccaacttctgcttacaacctatyctcttccctattaaagtccaggtgtttttgagtccttctaaggrttcctatgcrtacagatgcacagactggaaagcaaagaaccagcaatgaatacataggtgggtgttcttgactctaacaccctaccarccgctttccagttgccttagccagacatggaaatcctactgacattctagagcccatggcccctcaggccacaatctccactccacccaaacttatctttccctcaggctttttccccctcctccaatttttaa

SEQ ID NO: 9930 - DNA, 13242 bp, Homo sapiens
  misc_feature (7899)..(7899): n is a, c, g, or t
gaggaccatcccagtcagtgaggaccatcccagggagtgaggaccatcccaggcagtgaggaccatcccagggagtgacgaccatcccaggcagtgaggaccatctcaggcagggaggaccatcccaggcagggaggaccatctcaggcagggaggaccatcccagggagtgaggaccatcccaggcagtgaggaccatctcaggcagggaggaccatctcaggcagggaggatcatctcaggcagggaggatcatcccaggcagggaggatcatctcaggcagggaggaccatcccaggcagggaggatcatctcaggcagggaggaccatcccaggcagggaggaccatcycaggcagggaggactatctcaggcagggagggccgtcccaggcagggagggccgtcccaggcagtgaggaccatctcaggcagggaggaccatcccaggcagggaggaccatcccatggaagtaagggccatctcaggcaatgaggaccatcccagggtggtgaggataattctggggcagtgaggattattccagggcagtgaggaccatcctggaccagtgagtactatcccagggcagtgagaatcattcgagagcagtgaggagtatcccagggcagtgaggactatcccggagcagtgaggaccattctagagctgtgaggactatcccagggcagtgaggattatcctggggcagtagggactatcytatgacaatgaggaccatcccagtgctgtgaggaccatcctggggcagtaaggaccatctcagtcagtgaggatcatttcagtcagtgaggatcatcctgtggctgggaggaccaccctggggccgtgagactcataaaatacctgtgaagatcattgcaggraaggaagaaaccattctgtgacaggtggaggggtccctgggataaagtggagcgatgggtcccaggagtggtgagggcagggcaggccttccaagcatcctggctgtgctcatgcaggcaggagatgtcacagcactgcttctcctcccccagaagtctagctcagaacttggcctccggcctgggcactgcctcatacctgccagaattgatctcaatggagctgcacaatgagaggttttgcatgttgtctagaggactttggttgagttcagagctgagcacacttgccttcagactctcctgggactcccaggtaactgattcaatgcttttgatactgggctcgggrccgtaggtaagtgatgggagcacattgacaatggcccrggcttggaagttgggggttggaacacttaaatgggcagtctcggttgttgacaggtagttttggtcatgatmtttgttgctggggataattgatgattagtcagggggtgagagccttggatactgaagcagcgagtttggaaaattggtgaagcacctcgcatactgaaatcgtggctgtaggtaatggctggtgtttctgggatactgatctgttgactgctgatagctggtgtagggtcttggatactgacctggtgattgtgaataattggcaaggggtcttggatactgaccaggcgattgctgctggctggtggaggctgttggatacygaccccgtgactgttcctggctggtggagggtcttggatactgacccgggaattgtaggtaattggcaccaccrtgcctggctaatttttttgtaattttagcacagatggggtttcaccatgttggtcaggcgggtctcgaactcttaacctcaggtgatccacctgcctcagcctcccaaagttctgggattacaggcataagccactgcgcctggcccttattattattttttaaggtatagaaatctagaatttttttttttttttctgagacaaagtctggctctatcacccaggctggagtgcagtggcatgagatctcggctcactgcaacctccgcctcccaggttcaagccatcctctcacctctgcctcccacgtagttgggactacaggggagygctactattcctagctataattttgtattttttggtagaggtagagttttgccatgtttcccaggctggtctcgaacttgtaagctcaagcaatctgcccaccccagcctcccaaagagctgggattacaggcatgagccactgtgcccagccttagaatttttaggtagtttaatttcttcacctttgtctctgtgactttattaattgcttcttggcttcgggaggttctccctccagatttttgatgarcattcagttctgtttttttaaattctcattacttatttttaggttttgattgtgattttggagttggtatgcagggaacattgaattctgtgctccctgctgtcctaaggaagggacttgaattagtcaggagtttttgggtcacaagtgacacaaactctttttttttaawttttttttattttttacttttttaaatttgagatggagtttcactctttcacccaggctggagtgcagtggcgtgatctyggttcactgcaaccttcaccccccgggttygagygattctcctgcctcagcctccggagtagctgggattacaggcgcccgctgccatgcccggctaacttttrtctttttagtagagacggagtttcaccatgttggccaggctggtctcaaactcctgacctcaggtgatccacctgcctcggcctcccaaagtgctgggattacaggtgtgagccatcgtgcccagccacaagtgacacaaactctaacttgaactagcttgagtgaactagttgtattagcttgagtgaactaacttgaactagctaggggatcctttatgggatcacctgagtgaaaaatggtaatggtaggaatgccttcaggcatgggtggatccaggggcccaagtgatagtatcagatattactgttttttggctatgggattggcttcattctcaaggctctgtgtagtggcaagtcagaatccagtaaggaaaataaatcattccagattcttcagaaggaagtaaatacagggaatttgttcgtgagtaacagaggagctgagaagccaataggaaatagtgaggcaaaccaggagttaggaactacaggatrctgctacttggccagaaggacaaagggaggaggtggtattactacagtccagaaactgcagccctctggaasgcataggttcatggttggattgctcagaagtggctagaatcagagaatagatacaactactackgaagacccaccacatgcagagatagagaggctrataaataccctggcttgccctctcctcccagaaccagtcttctgccagtgcctcccattagtcaaacacagtgataagatggtgagcaaaggaggctgggaaatgtggtccttgcagtgcagaacargrcagggygggaaatggatctgagagcagacagacaaaaaactggyagagttgttagcaacttggcagagttggtaataactgcygagtccggtagaaaaaagttatcaacagttcttgcaagaatcctgtgtggcttggggcacatgagcaccccgagccaattatatggccagtggagtacagttggctgattggcttawgactggggctgagaatggggaatgggcaggaggtgaaatgcatggtggggaggtaagctgcaaatatccactcattctgaccaaatcacagagtgggctgctctctgggatgacgagagccagggacttcagtgtcagctcaatgctctttcgcttgtctgttttccttcttagttttactctccccatgargctaggtccaaggcttaggcagcttcaggcttgtaatccttgaggagagactgctyttccttgacagcttcctaataaaaagtcttggggcagagcttgattggttgggctttggtcatgtgtccatctttgggccaattgcagggtctgcagctrgggtactgtgattggctcagccagaatcacatgattacctctgtggcccagaggccagcatatgccaggagaatccctcatccagggttatgtgagttgggtggagggtgtccccaagagatgtcaggctgctgttctgggcagaccaaattcaccattcaaggtcttggtttctggcttggtgccttctccctgacctctgcttcttgactcttcaatgagcagaaagaactaagggaactggctgggcatggtggctcacacgtgtaatcccagcactttgagaggccaaggagggaggattgcttgagctcagtaatctgagaccagcctgggtaacagtgagaccccatctctaygaacaaaacaaaacaaaaacaaaaaaccaaggggtctgatatttcccccacttcccagagtgctgttgctsttctgtatatatgatgatcctttatctttcttgttgggtattagagatgtgcagtttgccagaaacaaagcagatgaggtcttggcctatttggctaaaacaattttgcactgttgaaaagtagacaaagtagaaaaagggctaaaaggaggagatgtagcatctcggaaacaggtawacctctcttctgctggaagtctaagttggataaatatccactgtaaactggaactaagcttttgggcacattggttttagagtatttgacttgaaagtttttcttgtgtgcaaatctgtatgtgttttgtgggggctctcaggtgtgaacaagagatgacattaggatgtctgaggagattctcggcatgtgaatggggccactaggggaccttggggggtgactagcagagactagagcagaagtagggtgactttggagaggactggggtgaccgtggtgtcttggataactttgagggtgctgttgagggtgtctgggagtgaaactgaggatactaacatgagttgttatgagacaccttttaggagttcaagtagggtgaccaggggtgtctgtgggggtggttctagaaatgatcgaggctgggctcagtggctsacgcttgtaatcccagcactttgggaagccgatcacctgaggtcaggagtttgagaccagcctggccaacatggtgaaaccatgtctctactaaaaatacaaaaattaggctggcgtggcagcagctgcgtgtagtatcagctaatcgggagkctgaggcaggagaattgcttgagcccaaaggcagaggttggagtgagccgagatcacaccactgcactccagcctgggcaacagagcragactccatcttaaaaaaaaaaaaaaaaaaagaagaagaaagaaagaaatgattgaggtgattctgtggggtaaccttgaggatgagtgggatgacctttggggggtcctctgtggggtgaccttggggggtgtgtgggattatgagagtgtctgagaattgagttttaggttaagtaggggtgatttgggacaactctaagggtgtgactgggggatgactttaggggtccctgggggtgaccttgtgagtgagattggagtttctttggggtttctaggaggtgactttggggaggtgagtaggggtgattttgaggatgtgccagactttggggttgtctgttgggctgcttgtgggtatcagcagagatgactttgragggtgaccaagaggggtatctggggktgactctggggcccctgtccccctctccccagttctcatccatatgagcaagggcttcatgttactggccgtggccctgtgctgagtcctcctccygcccatggccctctcctcctggccagtggtcctccgcctgaacatggccgactttgtcttcagtttcctctgcctcggcattggtaggtgttggcttggggggygggggccctccctaaccccagccctgctctctggctttctggaggtgtatctagacttccgtgctgctcccctcrgggcctctgtcttagcatgtctctggggagctctgactcagttctactctatctgtgggatgtctctctcccccactctctgtttccctttctttttttgtcccctctctccrggtatctttctgtctgttgtgagggcgtgtgtgtgtgtgtgtgtgtgtgtgtgtgtgtgtgtctgcttgtcacggagggtgggagagratgtctcagtccctcttttcttactgggggtcatagggctcactgtccagccttctgtctctggccccaccccattgcagggctcctgatttctcttcagcctgacgctcttttcagttaacggcaaggcggtgcacccaagtccggtggtgtcctacctggtgacctcctacytgtgctgggacgccagcgacttgatgctgcactccggtgagggcggggcctcgggaggagggcggggcctcgggaagcgggtggggcctagggtgggactcggagtacagcggcccacctagccatctcccaggagccgtgtcctacctaagcccagtgggcatgtgaagcagagggcagcccttgaatgcgcggcggctgagctaccgcgggtgggccgtgcagcagggcgcagcgaggcggacatccaaacagcggaactcagacrctgactccgagcgcaccccgggccttcccatttcatacacccwcgaggatgagacccaagcacctccaaggaatagcacccgaggtcttcaggacaccgaccggtagccatggccagatgcccggccaaccccttcagcgtggccacgccctggatattcgacctcccctgaggccccaccccctgatrtcaggccacgccctccgaggggaccggtggcaaactccagccctcgctctagggcccgccctttgcggctttgtccctgcccactgggtcctcacagtrcctccaccccagaggcccagcatcccctcccgttctgcagacacttgtccagcgtcccgctgagctcggcagtgtggctagtttgtgtggccctgcccctggtgcccagccttcgcaggccacaccctgaagccactctccacccgctcagccagggtgctccgatgtccacccttgtcccggagttccggcctcagctccgatgtccacccttgtccccaggtggacacagcaccgcccagcatttggtgcaactccacccttctgcagaacgggcccctccctgggaaggcatggcttgcaataacatccctctgtaccttttctggcttccccgccacaataaaacctctcagcctcagaccttccattgccccccacctccccaccagggcagggtccatcctagtgtgagtgaactgttctggcgtccctgactygccctttgggatctgagcctttccctgcctgtttgtctgcacctgtcacagccccttcytttycccacctgctggtgacctcagacttccaggcatgagaytgacacagctggggtggccccagcctcagccgagtgggtccaggtgcaccacatctggaaagataggtgatggcagaacgtgacacacattggatgcacatttgattttactgggggtaggggacagggctgggcgttcaggagttctccgctatggtgtcctcgatccacttcacataagacagcactctgacggcgacagaaggcttattgggggtgccacaagggacgtagccccatgatgtgacaccttggagcacaccatcacacatcagcgggccccctgaatcaccctgggagcacaaggtgggaggggagagtgagaaaggtctacggggcccaagttctgcctggggagccccagctcgcagacagggcctccagtgcccactcccagaggaaggtgggcagggattcccacagaggggacagggtctccagtcctggccaagggggaagggacctcagggtccagckmcngcacatggggcagggtccaggwggacagtgcctgcagacaggtyagggggaggaggggcaggaccatctgcaggacgctgcccctgygggcacatcgcagaggccacctctccaggactactctctgactcgacggtaacaacacattaccacgaggaacggtgaactctggtgtggggggtgagatgcagttgtccctggatgggcgggggaaggagggggagctggggcactgatggggcgagtggctacagctagctgggaagcagtgaagcagatgcctggttagctctcagaarccagttcasaggctgagtcccctccctcagcccttccagaccctgggggcagggctgcctcaccacacaggtgtctttgccaccttccaggtgtccgacacacagcatgaagtctgtcwccttctggacrtgggctttttygcactcatcattaggcaggattttgaggtccacacactggagatcatctggaaatgagactacgaacccgggagaaaaagggctgcagcccgacctcacctgcttccctggccctttctcccttggacrcaggagtccccatcccygccttgggctacacagtctgcccccacatacaattctctggttcgatgctgccccagccggaagccaaacaggtgctccccacttcgggttcctsggtgggcaactccacgaccttcacagcrtctgtgatggtatcagcaggctctgtcaggcggagcagcatgaggtcgtggctgtagtcctcgtctgcttggcgggtgtggttctccaggaggctcatgttgaagccagggtgtgggaagctctcactgacatgaacaaactgggctgtgttttcgtcgtcaaacaagttgtggygacccagccagagctggtaattgctggggaaagatgggaatggagggatgagaagaygggaaggggaaaaggggatggggcaggggagcatgggggagggtccccaaagagagaaagggaaagagaaaaatgtgggtgggcggagacagaggaagaaagatatagttatggagaaatacagacagcgaatgggaagatgaaagaktttgagagtgcaaaaggcaaatgaagagacasagcaaaaaagagctcaaaaggacagaggggtgaraaaggcggaggggagggcagtgagaaacagggtgagcaaaaaagaggcagatgagaaggataaaagacagggacagcgagaaacaggcccagggaagagggaggaagagggaacagaacayggaagggagcgagaagcagacaaatgaaaaaggacgcgggacgtcagagtgagaactagaaacagaggcagagaggaagcaggagtgaccgagtgtgggagagaaaagggagggaggccctgggggagggtgggggcaggtggggagggtgggggcaggtagggaggaggggaggcctgagagcggctcagctgcagctggggctgtggtgcgggctccccaggggcaggtggcctggcctgaagtccaaggtcgaggcccccttcccttcccagcaccctcccgcgcgtttctcgccccgcctcctccttcctcctccctcagttgccccacccagctcccgctgaaaccagcccttccctgtgtctctccagagtggagggatatcctgtggggcggggagctggacagagggagaggcrccccctcccaggcacacaagttggggataaagcccttcctttactctggggcctcccttaggtccatctgggtgtgtgtttagtagggatgagggagcggtgaggtagagacccagagagagagagatgggtagagagatggagggtgagacacagtgacagagatgccgcagagagactcagagacagacagagacaggggagatgcagagacaaggagacagaggagagagaggaagacagagaccagaacacagtcacacagagacacaagcagaaccagatcccaagagacccaggcagccttggagaggggtgtccagcccagctctgccctgccaggcgacctgcgccagagccttcctctctgsctcagccccccagtcttgcctgaggttatccaaggggaatgccactggcctgtcaatcctgtggcagcatagatgccctcctcccagaccccaggcccctactcactcgctgatgcaatgagcagctgtgagcacccactggcggtgcaccaggatgcccccacactggaaagtgctgaaatggtacagagccgcctgccagggctgggaatgctgctcacactcccagcctcccacaatccgggactgaatcgggggcgcagcacctgcagaggcggtgctgggtcaggaagggcagggttggcaggagaggccagggacaaggctaggagagggagctgggctgtgggtctgaagggacattgcgggtagaggaccagggctggaggttggggacatgggcaaggggtgttgggaaggggtgggactctggactgttccctgggcttttggagtggtggctggacctggtggggagattttgtgctctgacagtagagcagcctccagggatcagggtaggagacaggagacagtgtctggagcagacactgcatctgggcgtcaggtcatttggggtctggggctgggggatgggaggtggtgggttaggggagtggaaarggattctggaaaccaggsatcaaggcgccaagggtgggacaggatcagaggctcactgaggaagaatctggagggctaasgggctcctaggctagggaaacaggacctgggttgggcttttgaggttcaggaaaggatgcagctttagggraccaggtctgagaggtaaagaagagcatctsgactgaagagtttgggggtgacttggggtccctacattggggttggaaggggccagcttggctgggacagttagatttcagggcttcctggttaaagggtaaaagaaagggctatggttaaggctagaggtgggcttcygagaggttttggggtccttcctgtgaaccaggaatggcaatmtgaggggaggttggggccctgagaacacagttgcggtcaggactgggacggggctcaggaggagggaggcgtgagtggcagtccttctcggacagggtgaaggatgggatcttcgtttctcatggggatggggttcatggtctgagggtactggaaggatatggggtcctcttggaggcaatcctaggaagaggattggagaagtggtgagaacaggcgccaagcagctgtgggaatgcaatgcaggacccacttgaygtgaggttgtagaatcacatactgacttgggggaggccagggcagaagcgctggctgagaaggcattcaggatccttggsgtggggttccagaaaaccagagctgtgtaggaacaattcaggcagagaagggctggggcctggggcgggatggaacttccccaaggaaaggagcatgtggtgggagggtktggtgtttttcctgggagagctgggggtgctgggtgggaagggacatttgcagacccccccmcataccagrtgggggatcccacatgccagtttgggaagcagggttttctggtgaaatttgggggaccctggaaggactggggagaccagatgtcagggtctggaggacacagttgagagcggacagctggatggaaaaagtcactggagtgtggtgggatttgtagactcaggagccaaataggtggccgcagggaactaggggrcaggaggggatgatcagagtcctgtggggtgggggaagcccatgggagggttggggtcctccagagagagacagagatggcccagaatctgcccctttggtaaagcggtgggacagggcgttggctagggaagaggagaaagtactgaggcttcctgggaggagcaggaatctggtgtgggagtgarcactatgacaacatggaggagcgggggtggaagtttagggtgggsccgcgcaagatagataagagccggggcaccccggactaggatagactgtgrgccagagggatgagggtggggtgttggaggggaaggtcttatcggggggggatgtgaggccagcaagagaatcagggcccgttccccctcccacatccccccactgtctcaccagtcccccccagggacagggcgaggcacagaaccaggaaccacatggtgacagaggtgtccaggggccagcaggtggaggaactggggaacctccctggggagscttttaaaagcccttatcccctcagagccccacccctgccctgctggcacccagatgttggccaaggcccttcccctgttgcctgggggctggacaattgcccccccsscyccgatccccagagctgtagacggggagggagaaccagcacctgttctgcaggccctggatcacgctggacgcattcctggggttgaagccaggtggggcagggcctgtggctctggggctttgctctggggagcagccagtgaggcaaggggggactgaggggaagcagaaacaggaagacggaggaatcagtgacccctggtacaaagccccatatacctcagtctcaattaaggccctgcacccccagacctggtgccctcaaacaccagcagttagggctctgattccctgcaccactcggagccaagatactagcatctcagctgccagttccccctgaaatataagccttggmcttcagaatgccctggttcttgcactcccagacccaggacctaggtccccaaagctactgttcctttcataataaaattttggggtacacatcaccacattcctagtgcctccagatccaggaatgtgaagtttcaggggtctcccagggtaagttctttagcattacaaaatccartgtccctcccaaacaatgctggggtctcaatgagcctcccacttcttgctcccagttakgggtgctcaacgtcctgtcctccaaagtcccagagatctggacaaccttccctcccaggtcaagatcaggctaaccacagattccaatgacccttcccccccaccaccagtacaatatttaggtctcacgagccaggttcatgtacttcaacattcagcgaccttgaacatcacattttgtggtctctgaagataattaggaactagattcctgcagcctcaatggtaaacccataggcttccaacaggttgtcttggctttttggtaaaatcaaagcagctcagagttccagcctctgctgtatatcagggacctggctaaggaaaggacagtatttgcctttttgccatggctaccaggaagccc

SEQ ID NO: 9931 - DNA, 296950 bp, Homo sapiens
  misc_feature (19488)..(19488): n is a, c, g, or t
  misc_feature (103081)..(103149): n is a, c, g, or t
  misc_feature (188367)..(188367): n is a, c, g, or t
  misc_feature (242260)..(242260): n is a, c, g, or t
  misc_feature (257245)..(257245): n is a, c, g, or t
  misc_feature (257376)..(257376): n is a, c, g, or t
actgtatcctatcctgggaacaaataattgggaaaagaaaatgatcgacatttttttttttttttttttgccaattgctttcccctaaagtaagtttatagtcttgatgtcatgagagtttttgagtttcccgcccctgcccccmcccccccaacccagtttggtcacacagttgatttatagaagagttgccaataacctgaataacctgtttctaatgccaaaaacggctgatgcctgagccctgccttaggcctagaacttaagatgagaagatattttgggtgcgcaagccatgttgtccttagctttactcaaagaaaacatcctagtgaaaatatgcatggatcaatacatatttcagagggcgtgattgtctctgttgaatctctgatagttcacatggtttgctgctgcccttaatctcatgtcctttgagctagagacttccttaattaaaatacagaaacaaggaggccatctgcaaatccatacttccagtgcactcatctgttacattgcttaatgctgtgtacaagacctaggccctgagctagattattgccaagaataaatcttcatttagaaaaytgatcagatggttggcttgataaattcagaaaaatgttaggcaatatttttttgggaaggttatttgtagaagaaatcccaggtgacagataaactattttcaattttagctattttgaggggcaccaatgtagatgcagcttcagaagacaaaggcattatcctgacttgtatattgccacctctattccttagccccatgtttaataaatgaatcagttctggaaataagttagcttcccttttatatagatataacctggcccctgaactttgaagcttctattattttccttttagacttcagtttgagatactttcacagttttcaaaamccwattaaaaagtgaaaatgatctcttgaacaacagttctttttttaarcatctcgtatttttggctttttgtttttttgagacagggtcttgctctgcagccctggctggagtgcagtggcatgatcacagctgttttctttttttttttaatctgctgaacataatctctaattctmtgccaatgatcttagttacagtatttcattatttggtggtgtgatttttttctccctctttttggytgatgaaaagttgtacccaacttccctcactaataatatgaatgatctccatttctctttattgttcattgatgcatgccactattttacagtggctaagtccatatgcttggtgttgaaagccatggagatggtgaagattttgtaatgttcattgcagatccctaatcaggatagaaactggcagggatgtcctgcaattaagctactaagacttccatagtttcttcatttgtagtaggcttttgggaaggtccttgggccttttagttgtyccaagagcaytgctgaaatttgtatttgtggagagtaggggtaaggggaggtttacttatattttgaaaagatctcatgacttgacctggtggtaatcctgctgagcaaatcctattaagtctartttgttcakgctgctataaaaaataccataaaatgggtgcttatgaacaacagaaatttatttcttatagttctagaagctgggaagtccaagatccaggcattcacaaatttggtatctggtgagggttcatttccttgttcatagatgacttttccctataaccttacatggcaaaaggggtaagggaattattttggggtctcctttataaaggcactaatcccattcacgagggtttcatctttatgacctgatcacctcccaaaggtcccatctcctgagatcatcactttgggggttaaatgccaacatgtgaatttttggggggcacattcagaccatagtacaagtgttaaaactgcaagaagaatccccacactcaaggtaacccaagtaatagactaatatgaatcaatccaacccaattgttgggaattctcatagttcttgcagaggttcttttcttggttcattttcttggaacttcccaagtcgtctttagactactttccatgctcaaacttccaagtattaggatattcctttccctcatcttttgtccctatattcctcaactttcatcctacccctttatgcttctgcatgtaactttattttcttcttgacgctatcaaaagctattgatgtcctgccagaaasatctcccattaaaagcaaactgcaagattttctaacamaatttagttagggatcctcaggacaggaacagacatggcttcaaaatttaacattgtctgatctctactctgggtagcacaggaaagtgtttcccttccattctgaggacaacgttctttcctctctctccctttgctcccatatccctcaatcccaccaaccctctaataaaataagccaataggtttaaggctgcagagagtataaaatacttgaacttacatatcaaatcatgttaaatatttatattttagtatgaaagaccctcaatagttatgttaaaaaaaataactattacccaggtaatatttctgtccagaaatttgagaaacagaattatttgtaattatctacacatttaagaaaattgaactccttatgaaatataactttaggaattactggagattcatttgaggtctggttggttatcatgaccttaggaatttacttaacctctctaaatcccggtttgcttctctgaaaaatgataaaaatgttttcctcacagggtatatgtgagaattacggagctcatgtatataaatagtttttcatagttcctggtattaaaaactcaatatattttaaaaatgatgctgatggtaatgatatgctatttgtcaagtaatcacayrtatttttacccagaattwaaaaaaaaaaacaacttttcccctatcccttaggttacatatgttgctatgttcactgttttccttttatagttaaaataagctgtaacgcatcgtttcccatttttttttttgccagctacatttcttatctctattgataataactataccacctatgtctctgctttttcatgcttgagggatctctggatcaatcaacgtgcatgatggcctgaaaaagcccaatttatgggcaataaagtgaatcatcttattatcaggaacgaatatatgtttcctttattgactgctgactatgtagagcataccaacaaaattgccattcatctatccattcaacaatatttattagctattccgcactgggcartgctctaggcttggggatagaacagtgaacaaacaaaatccttagcctaatggatattacctggaagtgtgccaggaagaataaactcacttgtgaattacaacaataagtggtttattcaggtcaaaatcttgttttgtctcctgggaatttcactgaattgcatcatgtaggaggcaaactataccccaagaattaagagcaattgtgaataaatgataaaccacagagtttacatttacctcctaatacatttaactcctaatatatatatatacatatattacgaggtaaatgtaagctgtaactttatgcatatattgtaagtagtaactatacatatatacttatatactgtatacatatatagtaagtagtaactatacatatatacatatatagttactacttaaatttatatatgtgtatgtatatatatatgtatatatacagtacacacacatactgttactaccgggtgtaaaattgaataggatatagtgtcttccctcacagagctgccaattatgttggaggatgtaataaatacaaagtctgtttcttcatcttcgrtttaacaaatgactgatgtgaggaaaaaagttrtaggaatatgttcacatagtcacccaaatggagcatcctactctgtcaccatttcaggattaagactagacagtcttttgtgttacaaattgggacatcagtgctctgggaaacagtgatgtccacgattctaaatccyttggtattactatttcattgattaaactacacttctgatattttagactaaaatgttttggcttatcgcagtctaggaaacctgtcttgggtatataaaacagayagttgatgcacgattagggaaaaataaggcaacctatgaaaatggccttatggattaaaagaagtgagctcctatatggtcagtggaatccasgaaaaatttaatggaaaaagcgccacctaagcttagctttaaaacacagagtatcttcaggtagaaaaggctataggagaatgtgcccaaatggagtttggctggagacaaagaataaagactagaaagaacaattaccctaggccagacatggtgttggacggggcaagatgyttactayttaaagccatagaacactgtttgctggacacaatgagtggaatatagaacaatgcaactattttaacactttacccctcttagtggtttattagttaattttttcctgaaaaaaaaaatgcgtatactactttttctgcacttttctatatcagatcttgatttaaaactttaccactcttggtgatttattattagtttttttaatccgaagaaaacatgtgtatactcctttttctgcatttttctatatcagatcttgattggctcaccaccattacacacacacacatctcttttctcccatcctcccagcgttatagaatcatttgttgtaaaatcagtattcagtatttacataattatgactgactttacatgactactattattcacagttgaggtataccgtgtatacagtgtagtttttaaatttttatttttctcagcgttcaaaattatatgttctgttttcttaattttgaaaaatatgcattcactaatttatccccacactctttggaaaatgaaagctctctaggctgtattcaaatacaccaggtactctatcaattttcattttttaaactattctacctgagctctccatctttagccatttcctgttgacttcatactgttctcccctwccactctccctctttaatatattaccgttttagaaactttatggctaccctgtaagtaataaaaatgtctttccccactcaacaacagacagtacctttcaagtttccactttataaggacataacccccattccatttacttccccygccctccttcaacattcccacttgtattttccggctgtatttttaaaacatggtaaataacatttgcactccactttgtaaccataattaagtatgcccttaaacaataaaaaccataaacaacatttgtattttacgattatttaaatgttattcactgaacagccaagctttgtgctactatgggatttcgttttctgcggttccaagtcttgatccacgtcctgccacaggatcactgaagtagagyccattttcttacactctcgccattagttcaaaagcttgcagcattttatgtctggtacttggaggatgattttcctgtacagttttgcgtttttttcaccgaaaatttctgattattattgttttctcttgtgggatgaaatatgtaccttctatatcacagccttaataccttcagcttcttattcattsaaatcttgcttacaatccagtccgaggattcccggtttactgattttctttttcctgcaaattttagccttctgttttgttttgaaataatgcatcctctgcgctttgtcacattctgaaattcgtcaggtgttttaggatgcacactttcttagatsttttcgagggtcttaactgcagttctgtttccggaayrgcgtattytctttctaggrattgtaggctcccggccgccccctgaggagctccgctagcagctaagagggcagccacgaagagcgcctgagcactctcgcgagactgtggggctcgccattggctgctccgccgcgccgcaacggaccctgggagtcggccatcatgctggccccggaggccgttakcttagtcatggctctaaatatgtacctgcaatcggatgttgaggatcaccgagcccgcgacgtagaagtacgggaagttcatgcgcagctgccaggccagctcgaagaaggcgagcagggtgcgggagagccccttgcagaagacgccgtacgaggtgggtgtcgcggcggggcttgaggcyctgacggccaaggaggacggagccgccgcgggggccatgagccaggtgtcgccgsccgcccagcgtctgtagcgagggttgccgcagggcccgcggacctcctagcgacggctgggaccggcaggacggtaagcaaagcggctcccgggctcacacccaagcttgccgctgccgccgctcggtgcagtgcggcgcgtagccccgggcgccgctggcgctccgccccttcctgtctgcttctcactgtggcatttaccatttagagctcaactgatggtaggtggctctggaataggatgtgttatatagcatgtacgaacatccatgcagatagttccactttaaaatgaaaaaatctaagcgagatgtaacttgccgtagggcacaaaatttgtaagggccaaagctagattaaaacttyagtttgtctgctgtgttatgtgggatgttaggaatcttacccttttgatttcataatattaatattagggcaagatgattcctacgccaataaaagcacaaggtctctgtattcataatataccatagacataaaaaggatcacaatcttagtctttggatttttctatttattaggaatatttaaattgcaagtgacaggaatgataaacattcaagcaaaaaactagtggacacacacgcgtatatacataaggacatacatacaaaattatattcccagccatgtaaacccttaaaaagttcagattagctgtggaagcttcagccatttctgcatggagatgcatctgtgaaacctgtggctaggctccaagagctggaatactactctgtacttccaaactctttttttgttgttgtttttgagacgggagtctcgctctgtcgcccaggctggagtgcagtggcgcgatctcggctcactgcaagctccgcctcccgggttcacgccattctcctgcctcagcctccygagtagctgggactacaggcgccygccaccatgcccggctaattttttgtattttttggtagagatggggtttcaccgtgttagccaggatggtctcgatctcctgacctcgtgatctgcccgcstcagcctcccaaagtgctgggattacaggcgtgagccacagcgcccggcctgtacttccaaactcttaataccattagagtaacagcacagtgaatctctaatagccacaatacttttgttatttaaatgrtgcacatttcattaccttcacttatctcccattttaactagaaagcactgtattttttaatcgcacacaccgtcttcattcatggattattcaaatgtgtgatttctgatcatgaccttaaggttacagtcttgttctgaaaagcattgttgagataccacacatcgcaccgtgcactgcatgtctagcagctattcagagcacaagtacggtaccctagagtacctctgtttctatatagtctactgattatatgactggtagaaataacgtgccactgakaaatttgtaaaaattaattttgtgytcccagctagtattcttttgctactttgctgctccagtaccactccagcgaggtagcacttagaggaattacttatgacaacttctaaaatactggtatagagactgaagagcgatgtaaaataaatgatcaattctgagaactgggagaagatatatagtttcagttcacacatataatttactccctttgaaaactgaaagactaatacacagagccattcagagtcacaggagtcattacgttcctggatttttcatttccaaatatgtaaagctatgtggactcattctgtcttctattcctcttttgtgccaccctttacgccctacttgctccgtttctgggtaactccatgaaaaccttatcttccaccctgagaccgtggggaaaatagcagccacccactgataacatggccagattgagggcctattccaatgggacgggaataggcaaagaacagtcacaaagctccaaatcctactccttaatgctctagagctgaagaaagatttccttctttccacctgagagtgggataggagcaataatttaggtggttgtagwttttatctgccccttgatgtttagatttgaatgcctaatccacactkcttttgctgmgggtgatattaggagaattcatgattagagtattcatgattggaaatggcttgattgtacaaattagaaaattcatgattggaaatggcttgattktacagattaactgcattgactggcttgggcattggaagcttcctttaactgacttttcatcaggttagccagctccagaatttaacagctgtgtttaatactgcttaatatttttatacttatgttcacaccacaccattaacttgtgctaatgccaaactagaaaaaaagtacgtttccttttggacactgatcagtactcaaccctttggtttgctatctgcctgataatttttggaggtgggggtrsttcacaatagctaatttttctcagccatttttcctttggataaagtgtagaattaattatgtgaatattatgattctgatggagtccttggtttattaacattcmattgggaaataaatgattttggagtcgtaatctttcttattttctttttatcatgtactgtttttcagcttttatagcagatttgattcactttatggtaaacagcctgctgggcatgrtgcttttscagatagtaggagccttctgcctttctgatcactctgattctgattcttgggaagagcaagctgagtcagacctcactgataatgctgtggaagattagattcttgatatgatgggaaaccttggctccttgaaagccttgacgaaaacttttttgtattaggaaaaaataaaatcaagtagaagcccacataaaaactctttaatttttcttttctctttctttctttcttttttcttttcttttcttttcctttctttctttcttttctttcttttctttcttttctttcctttctttcttttcttttcctttctttctttctttctttctttctttctttctttctttctttctttctttcgttctttcgttttttgccatggctttaatatgtacatatagtttgacgtcattgtaattcttaccagaacatactcagagctaaatatatactcttatttccatatttcaagaaacttttctttttctcccctcaaacctctcttttagacaatgaaacacacttaataattgtcagattattaagatctattgtattcttcattacaaggccagatttcataggtgcataaaaaatcacctatacatgaatctattttttaattgagacatttktaaaccatgcatgtggaagaatatgatatagcatgcatttatgcatgcattttgaaaaccagcttgagaattttacttccttttagttagcagtagaccaaaagagaatgttgcttctgctctaacaaagagagtaaactaggtaggctacaaagtcataatttattttgagcttgttagaactgaagttacaaggtgagcaggtaaactgaattttagcactttgggaggccgaggtgggtggatcccgaggtcaggagatctgggccatcctggctaacatggtgaaaccccgtctctctactaaaaatacaaaaaattagctgggtgtggtggcaggcgcctgtagtcccacctactcgggaggctgaggcaggagaatggtgtgaacccaggaggcggagcttgcagtgagccgagatggggccactgcactccagcctgggtgacagagcgagactccatatcaaaaaaaaaaaaaaaaattacaagcctttccaaataggagacatgaatttatttcatctgtggcagaactccagaagagttctctggcrtttcagtaggtaacaagaaaatggctgaaattttaacaaattcttacaaaggttgagtgtagtttaatgtgacagtttagaatacctgggagccccagacacaggagtggtctgtaattgccagcttttccccttgggcttctaccgaatgcttactggaaaggttgaggacagacaggaaacctaggaaagttcctttatggtacacggtataggaggcagaataatggctttcccaaagatgtctatgacttaatctttggaactagttaatatgttacattatatggcatggagattttgcaaatgtgattattggtatgcaccttgagatgggagattatcccatattatttaggtgggttcagtctaatcatatgagcccttaaaaacagattatttcttaactagggttagagagatgcaacacttctgactttgaagatgaaggaggccccaaaccaaggtctgcaggtagtttctagaagctgggaatggcaaggaaatggattccttcctagagcctccagaaagcaatgcagccttgctgacaccttgattttagcttagtaagacaaataccagacttctgatctgtagaactgttaagataattttgtagtatttaagccactaaatttatgataatttgttttagcagcagtgcaaatctaaaacaaatgggaacaaaatcttcttaagttttaaagtggagtaatagaaactggagaagcccatttacactggaccctgcatgagtaaaaggtggttgttggccagtgctaggggacaggcaagaaaactacacatgttctggatctttattatgcaaaatctgcctgctgctgagtgaggggcagggaatacactgtaacctggaccctactctgatattgggcaatagctgattggcacaaggagtggggtaagaaacctgcctgcactcctaggtctgtattaatacatattagaagtctgttgtcacaggggaagtccaggaaactcacttgctctgggctrcatgctggctaaacagaaaggatctgccagtgaaggaaggcagaaaacccaccaatcctggactctgcatgaacaccaggaaaaacccatttgctgcaggaagggggcagttaacctgatgatatcaagaccctccactgatacaagacattgattgactgacactcaaggaggggcaggaagattgcctgacttggactcccatgctgacactgggtgaaagccatctgttgctactggaggagggggagaaaaccggctttcagccaggatccttcactgattttaggcagtttttcttgttgtgggagtggtaggagcattaaaaaagtcccacgtctgaggcaaaggtacgtagacaggggcagttgctagagaakaacaaagagctcccattgccccaccatgaacttttctctgattaacaagcaatgccactatactgggagagggacacaagtrtagaaagagccttctctatagtgcatgtgtggactcttgaagctgagcacaaacactgagaatccctttggcactccagtcttccccaaaacacaagttactggcattccaccactggagccatttgaatctaaatacagataaactacagattggattgatacaatttcacacacttagtagtctgacagaataagaaggcagcccatttttgaggggtaatatttatctcaggatttatctcaggatttactgtaaatatgtatacacacatacaaaaacccaggcattgttaagagaaaataatggcccagaggttgaaattatcagacagaacctttaaaaataattatgattaatgtgttaaaattctagtggaaaagataaataacatgctcaggaaattttagcagagagatagaaactatataagaagctcaaatgaaaatgctagaaatgaaaagcagtattggaggtgaaagattcctttggcaatttatcaacagactggagatggcagaggcagaatcagtaatattgaaggcagattactatatattattcaaacagaaaaatgaaagagggagaaaaggagagaagagatggaggaaaaaattgggaagactggcaatactaatttgtgaggatagggggcaactagaatcctcatacattactggtggagatgcaaagtggcaaagcctctttggttgagtttgatagtttcttatgaagtaaaaaataccatgaaacccagcaattcttaagagaaatgagaacatacccgtaaaattgaatactactcagcaacaaaaaagaataaatcacttttacatgcaacaacaratgactctaaacattctaccaagtgaaagaaaggttcaaacatgataccattttctcttctacaaagagaaaaatatagtgacagaaaacagatcagtgatagccaaaggcctgaggtagaatgcactgcaaaggggtctaggaatgtcaaggatgtttttgggggtgatggaaatgttctatatcttgattgtggtagttaatctgtataatttgccaaaagtaaactgtataattaaaayggtttttcatataatttataaaaattatatttcagtaaagctgatttacaaaaagaagcattttttttttgagaagcctcagaccacattaggtagaaaacaagacattttagatgttctgagttagaagaagtttaatcagggagttagacactatacaaacattagaaggctttgggggaagtgagactaattctggagggttactttcaggaatccagaattgtaggggttgtacatgaaggcaataacatttgtgtcagctacttgcatcctctatgcaggctactgtattagtcagggatctccaaataaacagatccaacagaatcataattatgagccaattttcataataaacatgtgtaaaaagggattcattatagggattggctcaattgattatggaggctgagaagtcccatgatacaaccagtggtgtagtcttgaggccaaaggcctgagaatcaggggctctgatgtccaagggcaggaggagatggatgwctccactcaagaagagagtatatttgcccttcctccagctttttgttctattagggccctcatcagattggttgatgcctacctacattggtgagggcagatctttactcggtctacagattccaatgctcatctcttctagaaacacctttacagaggcacccagaaataatgttttaccagttatacgggtattctttaacccagtcaagttgatatgtaaaattaaccatcacagctactgatgatatcaggtgcctctggcctcaaagtgggtgattcctaggagtatatttgtagctatccaacccttatgcttgtagtctgtagatacctaagtgccagtctagattgctgcccaagaaataatagctttacctcaaagtgtctttttttaagggggaatttaattgaccatggggtctgggaaatgttattccagcttcttttttatgtccctgtggcaaaggtgagagcttagaaacttggggatggtatatggtagagtaaaaaatctgatacacacattgtatctagatgcttagctttgaatctgcttctgcagactttgtaatgattctctgatacactttaataaatgtcttttgtgcttaaactaccagaatagattttaaaaataagttcatgttgatatttccaattcagattttatattcttacttctttttttctcatgctgaaaatcttggtccgtaaccacacaacattcacataattaattgtgtgcatcagcgcatataatagtttcaaactaacagtactcagattagattattctaacagcttaattattaaaacactttcagatttatcttagcatatatccttctggagataaaaaaactatgttgtaggatcatttgaaacaattcctcttttagttaaatcatccatcagacaggttcatttgtttttawttttatttttcaggattaatattcctttattttaatttttagtgattatttaataaatgttcatggtaccaggggtaaaacttcaaaacaaaatgtattcagagaagcctagcttctttcctgtcatatgctctgtgtttcctttcctataggtaaccaattttttttccttttttaattgcttttaaaaatttaagatatggaaggggccatgctaatattctctgtaattgttccaactttagtatatgtgctgctgaagtgaacactatacgtaaccattttttaaagtcagcttttgacaataccattcttaaacaatayagaacatactacacacattgttctgcatttttccttttaaaataatttaataattaggtatcacttcatagtactatatagcaatctttctcatttctttttacagctgaatagtgttccatgtatcccttctctctgcaattattgattgactcaggctaaagaagtcttcgcaaatattaacacatttttccatggttgcccaggggktattcttcattacaagtgtgcatgtgtatttatgtgtgtgtttggggtgaggctgtatttgttggggacatagagttttcacacatcacttctcaagctccagtggcaagaactcagacactgggtcacacccaactgcatgggatcctgggaaatgtagtctcatgtgtgctcaggaagaggagaacaaggattttggtcagcaacacagtacctgccacagacttcatgcctatttttaaatcaccatatgtacccttcttcccacatatagaacacacttatgctcctttcctggggatgcattaaagtcttatgttatatcagcttaaagttcagggcttctgagtgatagacagttctgtttaccacttccaaatgtagtccctcrtggtctgggaataaatgaaaacaaaaaacacaagatatatatatcttcacttcaaagtataaagtggatgattaggggcaggctgactggcaacaataaactcctcccatttagaaagaaaacaggaggaatacmatggtagattggccatagcagtgacaaaccttccttgataggctatgtggagtcgcctgccctggatttacagggaagttcctgattagtccctgtgtctggactctgggagaaactcccttatccatcattttctgaggatcctggctttaccctctggatgttcttcattattatcctccttggctgcatctgaaaaggatgatgagaagggtaccttcctggagaaggtacgtatttcaagtcttttcaataatgcaagtttggaagccagagagtcattttaatatcacatatttaattaaatcactcataatttatttgacaaatgcaatatcctcagcaacatataaagtttttaatctacttgcttctggtcagttccatcttaccctacaaaaatttccaaaatggttgtccttacacaaatgtttcatgtctgtataaataagaaaatagataaacatttttcccttacttatcccaggcctctttctttcactttggtggcagttatcttgaaggcattcgaaacaatggtctctatgtttaattgaaaagtcttaatgggcctcttaatttttttttcagtctcacttattgctgtttgataccccaaacckgtgagattttatacccctctgaaaccttagatttctgaactctctcttgctcttaattcttatttgcaaaccagtcaattcttttcctttctcatcttctcataatatcttgctaaaatattttggagaacaaccctggcacaccgttttgactttcatcaaccacttcccctagggccagagactcattaaacatggccttcttctaagttattgcatataatgtttttaaaaagtttgcttatacaccacatgtgccatcrtgttgccagtctccaagatctgttccttcactgtccaaatcctctaaacaaattctcccactttcagttccaatttctgtgttagactgggtagacaaactgcatcacaaatagctccaaaatgtaaaacgtttcraacaatatgatttaattttgttcttttaatggtactgatatgtctgagtaaccttccctatgtagttattcactaaaataggctgatcacttggtgacctttaacacagcttccaagattgccttggggtcaccttattccaggcagccaggagcagaaaaggtgcatggaggaggatgcatggcaaatttttatgggacgggcctggaartagtgcacataatttccactcacattacattgttcagcttttagtcacattgcatctgtaagagaggcttggaaatatagtctatatgcttagaaaaaagagtagaacatgaaatttaggacatggaagttggagagtgcattttgcttaaaatagccatacaaatgtgaaacaaaaaagttcctgcctatagatgcatggtatagcttgtttatgtcacttttgtagtttgaaagtgcccttaaacctgtcttgaatattagttcttttcttctttttcataaattctaaagaattccagggccaggcgtggtggctcacacctgtaatcccagcacttttggaggctgaggcaggaggatcacgaggtcaggagtttgagaccagcctgcctggccaatatggtgaaaccccgtctctactgaaaatacaaaaatcagctgggcgtggtggtgctcgcctatagtcccagctactcgggaggctgaggcagaaggatcgcttgaacctgggaggcggaggttgcagtgagctgagattgtgccactgcagtacagcctgtgtgatggrgtctcactctgtctcaaacaaacaaacaaacaaacaaacaaaaattccagttcaaactgaatgtccctaacctcagagaactatagtcaattcttcactgaagcatttgtatcttcctcgtctttaattctggtatattttgtttattctktttagctcctgtaacattgcatacaaattatttatattaatagttttaggacttgggtgaaattcttgaaytatgaataattttaggracttatttctataaatcatattgcatcaacaaaaatgcttggtatgtagaaggatgttactgaatgagagacaaataattactgaaataaatgttatttctaacaatttctattcaaaatttaagatatttgtattcaagtggtatggctcaggggagatgaaaatgcaaattagtgaaaaatgatctctcatttttgcatgtttacatactcgacttcgcttctttagtcattaccatgaatggaaaattgtggctgatgctgaagataaatagacatcattagtgtttgttctagaaattatatagtagctgactgaaagtggtaagaaaggtattcatgaagctttgtatctcttaacaatttggtttagtaccggagttacaatataaatagaacaaactatttttttcatgaagatctctgaacatatatctgaatttggctatgccttctgaaattgtgatgaaaacatagatagaaagcatcataaatgcatgcccatctgcaactgtttgactataaagctgtcagtgaagtagaatatcggaaatattttcatagaaatgttcgttggaattaatattttctttctggtggtggcaacaagaggacttgtcttaggaatgctgggaaacgggctcattggactggtaaactgcattgagtgggccaagagttggaaggtctcatcagctgatttcatcctcaccagcttggctatagtcagaatcattcgactgtatttaatactatttgattcatttataatggtattgtcccctcatctatataccatccgtaaactagtaaaactgtttactattctttggkcattaattaatcagttaagtatctagtttgccacctgcctaagcattttctacttgcttaagatagcsaatttctcccacttatttttttgcctggctgaagtggagaatgaacagagtggttcttgtgcttttcctgcggtctttgttcttatcgtttgtttacctttttatgtccaatgccattagtgagttgtgaaaaaaacatgactttgcactcagatacaagtaaaatagtctatcttcaaggccttaggcttctcagcttgacatacgttattccctttcttctgactctgacctctttgctccttttatttatatccttagtgagacacaccaagaatttgcagctcaactctctgggctcaagggactccagcacagaggcccataaaagggccatgaaaatggtgatagccttcctcctcctttttwttattaactttatttccactttaataggagattggatcttccttgaggtagagaattatcaggtcatgaygtttattatgatgattttacttgcctttccctcaggccactcatttattataattttgggaaacaacaagctaagacagagctccttgagactactgtggcatcttaaattctctctgaaaaaagcaaaacctttaacttcatagacaaaatttaactttctgcatctatgaaagaaataatagaagacctcataagttaattttatatttaacaatttcttttttggagtccttttaagtgttgttaaataattctgaaattttccttaaaatattcactaaccatattttctcaaagttgccggacataatgtctgattcaaggaaatgtctctactataataatgcctgctagtaacaatagagtatgtgagacttggagaaaaagataaacatttataatggaatataaataaatgcacatatgatatacaaggcaatatgaataaatatatataaaatcacagaaaaaagtgtaatgtaattttttgaacaaaaaattataaatacagtagggaaaaaattataaaatgttaagtataattaagtaagtttgttaaagcataatatatatcagtgtaatgcttggatatgtttgtggatgtgtagtgctactttgactactgtaataaaataacccagatgtaatcacagtagctgggaatgtaatgaagcagttaagagaattttgcttgcaaatgatgttactaaaatatgaaatgaagatcatgtattattttaatagaggaaatggatatgtccatatgaaagaaaaaaaacccagcactgttgtttgaggtaacttttaccataattttaaaaatggaataaagggaaaaaatagctggtaaatcatgggaagtatgttggttttatattantcttcatgaagtagtaggtgaaaatattcttccaggttaagccctgatgcagagaatggtgtaagaatgataaggccatagggaagaattgttgttttctccagacaaaatgaactcttccattcaggaaattagagtgaggtcacatctatcacatttatcaggtagggttctctcatttagctattaatatcatcatcaccaccaccaccactatcatcatcatatatttcatttaactatttgttttttaaatgtttacatgcacgatttggagaatgtctaggtaatttcctaaagattattattgtgggtaagttgcattattaaagagcaargcttatgtgaaacttaatacatttagagttagaagttgagtgtatttttacttaaaatgcattgcttgaacaaatgatttataaataatcttaaactcatcagaggctaactaccagaaatatttagtttttagtgtaaatagcatttgtataataagagagakaaagtcaataaaccattttataattaaactcttatttcaaaagagaggctttaaaagtcaatgaaccaaacagaaataagccctcacatcttcaatatcatactctcttgatgatggacttgtaagacacaaagccccatgtctaacagtgtaaggagagtaaaaggactacttaaatattaagccatgttataagatggtgttgctgwgattgatgtattatcttttatttatggtaatggcattttgagatcaagttctgctccttgaattttcatgtaataagagtctgtggtgaagatgcagcaacagagaagctgctacttgcatcaaatttatttttagttcttttcaacttggttaagaatgattagactcacrcttttattctattcttgaccaaagtgtgggtaatcccagcactttgggaggctgcggcaggcagatcacgaggtcaggagatcgagaccatcctggctaacatggtgaaaccccatctctactaaaaatacaaaaaaattagcygggcatggtggcrggtgcctatagacccagctactcgggaggctgaggcaggagactggtgtgaacccrggaggcagagcttgcagtgagccaagatcgcgccactgcactccagcctgggtgacagagcaagcctgcgtctaaaaaaaaaaaaaaaaattggtgttttctttgaccaaagtgtgggtaaaagaagagaattattggtattttcttgtcaagtttactaaaagtttttaaaaaatctttaagaatttggtattatgagtattttatttatccatagaaataacttacagaaatagagtgaaagtttctttctaccaccaaaataatgactgaaaaaattaatattamgaattcaatatttaacaatcaattagatttaacaatcagttagaaatggtagaataaagaattagtgaattggaagataactacacagagtgaagcataattagacaaagagatggaaaaatacaggctaaaggggaagagcattgaggctacagtcagaaaggcttaacatacttttggagttctggaagattagaagagagaatgtagggaagaagtaatgttgctgagacctttccaaaaataataaaatgtatcaatccatacattcgagaaaccaacaaacctcagacaagataactgaaaacaaattaacatataaatgctacaggaaaccaaagaccaatagaaaatttgaaaagtagcctgagaaaaaagatagattatgttgaaaggatcaactgtttgaatgacaastgattttcagcagaaagcatggaagctagaattcaatgtaatatattttcagtgtgtttcaaaggagtagcagacatttcataaacagaaattcaaaaggatacattttcagatagaaaaaagttactgaaaatacaaagttgaagatgcaagaaggaatgaaaataaaggcaatggcaaatgtgcgtaactaaaaggactattgactgtatagaacaataatatcttgtgttaaaagaggtaatgaataaaatgtatgccaataacatatagactggggtgaaggtgaaaagattaaatttagtttaattattatttaaccttttcattgtctgtgaagagagtctgagtatcaaattcaatgcatatactctagctatatatccaagagaagtgcattaaatgacatgtaaaataatgcccatggtagtattatttgtaattgttctaaaaagaaacagctcaaatacctrtaaattaaggaaggattaataattatagcaaattcatataatggaacaatatagagaaattgaaagcaatgaaccacatgtacatgcaacaaagtggatacattttatcaacataatgcttaaaaaaagaagtcataaacaagaagaaaatatattaaggttgtatttataaagagttcaaaaatgaggcaaactcaaatcaatttctgcaataaacgaatcatcttgaaaattgtatttacaacttcacaacttcctgtgttaaagtcaggaaattttctttctatatgtcacataaaattctagttttgatttttaacaactgacctaattggtttctaatgttctagaaaagacttataatcatttttccaggtttctgtaccttctctggttctctggttttcaagtgagaaaagctacacctaagcacccccatgaattatactggaaagttttccacctctcttttttgagcagagatttaggaaagttggcatttggatccaagtgacccaagctttagggcagaatgaaaattgcaaatcagtgcaagttactttttctcctatttgcatgtaatcaaagttgaatccagcccttcaatcaaaattacagatcgagtgttactgcctgggattggcagaactgtttgataggaaygaaaatgtttttatgttaatataaaatttgtgcccacatgtatgaaggatttttctattaaaactctacaattaagcrgaagatgtgacacactgcaagaaatatggcaccatgaaactaactacaactgtatactattggggctcagaaaatgatactgaaaatatatcgctctttgacatgctggactaaacaggaagcctcarattctctgtctgaagttttcccttctgtctgtgtctctgatcctctttcctgaagcaccagagggaattctctctggaatttccttatctgattaagaaaatttctttccagaagaaatgcaatttttaaaagactccttgtctaggaatctcatcaaatgaccaggataagatactggatcarataaccactggataagatacttggagttgtcaayatgcctagacagacttttcagttgttcttttgaaggcagctccaagagattccctgggtgacttyatctgcataataagacaacctttgttcacagtgaagttctggccctaaccttccctccacctcccstagagctcagaggaaatttgtcctaggccattgctctttagattatgcatttcctctggaaatcatttattcttacatcccttgctttcctctccccaattaagagtatacttaagagtcaattgtctggcccctgctttgggtctcatacttggtatatggctgtcatttatatatgcacattaataaaaacttgtgttttctcttatttatctattgtcagtttattttcaatgaaccctcagagcagatgaaaactttctcttggcttcttacaatacttgattctcttttaatgtatttcagttgaattggagtatatgctactgatgggagaattaaaagaattattgataaaaaacattttggmattgtttgattgtatccgtaaactgccaaagttggctgatgtatcataagatttatttgagtgactttattctaacaaatttgtctccagtattgagtatgttgaatactatatactatttttcaaaactcaaaaatattttatactatttttaaatattacttctttatttcaatattaaagtagaaaaaacattccactattttgctctggacacaaaccacttgtttcgctctcttgtttgccatttttttgggggtaatatctgttagtgagctcataatatttatcataattcacattatatgtattatattgttatatctacccattcataagatccatttctactcatatatctcaggtgtgtgttggtataaaattcacaaaatcttacaagtcttttggtctgaattttactttgtcctgtrtcacattttgtatcttgtcatttggggcctgctgggaattgagtgttatcatatatttaaacataagaggaggcagggatatatatagagkggtatcagcattcctctgtaagccaaacagctcaaggtaactcattacaggtttttaaggcaagggaaggaagactaaccttctcagcgaggggaggaagagtgcatctcctggcaacggtgcaccagcagaatttaggggttcaagatcctccagattctttgggatctgccattacaggcccaccccartttttaagttcctatttcttttttagcaaatttcctgactttaacacaggaagttgtgaagttgtaaatacaattttcaagatgatttatttattgcagaaattgatttgagtttgcttttcagaaattttagtacttctgctataggagataaggacttttttgaagacagtygtaggaaygttatgttagtttacataatccgaagctagtaattcaragccttaagttcataatttttctttctccaagttttctagcacacttataagtcagcaacgaaccctattctacttatgttcactaaaatgttctatggcagcctcactcaatgtcttgycttctataggaacttgattataagttattttgtaagtgatcatctatggacaataatttaaataactgttgtgtcaccgcatgccagggattgccagtgtctcctttaccgttggaaacagggtcatgaatacccttaaatctaattatatgagacaactaataccagacaactcctacctagacttggaatttgattctgtcatgatcmacagtctcattctgagtctcaggcagaaggggcagctgtacttgaagtgtagctgtggctattctcatggtgatyatcaaaatacaagaaggcccagacaaactgataatgcatttttaagatctctgctcatatacattstgctaatattctaaagcaattcacagacaagtacaacattaatgggcatggaaattatactttgcccacagtgggagagcacagcaaagttacatgcaaaggctgtgagtaatactattaaagggaataaataattggggctaaaaatccaatctactgtcatctcccaagctgaactttcttaaccatagatgtcaataaacataaaagtggagaatagttaaaactaaaatatagtacagataagtgataaaacaaaaataaattgatcttgagagaagagaaattttcttctataaaaatattaaaacagttttgtgataaaaataaaaaattctaatgtgcaattttctaaaaagtatagattatcaaaattttcttgtaaagaaatactcttgcatatgtcaaaaataatgaaagaaattttcttgtattatactatctcacaaattatcttttccaaaagagttgtaggttatatttaaaattttgtttataataaacatcacacaccggggcctgttgtggggtggggggaggggggagggggaagggatagcattaggagatatacctaatgctaaatgacgagttaatgggtgctgcacaccaacatggcacatgtatacatatgtaacaaacctgtacgttgtgcacatgtaccctaaaacttaaagtataataataattaaaaaaagaagaaagaaaatggaaaaagaaaaataaagaaaaacattaagttatttaaaaatctaaacacccgactgtaaaaataatacctatgtattattgctatattataaaattttagatctggctaccatcatgaaaaaaaaatatgacataccaaagaaatgctgattccagaaatgtgaagatggtttaacccatggtaatatattatgataatcaactcactaatagatttaagagggaaataatatgtttataaaatagttgtggacacactctttaaataaatttagtacccaattataatagaaaatttaaccaactaaagaaagactttctttccctaatataatttgtcccctaaacaactacaggcaatcttgtaacaaatgcttatcatattatgagttccacagaaaagaggcttgaagtaatcttgtatcctagtaatttatttgagcctgcattaccatggaagcaggaatggaagtaaaggatgagttaggcaaaaaaaggaagagagaaaatacaagacatatttagctggctgtcacttcataatcacagttgatttcttcgtatgtgtttaaaaggagtctgtgaaatttctgtctctatccaagggaagaaataaaaagaatgtatatattggctctcatctttcattggtcagagtttycagggtgtcccctctgtgtatttctcaactatattttctagcctctctaaccagcccctggtgtagcaagatcccgagagagcagcaacagcacttatggcataagcagggcacattgaaaaaaaaaaaagcaaggatgaccagcagtctgtttttggccagcagcctgcaacttcgtgtgcatttgtgtggatgttgacagactcttgcaggttctcacacttcagctgctgcaggtaaatcccaagacaggaaaagagaggtgggtagtatcaggcttaatgactgaggggaaatgcagtcaggctgcactcatctccttggagcagcttcaagcagggtccagccagcccagcaagaggcagagtatcagaatgatatgactccagtttcaaaggcctgtcacagctcagtgagactcctcaaaagagaaaccacctctctgacatctttaagaacacagttggcaaaaaacaaaacaaaccaatgaaacctatagaaagtgtttctgggcaatatataatggagtctggtatagaggatcaatacaaaaatattttcactgatatcttttttcattattattatactttaagttttagggtacatgtgcacaatgtgcaggtaagttacatatgtatacatgagccatgctggtgtgctgcacccattaactcgtcatttagcattaggtatatctcctaatgctatcccttccccttcccccraccccacaacwgtccccagaatgtgatgttccccttcctgtgtccatgtgttctcattgttcaattcccacctatgagtgagaacatgcagtgtttggttttttgtccttgccatagtttactgagaatgatgatttccaatttcatccatgtccctacagaggacatgaactcatcattttttatggctgcwtagtattccatggtgtatatgtgccacattttcttaatccagtctatcattgttggacatttggattggttccaagtctttgctattgtgaatagtgctgcaataaacatacgtgtgcatgtgtctttatagcagcatgatttatartcctttgggtttatacccagtaatgggatggctgggtcaaatggtatttctagctctagatccctgaggaatcgccacactgacttccacaatggttgaactagtttacagtcccaccaacagtgtaaaagtgttcctatttctccacatcctctccagcacctgttgtttcctgactttttagtgattgccattctaactggtgtgagatggtatctcactgtggttttgatttkcatttctctgatggccagtgatgatgagcattttttcttgtgttttttggatgcataaatgtcttcttttgagaagtgtctgttcatatccttcacccacttgttgatggggttgtctgtttttttcttgtaaatttgtttgagttcattgtagattctggatattagccctttgtcagatgagtaggttgcgaaaattttctcccattctgtaggttgcctgttcactctgatggtagtttcttttgctgtgcagaagctctttagtttaatgagatcccatttgtcaattttgtcttttgttgccattgcttttggtgttttagacatgaagtccttgcccatgcctatgtcctgaatggtaatgcctaggttttcttctagggtttttatggttttaggtctaatgtttaagtctttaatccatcttgaattaatttttgtataaggtgtaaggaagggatccagtttcagctttctacatatggctagccagttttcccagcaccatttattaaatagggaatcctttccccattgcttgtttttctcaggtttgtcaaagttcagatagttgtagatatgcagcattatttctgasggctctgttctgttccattgatctatatctctgttttggtaccagtaccatgctgttttggttactgtagccttgtagtatagtttgaagtcaggtagygtgatgcctccagctttgttcttttggcttaggattgacttggcgaaagcaagagcaaacacattcaaaagctagcagaaggcaagaaataactaaaatcagagcagaactgaaggaaatagagacacaaagaacctttcaaaaaattaatgaatccaggagctggttttttgaaaggatcaacaaaattgatagactgctagcaagactaataaagaaaaaaagagagaagaatcaaatagacacaataaaaaataataaaggggatatcaccaccgatcccacagaaatacaaactaccatcagagartactacaaacacctctacgcaaataaactagaaaatctagaagaaatggataaattccttgacacatacactctcccaagactaaaccaggaagaagttgagtctctgaatagaccaataacaggakctgaaattgtggcaataatcaatagcttaccaaccaaaaagagtccaggaccagatggattcacagccgaattctaccagaggtacaaggaggaactggtaccattccttctgaaactattccaatcaatagaaaaagagggaatcctccctaactcattttatgaggccagcatcatcctgataccaaagctgggcagagacrcaaccaaaaaagagaattttagacyaatatccttgatgaacattgatgcaaaaatcctcaataaaatactggcaaaccgaatccagcagcacatcaaaaagcttatccaccatgatcaagtgggcttcatccatgggatgcaaggctggttcaatatatgcaaatcaataaatgtaatccagcatataaacagaaccaaagacaaaaaccacatgattatctcaatagatgcagaaaaggcctttgacaaaattcaacaaccttcacgctaaaaactctcaataaattaggtattgatgggacgtatctcaaaataatargagctatctatgacaaacccacagccaatatcatactgaatgggcaaaaactggaagcattccctttgaaaactggcacaagacagggatgccctctctcaccactcctattcaacatagtgttggaagttgtgaccagggcaatgaggcaggagaaggaaataaasggtattcarttaggaaaagaggaagtcaaattgtccctgtttgcagacgacatgattgtatatctagaaaatcccattgtctcagcccaaartctcsttaagctgataagcaacttcagcaaagtctcaggatacaaaatcaatgtacaaaaatcacaagcattcttatacaccaataacagacwaacagagagccaaatcatgagtgaactcccattcacaattgcttcaaagagaataaaatacctaggaatccaacttacaagggatgtgaaggacctcttcaaggagaactacaaaccactgctcaatgaaataaaagaggatacaaacaaatggaagaacattccatgctcatgggtaggaagaatcaatatcrtgaaaatggccatactgcccaaggtaatttatagattcaatgccatccccatcaagctaacaatgactttcttcacagaattggaaaactactttaaagttcactgatatcttaaataaggcaaaaatgctctttaacatctgtagaactcaacattgttctagcacttttagctaatgtaataggacaagcaatataaactcatctaggaactggaatgagatagacaaatttacaatataatgatgtgatgatgtcactgcttaaatgaacactcctaaagaatcaacaggtactattagcataagaaaagataacaaggttcttcatataacatcgatttaccaraaaacagtgtatctattgccaacagtaaattacaatatgtaaatttaaaaaattctttggccaggtgtcatggctcatgtctgtaatcccagcatgttgggaggcccaggcaggtggattccttgagtccaggggctcaagaccagcctgggaaacctggtgaaaccgtgtctctactaaaaatacaaaaattagcggtgtgtggtggcacacacctgtagtcacagctactcagtaagctgaggtgggaggatctgatcttgggaggctgatgctgcagtgagccgagatcgcgccactgcactccagcctgggcaactggagtgagacattgtttcaaaaacaatacatgaagagatgtatcatgttcatagataaactgagtattataaaatataatttctttctagattaatatagtcaatgcaagttgtggcaaagtcttattaaagttttgygraaattgtgaaaaatgacttgaaaaatacatatagaaaattaacagttcggagataggcaagaaaacttggaaaaagaagraggtaagttctttactgggtatcaagatttattrtagtgtaattatgaaaattgaaagaattttggcacagaaggatgcaatagacaacaaaagggaatagtaaggcagaatatatttaggtaatttactttttgtgcacatgtaatttgtcttayaataagattatcattagaaattagtagataagatgtgttttttgcagtaaattgtttggataatggacttttcataaggaggaaaatcartgtgtaacttgtatcacaaaaaatagtccaaaaggactaagatctaaacattaagaacaaaatttaaagctaagaaaaatgtaaattattttataaattcagggtaggtgaggattttatctgaaagatacaaaaaccacaaaacataaaggaaaagtttgataagttttaaattccttggaaagatctgttmattaatccagctaagttagctgtctgactctagtctaattatayatctaggcatttgataatgaatacagaaagagtattaaaactaggaatatatggatgaaattaaaaatactcattttacctaataaaaaaatcatgttcttagatgacattctcattgttgtgatgacatcaattcttgccaaattcaggtatacatgtaagatgttaaggcaaatattgccattttttttctcatttagagtagtttattatgctaagggcctgggaaacactttagattcagtaaaaaaaactacctagaagaataaagcagaatgaatactagaaaaagactgaaagaaaaaaaatgtgtaaagacgcacagaatgaggaacatctgttggtaaaatatattataaaaatactaaaaaggtatccagatagtaaaaagctcagaaacatgaaaaatctctttcactactggtagaagcatatagtaggatatagtcaaagcgaatttagcataaaaatacatacactttatatctatgtatctatgtacacatactttttgatatgcatgtataactacatatttctgaaacgtttctaaaaataatcataaaatgattacagatatgcaaaaacagttatagagctatgtatagtttgttaacattaagataaaagccttaacattttttatgcttaaaaacattataatgcttcattatagcagaatacacatttgtcattaaaagagatayagagcagaatttctcagagttcagcagaatattcatagttgttacaaaaaaawgttcttaatttttaaatattttaggcaatgctggcttaagcgactttaacctttttgtttgtttttaaatcataagctttctgtatactctgytagtatgtaaaaggaagtgctctatgtggagtttcccaaatttccttttctgtgaaatccttttctgttttagaaaataccttttaattctaacattttcaggaatttaatttgagaaattctaatattgagggattatgtatcagtgaggaacaatttcattttttagaacatgtagactgggtatggtggctcacacctgtaatcctagcactttgggaggccaaggaggatagattatttgaggtcaggagtttcagaccatcctagccaacatggtgaaatcccatctctactaaaaatacaaaaattagccatgcatggtgttatgtatctgtaatcccagacactcaggaggctgaggcagggagaatcacttgaacctgagaggcagaggttgcagtgacccgagatygcgccactgtattccaacctgggcaatggggcgagactccgtttcaaagaaaaccaaaaacaaaaaacaaaacaaaaaaagtataggcacatgtgtaggttyggatggaacaataaacactrcagagwttcrggggattgtggcagatggatgtgaggcaggactagattgcagctctagacagaccagcatgtggatgcttgtattgtgaattttagctacaaatccactgcaagaacaaaccagtaatcccaagaggacccacagatcctctgaaggaagcagagtgctcctgcaggacccaggagacacccaaatacagtgacttccccaactgcaggagtaggaaagggagaccctcctcttctgaacacwcaccaccactggagaactgaaggtctgtttgcaggagaagtttctggctttaccttgagctgagttaagttagagagctgagtgaaatgcaggggtagaggaagcagggcagaaggccctgggagctcactgggtccccaaacagccgattcctgcctggcaccatagtactccatcaggagggtggccagaggagcagggggtaaaaccccccaggcagaagaaatctctagctgaactttataacaatttgaactggtcaagaagcctcctggccagaactcgggggaggatgtgaatcgggcatgcagacktcacaggctggggaagaactaaagcccttttctctcatggctgggaggcagatagccttgggcaagttttcaagcccattttgccctctgcctggaaatagaatcggtgctgtcggctgggaggggcatggtgggagtgagaccagcccttcagtttgcatggttgctgggtgagacctgtgactgttgsctttcccccactttcctgacaacctgcaagactcagcagaggcagccataatcctcctaggtacccaactccagtgacctgggaatctcatccccatcccccacagcagccacagcaagacccacrggagagtctgagctcagacatrcctagccctgcccccacctgatggtccttccctatccaccctggtagtggaagacaaagggtatataattctgggagatctagggccacacccactgccagtccctcaccacactactacagctgatgctttctggaaagcaccacctcctggtaggaggccaaccagcacaaaaatagagcattaaaccaccaaagctaaggacccccgtggagtccattgcaccctccatcacctcaactggaacatgcactggtgtccaaggctgagagtcccataaattgttcacatcacaggactctgtgcagacaactcccagtaccagcctggagccagtagacttgctaataagttgtcatctccatctattacagtatttgctctaatcatatttgacttatatacctgggagctccagtgttgagtgcatatatatttacaattgywatatcmtttccatatgttgaccttctttgtcrcttcatagtttttgtcttgaaatctattttgtctaatattagtatagctattcctctttttttggcttccattgccatggagtgtctttttccatccctttattttctatctgtgcatgtctgtataggcgaattgtgtttcttataggcaactgattagctagactatgccttttgattggagagtttagtccatttacattcaatgttattattggtagtaaggacttacttctgccattttgttatctgttttctggttatgttgtggtctgctcttctttctttccttcctatctttctttagtgaaggttattttctctggtgatatgatatagtttcttgctttttatttttttgtgtgtatccattgtattatgttttttgatttgcgattactatgaggcttgcaaatactatcttgtaacccattatttcaagctgatagcaacttagcactgtttgcataagcaaacaaacaagcacaaacactaaacaaatgaagactctacaccttaacaccatcttctcagtttttaactttttgtgtcactatttatatatcattgtgctgtctatatcttcaaaggttgygggaactattttttttttgtcagttcatgatttaatttttgtactttagcgaggtttacacaccacatttacagtgttatactagtctgtgtttttctgtctccttactattaccagtgagttttatagctttaggtgattacatattgctcattaatgcccttttctttctgattgaagtaatccctttaacatttcttataggacagatctggtgtttatgaaatccctcagcttttgttggtttggaaaagtctttctctttcatgtttgaagaatattttctccagtaacactattctgggctaaaagttttttccttcagcacttctaatatgtcatgccactgtctcctggcctttttccactgagaagtctgctgccagatgtagtggagctccattgtacattatttgtttcttttcttttgctgctttagaatcctttctttatccttgaccttagggaaattgattattaaattccttgaggtagtcttcttcaattttayctggcattgtttgttgagaaaaacgattaattcctttcgaattgcaatagtacctttttttgaaagcaattgaccatgaatgttggtgttagtttctggactctcagttgtgtttcattgttctttttgtctactgtaatgtgagttctatagaatcctgattagggcagctttgaagtaagctttgaaatcagaaagtataatcctccaaatttcttattttttaacaatttctttttgtgatcttgtcacttggcatttccagatatattttaggagtggttttccaatttctgtgaaaaaagtcttctgggatttggtagggattgcactgaatatatataagttgacttttcacctataaagactctccttgtgctgaatttcagttcagctggtcatcgttgcttgtacaactctgtgatgaattgaaaatataattttggccttttgtttcttttatcctagttgttggagacggatgtcatgcctttcttaaccttgtgtgttctgctcaaaaatggaggttctcagccaggtgtggttgttcatgcctgtatccaagcactttgggaggccaagatgaggggaccacttgagcacatgagttgaagaccagactgggcaacatagggagactctttgtctctataaaaaaataaaaaaaaattatctggatgttttggtgcatgcctgtagtcccagctactccagaaggtgaggtgggaggaccacttgggcccaaaagtttgagactgcagtgagctgtaatcaagccactgcactccagcctgggtgacagagcaagaccctgtctccctccctccacccaaaacaaggaagttctcactggtatcttttatgtatcaagtaacacatgatcatatgaaaaattaataatccttgattcctgcctgtaccagaaggtaaaattgaaagcagttatacaaatagtatattaactcctcagaaagactatccaaagagaatattattatcatctgtattttacagatgattataccaaggcagagagtagttgtaaaatgaggtctgtctggagcatacctatatgaagcagaaaatctggtttcctgtcttggcagtctgactccaaaatcctctcttagaaacaattatactgtaaaaatgaaaaataaataaaatccaagattggagactgattttaacatctaytcatcttaaaccattaagtaatcaaaaataaattaagcagaggaaaacaaaaccaaatattcatatagaaagaagtctagactcttcaatggaaaacgtgtttttcaagtgacccacaatagttacacaattgctgagcattttaattaaacaataaatatttaagtattaactagactcaagagaataacttagtgaaaggcccaagcatgagtggtaagtttgataaatattgaaaatgggtcaaaaagcccaaatgggaaaatagggctatttccacctggatgatctccctaaaattaattttccattttggaaattataggacaataattcctcctattcatgaggggtgagtatgtgtgtatgtgtgtgagtgtgtttgtattaatgagcttgttaacaataagttatacaaaagtattacttagtagcaaccaggttttaaggactattggcctttttgaggttcctaagaaaaccttgaatgcttttggtaggaaaagttgggattcactctacatattactggcattgaaaaaaaataaatctactttggtgatgatcctagctatcctcaagctccattcaccaggctatacaaccaatgtgtcatataygtattgggttgtaaaatatctctaacaactgaagttgctgaaaacaaattatggagaggtgaaacaaggaaaaaattgcagaacaattaaaaaactcttccttggcatgctagtatatgagaattcagctttcacttcaacatcaatatggaaaattttaccttacagcaaggatgttgtgtttgaataggagttaatttgagctgttttggaaattatcatgttttccataaagacagcattgatttcatccattagcatattgagatgatttcctstttgacgttggtcacagaatttaaaaggaacaagaacattactgcacattcaggaatcagttacacatagaagttaaggtcaggaccttaaagggaatcttgaccagtgatattaggcctactttttaaaacattcagacatgataaatttactaccattcattttttcaataacagcaatgatatatttatttttcccatggacacctacattaagcttgttgtctatttttatatttcaacatttttgtctttgagtccttttaggagttgttaaacaatcctgaaatttcccttacagtgctgttaacaattatattttttcaaagtcctttggcataatgattgattaaaggaaatatctccagtataattacacttgcttataagaaaagagtatttgaaacttgaagaaaaaaaggttagacaaatttataatgaaatataaataaatatgtataatatataaggcattattaataaatgtatatgaaataactatcatagaatgaaatttattgaagtaaaaatacattctaaattagaataggaaagaacttggaaactattgtttaataatatgttwtataaatacaaaactgtaaatattactcttacgttacttattttggaaaggatatgaaacaatgggaattttcatattctactcctaggatgataaatctgtaccatcattttggctgagtatggcattatctgattaagatgaaggatcacatcctaaacccagtatttacactcttatccgaatacatatacatgcacatgcgtatcactgagtttcagtagctaaagttgagaagtacttggaatgtctgtcagtcctccaaatggataaacaaattatggcatacttatacaatggaatactatacagtgatcaaaattaacaaagaagactgacatgtttacaacagkataatacaacaaaggaaatgaacaaatttgagctacatagataataatactcacagatgtgaaaggaattatcaagatggaaaaatacatttrgaatgatcttttacataaagtttggaaaaaaaatttttaatacattgtaatttgttacattggtgatgaaactctacagtgaaatatatgaatgatcatcataacaattgggataatcaggagggaggaaataaaagggaaataycaacaagaagacgtatattgggagtatctggattgctggcaaattctattttctgaccaaggtttggtaacatcaatgttaatgttataattttttcttactgtttttaggttttattactctctgtatgttatattccccaataaaaaaatgttaaaaaagcaaaaacataagtacatttctacgtataaattcagggtgatacagcatattctcatagataccattgtaattagagtttttgctgaataaaggagaatagagcattatggtactaagaaatacaagttaaaatttaaaactttttttattttgagacagggtcttgctctgttgtccaggctggagtgcacaagtgcaatcgcggctcaatgcaacctctgccacccgggctgaagtgattctctcagttcagcctccagagtagctaggacaacaggcgtgcaccaccacgccctgctaattttttctatttttggtagagatgggattttgccatgttgcccaagctggtcttgaactcctgtgctcaggcaatccaccgcctcagcctcctaaaatggtgggattacagttatgagccaccacacctggcccaaaagttttcttaaattaattaaaaaagaagataagcaagaactgtaaatccaccttcttaatgctaatatgaatttgaaacatcaaaatttgaatatttatgattgctagacacctttattcttatttccaatttaattattcataattcacatttcagtgtcagaaagtcatgaatttccaataaactatagtaagatggrtattacatatatagacctattatgccaaaatgtgtctctaaatgaaatatgtatattcatattgttagcattctaatttcacaatactattcatgtgtacacctgcattttgggttaaataytttgttactatatattttttggttctgcattagagaagaaaaatcataggcaaatttgttaaggtgtaaaacatatttagyatgatctttgagtatgtttgtgcatatataatgctactttgactgctatagtaagataacagatttagtcaccatagctaagaatgkgaaaaagcatttacaagaatttggcttgctaatgatgctattaaaagatgaaataaaattgatatgctgtatattgcatagagtatttgtctattttcatattgaaaactgcacaaaaaaacccaaaatagaatcctaattgttggagatcacttttgctatgaatttttaaagtrtaataaaataaaaaaagcaaataaatcattgaaaatacattggttttacattattcttgatgaaataccacgtgagggtatttgcctaggcctgatgctgagaataatataagaatcatgaggccatgaagaagaataatattgttctctcattacyttgaagtctagtacttaaaaaacaagactgaaatcacatttatcaaatagcattctcccttttacctgccatcatcattatcattatctatatccacatctatctcattaaatgatttatttttgaaatatttaaacacataatttggaaaataagtaattttaaaaagatcatmattattggaaagttacaggagtaaacagcaaagtttaagtcaagctcaatacacttagatttagaaattaagtgtagtttattttacaatacattgcttaagcaaataattatttatggatgagcttaaactaatcctcttttcactatgatcactatggaaacaatttagattttaatggaactaaacctccctagtaagaaagacaaagcaaatagcacattttatgagcaagcttatatttctaaagagagagttttaggaccagattgtcaaacagaggtaagacctcagatcttctgtcacacttgagtgagtgatgatggagtttgaaggttatagttctrtaaccaaaactatattcacggatagggattaaatggtggaattccttagaagcaccagattcagttttgtttccatgggaataaaagttcttcaatgtttgataaacttgtaagtactgttttactctttgatcttttaaagattgttataaatgaagaagccttgatttctgcttataaaaacagagtaaaatttaaatcgtggaatagattggtggagctgtggttgagatactatattttattaattgtaatgacattttgagatctagtgctgctcactgaatttccctataaggtgagtttgtggtgatgacccagcaacagacaagctactatccaaaaaaagctactcacatcaaatcaatttccggtttcttccaagttgcaggagaatgcctagaccatgattttaatctcttctgtgacctttgtattacaaaaagaagaaaattgtgaccattttcatgtcaggtatackaaaaatttataaaaactcctttttaaagaacttgtgagtagcttcactatgcctggctmacattttcatttattgtagagggagtttcggtgtattgcacaggctggtcttgaactcctgggtgctcctgccccagccttacaaaatgttgggattatgggtgtgagccaccctgcctggccaataaagagacttattgaaaatrttaagttgaatatgcaagaaggaatacraattaatgaaagtgrtaaatatgtgcataattgtaaatgaatgtttrctgtataaaataataatgtcttgagggtgattatataattgataagacatatgcaaatggcaaaaaatagactggaggtraaggtgacaggagtaaatttacttgaagtagtttttgaacttttctatgtctatgaggagattttgaacaatgaccctgtaattttacccaaaggtatatatacagaggaattgcatcaaatgatatatgaaagaattctctagtagaattattcataacttcaaaaaagaagcwgaccaaatgtacattaaggatgggtgaatcattacattaattccatgcaacggaacaatatagagaagtgaaaaaaaaccacatgtacttgcaactatgtgactaaatttcagaaacataatgttgagtccaagaagccacaaacaacaagaacatgtaggaatgcacctacacagagttcaaagcaggccagaccaagckatggagtttagggttgcatacctagttggtaaagtrtgaagaaaattaaggaaataatcaatataaattatggatattgcttatctcaggagatgtgaagaagggtttaggsggttggaaagtggcatggaggtggacctaggctgttttcagtgttccttgtcttgctccacataatggttacttgaatgtttatgatacactgcggtatttcccatttttgttttggttcatttctaagtgtgcattataattttaacataaaaagttttaattaggagaaacgtctcatagaaattattattactcgtctcattatatactgaggggaaaaataaactattggtatacattcttatacaactctaagagagttgaagtaagaactttatttagttgcaacatgaggaaatttgagatgattttatttgccaccccagatttttccaaaggatttcttctagccttaattatccacctcacatgaacaaatctttgccrttccccatctattttttcttttggctcctgaattcctgacacaacaaggttgtacacatttcccacactcttggtttagcagagttcttttatcagttatgtttttctgcaagagaaacccttcaaaactacattggatagctctggtgacttgagatgggccaaattctgcatcttggaggtcgttagagtttggccaatttagtctggatcaggtggggggcaatctgccttcattagtttctgattmtccttctgggaacagtgtactagccaggtgatattctcatagtaaatggaaagaggaagaacacccagtatggaagcyatctcaaatttctatgcaaagtgtattaattttttgttcatcaaagtaagttaaatgattgaacttcaagttcaggggaaaggtagtcagtcttcgtgtgatgggagkatactgcaagattatatatcaaagggtctggtactsaggaatacttataaaattgctgaacattttaattaaataataaatatttaaatattagacttgagagaaactttaccaaaggcctaagaattagagatatgtttgataaataaacattattcrtgggctgaaaaccttgagtgggaaaataggactaatttcacctggacaacctcctggaaactgattttttattttggaaattatgagaaaataattcgttccattcataagtggtgtgcacatgtgtgtgtttgtgtgtgtatttatgagcttgtgaataatgaagttacacaaaagtattagcagcaaccagatcttatggagtattggcctgcctgtggttctcaagtaaatcttagatgcttttgataaaagcagtttggattctgtgtatttaaatctggcatttaaaaaagtccgtattggtgatgatcttagttatgatcaagctccctttaagattttagacatttactatacgatctacatatcrggttataaaacttcccaagcaactgaagtcgctaaagacaaatgatggagaggttacacaaggaaaaattgcaaacactggaagtgaacatgtccttgtttgcatactagcaaatgagaattcaggtttcatgtcaatttcagtatgaataattccagcctataacaagaacagatggtgaatgagtcagttaatttgaattgttttgaaaataagaatgttttccataaagagagcattgaacttatccattagcatgccatggtgatttctgrcttgacactggtcacagcaattaaaagtaaaaagaatgtcacagcacatacacaaatcaggtgcatatagaatttaaggtcaggatattcaagcaatcacaaccagtgatattacaccagcattttaaaaatttctttttgtctgttcagacatgataacttttctgcccatcattttttccattctaatagtggttatatttgtkattggaaattttgctaatggcttcatagcattggtaaattccattgagtgggtcaagagacaaaagatctcctttgttgaccaaattctcactgctctggcggtctccagagttggtttgctctgggtgttattactacattggtatgcaactcagttgaatccagctttttatagtgtagaagtaagaattactgcttataatgtctgggcagtaaccaaccatttcagcagctggcttgctactagcctcagcatgttttatttgctcaggattgccaatttctccaaccttatttttcttcgcataaagaggagagttaagagtgttgttctggtgatactgttggggcctttgctatttttggtttgtcatctttttgtgataaacatggatgagactgtatggacaaaagaatatgaaggaaacgtgacttggaagatcaaattgaggagtgcaatgtaccattcaaatatgactctaaccatgctagcaaactttgtacccctcactctgaccctgatatcttttctgctgttaatctgttctctgtgtaaacatctcaagaagatgcagctccatggcaaaggatctcaagatcccagcaccaaggtccacataaaagctttgcaaactgtgacctcctttcttctgttatgtgccatttactttctgtccatgatcatatcagtttgtaatttkgggaggctggaaaagcaacctgtcttcatgttctgccaagctattatattcagctatccttcaacccacccattcatcctgatttkgggaaacaagaagctaaagcagatttttctttcagttttgcggcatgtgaggtactgggtgaaagacagaagccttcrtctccatagattcacaagaggrgcattgtgtgtcttctagcagaaaacaaactggtggtgtatgaaacattttatatttcttactgggttttctgtaatatatgtatatgaataatttccamatgtatacctagaaaagtcttttacctaaagttagtctagaaaagtayatatatatagatgtgtgtgtgtgtgtgtgttgtgtgtatgaaaaactgaagaacattgacaataacatgctttttattgttttttcacaaaaactgccaaattatagaaaatatgacaaaaattcctcaattatgaagccatgtttatttcatacatgtattttatatttcatttgtagaatttatatctatttataattattaagaactaacagcttatctcaggaaaaatattgctcttttctattgttatttgaatgacacaaatataccacagtgtgcttacaatctgttgttttaacctataactttttgataataaggtcgttcaattcttaatcactaatgaggatgtatcttcagggttttattccattatgaattcctattttatgtttagtaaaaagcaatcagaattattgttacaaaacaatgaacacaataaaatttgagtgasaagtayaygtakagtaaatttcatgtatgtgtaccataaacagtactgaggaatattagatttaatrcaagtatgtgaatagcttagaaaaaaatctctgctataagagggatgaaaaatcatgatcatgatcttgattgctattatcagcttccatatgcagttagaamagtcatttcttccagcttttcaattaaagaaaaactttttttgaaattgagctcwgatgtaaattattttagtattttttctaaagcacttctaagcccctgaattgctaattatatccttatcttccatttttaaaattctttctaaacttcagataagagaactccagtcttccgttttctaaaaaaaaatctgtcaatgtgaaaatagtataaaaattatggaaaataattcagtgaaactttttttaagtgttaaaatagtatctatgaaatctatgtattaattatgggatttgtcctagtgtaattttgttgtcaatgattaaatggaattgtcttgacatattcattaatrggaagttctattataagaaggaaatgtacagtcttgtttacagctaaattctacatgactgtattaattcttggtgttatgaaattttaacaatgttgttcagaccttaagataaatcatccccacacctgattcatgtattttttagaatcatgtatcttcctcagtacaatgtaagaacyataaaagaagagatcgtgtctgtcaggctttctgttgactcccaggacctagaacccagcacaaggaatagatggtcaaaaatgatattttaatgaacaaataaatgggtggataaaatgggtaagctgatgtggtaaaccaatgaaarggaaactcatcacaaaatctgcagttgcatgagttcccctgttctggtctcaggttaagattacaggcttatccaagcagaatccttcctcagaggaaaagtttggctattccacaattttaggggaaatatcacaataatatagtcttgatgcagctgtatcaggtgtctgaattggmgacaaggtagaacatcaaaattagatgccactattacaatattttaaaaaagcatataaaagactttggtctatttgcgtatgtatttttttctattgtgaattatatatttgtattatgatattttctagttgattatcatataaaaatggcatttcatttcaaaaaattgagttagtaaccagctactttactaaaatgtttttaacgtaatacctgatattaaagtgatgacatttatmtggaaggccaattcaagacaaaaatggcagggayatgtggaaattgagacaagaacsgatgtgaaacaatgtgtggtgatgtcyggtatgactctgctggcagccacttcacagtgaggtgagagagacagcatggtggtcatcagatgcatgcacttgactcccagaacttttccagaagggctacaaagggaaacsacagctggcattagtccatggaagagagagagaggagggagaatgtatctgctcagctgtygttagtcttctgtttccccttggccagggtttccctgagttagaactaccatctctgttgttctgtcttacatcatccagtcccttggtggtggtcatgaaagtcagacctcatgcccacagtgtggtgatgcattcaagtcccaaatggaaggatgatctggatcaggcaaggtgctgaccaggggaacaggagatagtgaagggaatctgagaaagcacatgtttgtgtccaataccaccactccttgtgccactgagacgtgctcataccctccagtcatggctggctttatgagcatatgacttgcacagttgtacagggttttgtgcttataggggcttgtgcttagagtgactctatgcttggattaatgttctgcacttgctgtttggcttttcagacagagtatacttcagcattccctctgctgaagagggaatggtcttacactggtcttacactgattccatagggatttgctctcccctctcctacaggcttgtcagagacatgcacagagtcctataatgcccactatgcatgcctctagcagctttgaattccgctggatcatctggcacagtggccagagcagcytggaccagagcctatatcttctgtagagccctctttagttctgggctccatttgagaccagtagcctttagaaacatcgttcgtgagtcagagcaatattctcaaatgtggaatatgttgtctccaaaatcccagtaggcccccaaaacatagtgtctcttttgtagtgataggaaatatayagagagagcaaaatgccgtttactgtaaaaaagattgtctcagcatgtggactagggacacyaaaaaccttaaaacrtcacctatgttgtcggtccctgaatcttctctgatttatctattttcttctggtattttacttctgctcaatgttataatattttactatactgaagaaacttgccatttcctgattattgtaccaactaatatattattattggtattattttgagacacggtctctttctgtccctgaggctggaatgcagtggcaggatcacagctcattgcagcctcaaccttctgggcacaagtgattctcccacttcggcattgctggcagctgggactgcaggggcacaacaccatgcctggctaattttggtattttttgtagggctgggatgtcaccgtgttacccaggctggtctcaaactcctgggctcaagtgatctgcctgtgtcggcctcctaaagtgytgggattacagtcatatgccacagggcccggtctgtaatattatcaatacattaaactggcaggatgttttaaaaaatgtaaattaaactgagaacagaagtgacatagccctgacatacaacagtgaagcagtgctattattcttacaaggcaaattgttttgattttccctcataatgggtgtagattaagaaccattcaccaaatcactagccccacaaaaagtaccagaagctctgctctgctcrgtgaagatagcacatcctggaaagcatttgtgagtgttgatttaagtttatggtagtctgcattcattcgataacccatctggttttggtagaggccagataggttaagtgaatcgggttatagaaaagactaccatcccctgtaactttcaggtgttttgtcatgacagtgaccagttccattccttagggaatgcggttattatattttatatattttgttgccagtagaggagaatttcagaggctttcccttggtcctgctataataatgttccttactctacagttcacgaagaatgtgagagtcctgccagctgccatacgtatccatttcaattcaggaasaggtaataactacaaactgattagatccaccttgggatggacatgagccgaagctctaggtagcatctgaccttcaaaactcccactgcgggctggatgtgatggctyatgcctgtagtcctagtactttgggaggccaaggtgtgaagatccyttgagagcaggagttccctgtgcatcatatggaaactccgtctctacaaaaaattttaaaaattacctggcatggtggtacatgcctatagttccaaatasttgagaagctgaggcaggaggattgcttgagcccaggagttccaggctgcagtgggctatgattgtgccactgtactccagcttgggtaacagagggagatgctgtctcagaacaaaaaaaaaggtggaagttctcactggtgtcaaatatcaagaraaacakgatcaaatcaataaktaacaatctttggttcctgcttatagcaaacaggtaaaattgaaagtagttacagaaatagtatattaactcctaacaaaactaaccaatgaaagttttattatcatctcctttttgttgttattttgakacggagtctcgctctgtctctcaggctagagtgcagtggcgtgatctcgactaactrtaacctctgccttctgggttcaaatgattctcctgctgcagtcaccgagtggctcggattataggtgcgtgccaccaccacctggctaatttttatatttttagtggagacagggtttcaccatgttggccatgctggatttgcactcctgacytcaggtgatccacctgccttggcctcccaaagtrctgggattacagccatgagccactgcgcccgctttttataggtgattatactgaggcaggagtagttggaaaatggagtctcagagcatagctataccaagcagggaatatgatttcctgwcctggcagyctgactccaagatcccctcttagaaacagttatgctataaaaactgaaaagaaacaaaatccaggattggagactgattttaacatctattcatcataaatcaataagtaatcaaaaataaatagagaaaagtaaaagtgaatattcatacacagagaagtgtaaattcttctatggaaaacatgtttttttagtgcccaaggaatagttatacaattgttgaggtttttctttttctttttcttttttttttttttttttttgagactgagtctcgctctgtcgcccaggctagagtgcagtggcgccatctcggctcactgcaagctccgcctcctgggttcacaccattctctggcctcagcctccccgagtagctgggactacaggcgcctgccaccatgcccggctaactttggttttgtatttttagtagagacggggtttcaccgtgttagccaggatggtctcgatctcctgacctcgtgatcagcccgcctcggcctcccaaaatgctgggattacaggcgtgagccaccgtgtccggccaaaatagttgagtattttaattaaataactaatatttaagtattctcaagagaataacttagttaaaggcctaagccttagagattaagtttgataaacattgaaaatgggctgaaaagcccgagtaagaaaattaattttcattttagaagttataggacagtaatttttccaaaccatgaggggtgtgtatgtgtgtgtgtgtgaatgtgtttgtgttaatgagcttgttaacaataagttgtacaaaattattagttagcagtaaccagttttcaaggaatattggccttcctgggcttcccaagaaaaccttggacacttttggtagaaaagttgggattcactctccataaatctggcattgaaaaaatgattcaacagtggtcatgattctagttttgaccaagctacatataacagtgtaggcatccaatgtatgatttatgtattaggttggaaaatttccctaacaactcacattgctgaacgcaaattatggagacaytaaacaaggaaaaaattgcaaaatgatgattaagtgtatgacttgatttgcatgctagcaaatgagaattcagctttcacatcaacatcagtatgaaaaattttatcttataacaagcatatagtatttgaataggagttaatttgagctgttttggaaattatcctgttttccattaagacagccttgaactcattcaatagcattccccggtgctttcctgtttgacattagccagagaatttaaaaggaacaagaacgttattgcacagtcagaaatcaggagcacatagaaattaaggtcaggaccttaaagggaaacttgtccattggtattaggcctgccttaaaaaatgcggacatggtatgtttactactcatcattattttccataacagtaatggtagaattygtattttcccatgggcaccttcattaggcttatagactattttgatatttcaacatattattttctttgagtccttttaatgagttgttaaacaaygctaaaatttgccttacagtatactgttaactaatsatattttcccaaagtcatttgacataatgtttggttaaaggaaatatgtctagtacagttacactctaggattgtaatcctagaattgtaaatcagtgcaattactttgagtatggcattatctgattaagatgatggatcacatctgaagacccactattgcactcttatcagaatacatatacacacacatgcatatcactgagttttaattgctaaagttgacaagtctstcaaatgtccatgggtgataaaatggataaataaattattgcatastcatacaatagaatactatacagcaatcaaaatgaaccaactagagagacgtttataaagaatgttaataaaaaggaaaatgaacaaatttgcactacatagatacgagagatattaagatggaaacatgattccgtataattacatttatataaagtttacaaaactatatttttaatgaaytgcaatttattacattgttgtcgaaattctaaagtgagacccaagagtgattattgtaacaactggcacagtagggacggaggaaacaaaagggaaatgatatcaacaagaaggtgtatatggggagtgtctggattgctggtaaattctacttcatgaccaagatgtggtaacatgacccttaatgctataatttttttctatactgtaccttcaggctttattaatttatatatatgttatgtttcatagtaatgaaaatatttwaaaagcagaatcatataataaatgaatgaatataaaataggctgaaaaaacattcttgtagacaccatggtaattagaatttttgctgaataaagaagaatagagcattatgatagtaagaaatccaagataaaattttaaactttaaattaattttaaaaaggaagagataaacaggaagtctacctccacactcttaatgttattcttattttgaaacatcagattttgcacatctgtattttgctrgacacctttttttcttatttccaatttaratatttatgatcacaacatttcaaagtggcagaaattagtgaatttccaatatatagtaatatmgatattaaatatacaggacaattttctaaatttatccctaaatgaaataataatacacatatttttaccattcaaagattataataccatgcatgtgtacacatgtgtgaggaaaaatattttgatactacaaattttttgaatattacaggagaattagtagaaagataattttgttaaggcataaaacatatgtagtataactacttggactgctataataaaatcacccagattttgtgacagtagctgagaatgtaaataagcagtagagakaatttaacttgttaatgatgctattaaaagatgaaatgaagcttattcactctataattgcaaagagtatttgtgtaagttcataggaaagtggaacaaaattaaacagccaacaagagagtattctttgctggaggtcaattttactgtaatttttagaatgtggtaaaagaaaaaaaatagcaagtaaatcattggaaatgtgtcggttttgtattattcttgacgaaatattatgtgagggtatttgtctaggcctgatgctgagaataatacaagaattgtgccgggcatggtggctcatgcctgtaatcccagcactctgggagaccgaggctggtggatcacctgaggtcaggatttccagactggcctggccaatatagtgaaaacccatctcttctaaaaatacaaaaattagctgggcgtgatggcgggcacctgtaatcccagctacttgggaggctgaggcaggataatcaattgaaccagggaggcagaggctgcagtgagccaatattgcgccattgcactgcagcctgggtgacaagagtgaarctccatgtcaaaaaaaaaaatcgtaaatccatgagaaagaataatagtgttctcccactacccttaactctagtacattgaaaagaagacccaaatcacatttatcaaataacattctcccttttagctgacattatcatcattattataatcatctacatttacatctatcttattawatgatttatttttgaaatatttacatacataatttggacamcgtttacataagttctaagagatatcattgtgggaaatttacgttagtaaacagcaaagttcaagtcaagttgaatacatttagatttagaaagttaagtgtagtgcagtttaaaatacattgctgaagaaaacaattatagatgatattaaactaatccaaggaacactataaaaagattttgattttagtataaataaaattgcttaataagaaaaataaataaaccatttcatgatcaagctcttatttctaaagagaggattttagggctaaacaaatcaaataagtaagccctcccccacatcttctctatttcatgtaggtaakgatggagttcaaaggcacagagccccatttctacaacataagcaaagtgaaaattaattcatggaatacaatgacatagctgtggttgatgaactatattttatctattgcaatgatattttgaaatgcagtgctactcattgagtttccttgtgaggasattgtgtggcgaggacccagcaagacaagctactatcccaaaaaagctacttatatgaacttcatttcyggtttctttcaaattgaaggtaaattccaagatgaagcttttattctattctctgaccaaagtgttggraaaagaaggaatttgttaccattttcatttctaacatactaaaacagaaaacaaaaaaccccaaaatcaaaaacacttttaaaaagaacatgscgttaagattagtttgttcagtttccctgtagaaaataatttatggaaagataataaaagattattctgaacactaaaacaagaaaactaaaaaatgaattatcaatattgagaatccaatagacagagttaaccagttagatggagtagaagagataattagtgaattggaagatagctacaaagaatgaagcactgagagaaagatggaaaatataagactagagggtaacaaattcatgctacagttggaatatgtaacatacttctggagttctgtaagattagaggagagaaaatagagcaagagaaaatacaaagttgtactgaaaatacaaagttgaacatgcaagaagcaataaaattaatgacaatgaaaaataagtgtgtaattctaaataaatgttgcctgtagaaaacaatagtgtcttgttggattaattgtataattgataagatatatgcaaatagcaataaggagactggagayaaagtgacaggaataaatttagtcaaactgttttgggcttttctatgtctgtgagtagaatttgaatatcataatcmaggaccgtataaatctacacccagatatatatacacaaaggaattgtagcaaatgatatgtgaaagaatgttcattgtagcattattaataatagctcaaaaataagctgcccaaatatatatcaaataaagatggataaataattacagtaaaatcataaaatggaaaaatatacagaagtgaaaataaatgaatcacatgtacatgcaaccatgtgattaaatttcagatacataatgttgagtccaggaagccatgaataaggacatataggattgcacctatacacagttcaaagcagaccaaacgaagctattgagtttagggttgcatgctttgttcgtaaagtacaaagaaaataaaaaaagatcattataaattatggatgtacttatcataagaggtgtgaagaaaggtgtaggggattggaaagtggcattgaggtaaacctagcctcttagcaatgttccatgtctcgccctacataatggttacatgagtgtttatgatacattgctatgttttccatttttgttttggcccatttctaagtgtgtagtctagttataaaaattattaattaggagaaattttccatgaaaattattattaccctgctcattatatactgaagggaaaaatccactatttgtatacattcatgtataactctaagagattttaagaagaaactttctgattttagttgcaacttttggaaatttgacatgatgtttcctgccaaccccrgatttttcaacaggtttttcttttaggtttaattattgacttcatatgacaaaactttgacattctccaactatttttcccttgtatcctgaattcctgacacaacaagtgtggacatatttcccacacttttggtttagcagaatacctatgtcacttatgtttttctgcaagagaaaatcctccaaaactacattagatatttgtatctcatatgtctttggatttcatttttctaagctgggtttgatggatggctgtggtgattggagatgggccacgtactgcatcttgaagatagagtttggatgatttaggctagatcaggcagtrgcattctgactccattagtttctcattcttcttctgggaacagtgtaatagccagatgatgtcctyatggtaaatggaaaagagcaagaaactccaatgtggaagccatcttaaatctctgtgtaaagtctactaatttcctgttcattgaagcaagttacaggagtgcacacgcatatatatatgtgtgtatatgtgtgcatgtgtatgaataacaacactgaccataaattatgaagccgagtacatttcacatatatatgtatgtttattatatgatagtttattgtatgatatttcatttgaagaattatctctatttataattaagaacatatagcttttatcagcaaattattgctgttttccattgtaatttgtaccacatgtatgaacttaactatcattgtttgaacatctaattttttggatggtaaagacattcaactctaaatcaatgaggagaatgtatctttggggtaggttttatttcattatgaattcttattttatgttgttgttagataatgatgcacacaattaaatttgagtgacaaacataygtagagtaaattttgtatatrtataccaaaaacagtactaaagaatactagatttataccagtatgtgaatagcttagaaaaaaaattcgtttgtataataggaatgaagaaacataatcatgatcatttcagtgctgttataattttttatgtgtagttagaaaagagatttcttccactttttaattaaagaaagccttttttgaagttgacatctgatgtcaagtatttccatttaatttgcttagccacctctgagcccctgaatttccaattatctcctttgtctcccattcctaatattcctcaaaaaaattcaaatattccttctcttaaaaaaaactcaatgtaaagagggtatagaaactatggatcataactgaatgaaacattctgcaaatattacaaattatctgtctaatcaatatattgatgataggaaacgtattaatratatgttttattgggggtgggcagtgagctgaggatcctcaggcatctcyatttttattttgtttctctacgtagtttctccagcatttggctctaggtgccaagggcacatgtgacaagaaggtgccagctttataaaccttgkaacttcttctgtgtcagttctgagacatacartttactaaaacacatcatgaaggcctgttttgaagagaaggggaataagactgcatctgttcatatgaggtatgtcgaagcacttggatatgttttcaaaccaccaatcttgatsatttagaaatgtgctcccttttccaatttcatcctgataaaaatgtatgatctctggacgttgccaatattcccctccattccatcatgagccgttctctgtaattcagaatctgtggactaagctgtaaaactaatgactgtcaatctattctacrwgaaatagtgggccaaagaaaaaggaaaacatgataagcagtaaaaatatatacacaacattttttgcttacactaatgatcaaataacacccataggaccaaacctcccacagatactttctataaattctggataaaatatttaaaaaaaaaaacagccatctgaaggcaatggagaatgaacaaaataggccgatactgaaaagcagttgacacttggaagaaggaaatagcaaggagtgagtttcctgattttatagctggccctagtgtgcaccaggcagaggactaaaacgtcagtaaaaaagctgtagagttactgggttgaagtaacagaggactgagtttagggtaacatgagccgcaggagrtcaggagaaaatctgagaaaggagaagtccagaaaaggggagccccagcttctgactataractatccaaagctttgtctggtccctacaccacacatgtataggcagacttcatgaagcccagctaaaataataaaattgatttcagttatcatcaagcacagtgaggacagaaatagcaacaaaacacattactttaggcaaagatactcttttyttgaaaacccaaactacattccattacctttcataacagtcatattccttgtccattcttgtttctaccatggttctaastcctacttttattcattacattaatcaaagtaattctctttcaaagaggaaactggaagttatgtaattgaggactattaaaaataagtattttggcagatgtgcaaaattctcargcacatatattacaactttctatagtcatatayatcctttttacacttgcttgaattggcatacaaaactcccatgtttgttaatgtaatccaaacaaatagccagtccataaaatataaaagttacatttagttatttatttatataacccgtgattggtgaccacatttcagtattccatcttaactagtaattatccaaagattttcatgaagtcactgaatctaatattagtctaaggtcttgaactaggaatcttggaaattaaatttaagacaataggctacagaaaataattactgtcaatatgtggaatttttcataatttgtattcagtttgtttgaaaacataattttacattttttggtattttaacattatgtgggcatattagtttaccttatcagtaaacaggtatgggaagtttaggaatttcttttttttwaatgtatttttaagttttgtggatatatagtaggtctrtattgagtacacgggatgtgttgatacaggcatgcaaagagtaataatcacataagaatggggtagccatcccctcaaacatttactcttttttgttacaaacaatccagttatactcttttagttacgttaaaatgtacagctaaattatcattgactatagtcactctgctgtggtatcaaatagtaggtctcattcactctttctatttttttttttggtagccattaaccagccacaccttccctttagcccccactacctttcctagcctttgttaaccatctatgtactctctatgtccacgagttcaattgttttgatttttagataccacagatgagtgagaaagtgcaatgcttgcctttctgcacaaacattgcagttattttttacttattcaacttaacataataatctccaattccatccgtattgctgcaaatgacaggatctcrttttttaaatggctgaatagtactccactgtgtatatgtaccacattctctctccctcttttttttttttttttttttgagatggagtctcgctctgtctccaggctggagtgcagtggcgcaatctcrgctcactgcaacttcagcctcccaggttcaagtggttctcctgcctcagcctcctgagtcgctgggactacaggcgccagccaccacgcccagctaatttttttgtatttttagtagcgatggggtttcaccatgttggccaggatggtctcaatctcttgacctcatgatccacccacctcggcctcccaaagtgctgggattaccggtgtcagccaccgcccccggccataccaccttctctttatctattcatctgttgctggacactttgattgcttccaaatcttggctattgtgaacagtgctacaacaaacatgggagtgtggatacctgtttgatacacttacttcctttcttttgggtatatacccaccagygagattgctggatcatatggtaactctaattttagtcttttgagaaacctttaaactgttttccatagtggttttactaatttatattcccacctgcggtgtacagtggttcccgtttctccacatcctcaccagcatttgttactacctgtcttttgtatataagctgttttaactgggatgagatgatatcttattttagttttgatttgcatttctctgatgatcaatgatgttgagcaccttttcacatgtctgtttgacattcgtatatcttgttttgagaaatgactatccaaatatttcacccatttttttgatcagattgttagattttttttcctatacagttgtttaagctccttttatattctggttattaatcccttgccagatgagtagtttgcaaatattttctcctattctgtggattgtctcttcactttgttgatcatamctttgctgtgcagaagtattttttaacttgatgtgatcccaattgtgcattttttacttggttgcctgtacttgtagggtattactacttaagaaatttttgctcaaaccaatgtcctggggagtttctctgatgttttcttatgggagcttcatggtttgagatcttaatcatacatctttaatccattttgatttgatatttgtatagatatatgggcctagtttcattcttctgcatatggatattcagttgtcccagcaccatttattgaagagactgtctttttccagtgtaygttcttggcatctttttcaaaaatgagttcactgtaggtgtgtgggtttgtttccgagttgtctgttctgttccatcgttctatgtgtcagttttaatgccagtacatgctgttttggtttctgtagcctcagtagtaagtatcatatgaagtcaagtaacatgattccttcagttttgttcttttttcttaggatagttttggctattctgggtcagttgtggctctatataaattttaggattgttttctctatttctgtgaagaatgtttttggtattttgataggaattgcattgaatctgtagattctttgggtagtatggccattttaacaatgttgatacttctaatccatgaacatggactatcttttctttttttgggtgtccttttccatttctttcattagagttttatagttttcattatagagctatttcatctctttggctgagttaattttcaggtatttaattttatgtgtgacctttgtaagtgggattacttttttgattttgttttcaaattgttcactattggcatgtagaaatactactaattttttatgttaattgtgtattctgcaaatttactgagtttgtttatcaattctaatagtttttggtacagtcttcaggttttacaaatataagatcatattgtttacaaacaagcrtaatttgacttgttcctttcctatgtggatgctctttatttttcttgagtgattgctcyagccagagcttctactattatgttgaataatagtagtgaatgtgagcattcttgtcatgttccagatcttagaggaaagccttttagtttttcccaatttagtatgatactagttgtgggtctttttatgtgatttttattatgttgagattttccttctatatccagttttctgagggtttttatcatgaaggaatgttgaatcttatcaaatgctttttcagcattaattaaaacgtttatatggttcttgaccttcattctgtatatatgatgtatcacattgattgatttgtgtatgttgaactatccttgcatcctagggataaatcccacttgttcatgaggaaatatctttttaatgtattatttaatttggttcactagtatagtattgagactttggaatcaatattcatcagagatatgtgcttgttgttttcctttttagatgtgtctttgtctggttttggtatcagggtaacaagaatttcaagaatgagcctggaagtattccctcttcctctgtttttcagaatagtttgtgtaggattggtatcagttattctttaaatgtttggtagaattcagctctaaagccatctgctcccaggctttgttttttgttttttgtttgttttgttttgttttgttttttctaaagtgggagactttttattgcagaattaatctcattacctgtttttggtcttatcaggttttggatttcttcatggttcaatctttgtaggttgtatgtgcctgggaatttttccatttttttagagatttcaatttattggcatatagttgctcatagtagtcactaataattctttgaatttcagtggtatcagttgtaatatctctgctttcatgtctgattttattaattttgatctttttttcttrgtcggcctgaacgtttgtcaatgttgtttaacttttcaagaaaacaggtttttgtttcattgatcttttgtattgttttcttcatttcaatttcatttatttctgctgtaatttttattatttgtgttcttctactaattttgggcttgggttactcttgttttttcagttatttaagatacacatttaggttgtttatttcaagtttttcttcttttctgatgtaggcccttatagctataaatttccttcttagtattgctttcgctgtatttcatagattttggtatgttgtgtttccactatcatttgtttctagcattttttcaatttccttttaaatttctttgatgacctactggtcattcaggagcatattgtttcatttccatgtgtctgtatagtttccaaaattcctcttgttattgagttctagttttattccattgtggtcagagttgatgcttggtaatatttcaattttttggattgttcaagacttgttttgtgatctaacatatggtctatccttgagaaaaatccatgtgctgaggaaaagaatgtttattctgaaacttttggatgaaatgttatgtaaatatctgtaatcaatttgttctatactgcagattaagtctgatgtttctttgttgattttctgtctggaggatctgtctgatgctgaaagtggagtgttgaagtctccatctattattgtattgaggctttctctttgctttggtctaatagtatttgctttatatatctgggtgctccagtgttgagtgcatatatatttacaattgcaatatcattttgatgaattgacccctttatcattatatggtgacctttatctcctcatagtttttgtcytgaactctattttgtctaatacttgtataggtactccactttttttggcttccattgccatgaattatctttttccatcccgttgttttctttctgtgcatgtctttatagacaaagtgtgtttcttagaggcaacagattggtgttttgtttgtttgtttgtttttccatttagccagactatgtcttttgattggagagtttagyccatttacattcaatgttagtattggtagttaggacttacttttgtcattttgttatttgttttctggttatgttgtggtctgctcktctttctttcctaccttcctatttttctttagtgaaggttattttctctggtgatataatatagttttttgctttttatgtttgtgtatccattctatgctttttggtttgagattaccatgaggcttgcaaatactaccctctaacccattatttcaagctgataacaacttagcactgttcgcataagcaaacaaacaagcacaaaaacaaaacaaatgaagactctgcaccttaactccatcttcttcatttttaactttctgttttcactatttatttcttattgtactgtgtatgtattcaaaggttgttgtggctattatttttttaattatactttaacttctgggatacatgtgcagaacgtgcaggtttgttacatcggtgtacatgtgccatggtggtttgctgcacccatcaacccgtcatctacattagatatttctcctaatgctatccctagcccccctcaccctaaaaggcccagttgtgtgacgttccctgtgtcctccctgtgtccatgtgttctcattgtttagctcccaattatgagtgataatgtggtgtttggttttctgttcctgtgttagtttgctgagaatgatggtttccagcttcatccaggtccctgcaaaggacatgaactcatccttttttatggctgcatagtattccatggtacatatgtgccacattttctttatacagtctatatttgatgggcatttgggttggtcccaggtctttgctcttgtgaacaatgctgcaataaacatacatgtgcatgtgtctttatagtagaataatttataatcctttgggtatgtacccagtaatgggattgctggatcaaatggtatttctggttctagatccttgaggaatcaccacactgttttccccaatggttgaactaatttgcactcccaccaagagtgtaaaagcattcctatttctccacctactctccagcatctgttgtttcctgactttttaatgatcaccattctgtcatgagatggtatctcattgtggttttgatttgcatttctctaatgagcagtgatgatgagcttctttctttcccatattttcttgggmacataaatgtcttcttttgagaagtgtctgctcatatcctccacccactttttgatggggttgtttgtttaatagattgcaaaaattttctcccattctgtaggttgcctgtcactcygatgatagtttcttttgctgtrcagaagctctttagtttaattagattccatttgtacattttgtcttttgttgcaattgcttttggtgtttcagtcatgaagtctttgctcatgcctaygtcctgaatggtattgcctagsttttcttctagggtttttatggttttggatattacatttaagtttttaatccaccctgaattaatttttgtataatgtgtaaggaaggggtccagtttcagttttctgcctaaggctagccagtttgcccaacaccatttatcaaatagggaatccattccctcactgcttgttttttgtcaggtttgtcaaaatcagatggttgtagatgtgtggcattatttctgaggcctctgttctgttccattggtctatatatctgttttggtaccagtaccatgctgttttggttactgtagacttgtagtatactttgaagccaggtagtgtgatgcctcctgctttgttctttttgcttaggattgtcttgrctacacgggctcttttttggttccatgtgaatttctaagtagtgttttccaattctttgaagaaagtcaatggtatgaaatgtttttccatgtgtttgtgtcctctcttatttccttgagaagtggtttgttgttctccttgaagagatctttcacatctcttcttagctgtattcctaggtattttattctctttgtagcaattgtgaaatggagttcactcatgatttggctctctgtttgtctgttattggtgtataggaatgcttgtgaattttgcatgttgattttttatcctgagactgctgaaattgcttatcagcttaaggagatttggggctgagatgatgggtttttctaaatatacaatcctgtcatctgcaaacagagacagtttgacttcctttctttctatttgaataccctttatttctttctcttcctgattgtcctggccagaatttccaatactatgttgaacaggagtggtgagagatggcatccttgttttgtgccgattttcaaagggaatgcttcccgtttttgcccattcagtatattggctgtgggtttgtcataaatagcacttaatattttgagatacattccatcagtacctagtttcttgagtgtttttagcatgaaggcatgttgaattttatcaaaggccttttctgcatctgttgagataatcatgtggtttttgtcattggttctgtttatgtgatggattatgtttattgatttgcatatgttgaaccagccttgcatcccagggttgaagacgacttgatcttggtggataagcctttttatatgctgctggatttggcttgccagtattttattgaggattttcgcatcgatgttyatcaaggatattggcctaaaattttctctttttgctgtgtctctatcaggttttggaatcaggatgatgctggcctcataaaatgagttaaggagtagtccctctttttccagtgttttgaatagtttcagaaagaatggtaccatctcctctttgtacctctggtagaatttggttgtgartatgtctgttcctggactttttttggttgctaggctattaattactgtctcagtttcagaacttgttattggtctattcagggatttgacttcttcctggtttagacttgggatgttgtatgtgtccagtattttatccatttcttctaaattttctagcgtatttgcatagaggtgtttatagtattctctgatgatagtttgtatttctctgaagtcagtggtaatatctcctttattatttttttattgtgtctattggattattctctcttttcttctttactagtctggctagctgtctttctattttgttgaacttttcaaaaaaccagctcctggattcattgattttctgaagggttttaggtgtttctatctccttcagttgtgctctgaccttagttatctcttgtcttctgctagcttttaaatttgtttgctcttgcttctccagttcttttaattgtgatgctagggtgtcaactttagatctttcccactttctcctgtgggcatttagtgctataaatttccctctaaacactgctttagctgtgtcccagagattctggtacattttgtctttgttctcattggtttcaaagaacttatttatttctgtcttaatatcgttatttactcagtagtcattcaagagcaagttgttcagtttccatgtagttgtgcagttctgagtgagtttctgaatcctgagttctaatttgattgcactgtggtatgagagactgtttgttatgatttattttgttttgcatttgctgaggagtgtttcacttccacttatgtggtcagttttagaattagtgtgatgtggtgctgagaagaatgtgtattctgttgatttgaggtggagagttctgtagatgtctattaggtcagcttggtccagagctgagttcaagtcctaatatccttgttaattttctgtctcattgatctgtctaatattgactgtggggtgttaaagtctctcackattattgtgtgggagtctaagtctctttgtaggtctctaagaacttgctttatgcatctgggtgcccctgtattgggtgcacatatatttaggatagttagctcttcttgttgcgttgattcctttaccattatgtaattctcctctttgtcttttttgacctttgttggtttaaagtctgttttatcagagtctaggattgccacccctgctttcttttgctttccatttgtgtggtaaatattcctccatccctttatgttgagactatttgtgtctttgcacatgagatgggtttcctgaatacagcacaacaatgggtcttgactctattcaatttgctggtctgtgccttttaattggggtatttttcccatttacatttaaggttaatattgttatgtgtgatttttttcctataattaygatgctagctggttattttgcttcattagttgatgtagtttcttcatagtgccartggtctttacaatttggtgtttttctgaagtggctggtactggtttttcctttccacatttagtgcttgcttcagaagctcttgtgaggcaggcctggtggtaacaaaatctcttagcatttgcttgtctgtaaggattttatttctccttcaactatgaagctttttggcttgctatgaaattctgggttgaaaatccttttctygaagaatgtccccactctcttcyggcttgtagggtttctgccaggagatctgctgttagtctgatgggcttctctttttggtgactcagcctttctktctggctgttcttaacattttttccttcatttcaaccttggtgaatctgactattatgtrtttttgggtgctcttctcaaggagtatctttgtggtgttctctgtattccctgaatttgaatgttggccagtcttgctaagttgggtaagttctcctggataatatcctgaagagtgttttccaactttgttccattatccccatctctttcaggtacaccastgaatcataggtttggtcttttcacatagtccaatatttcttgaggctttgtttgttccttttcattsttttttctctaatctcatcttcatgcattatttcattaaattgatcttcaatgtctgatatcctttcttccgcttgattggttcacctattgatatttgtgtatgcttcacaaagttctcatgctgtgcttttcagctccatcaggtcatttatgttcttttctaaactggttattccaggtagcaattgctctaaccttttttcaaggttcttggctcccttgcattgggttagaccatgcttctttatctcagttgagtttattacccaccttctgaagcctacttgtgtcaattcatcaaactcattctctgtccagttttgttcccttgctggtgaggagttgtgatcctttggaagagaagaggcttccggtttttggaattttcagccttttttgccctggtttttcctcatcatcatggatttttctacctttggtctttgatgttggtgaycttcagatggggtctctgtgtgtacatcctttttgttgatgttgatgctattcctttttgtttgttgattttccttctaacagtcagggtcctctgctgcaagtctgctgtagtttgctggaggtccactccagaccttgtttgcctgggtatcaccagtggaggctgcaaaacagcaratattgctgcctgttccttcctctggaagcttcatcccagagggttacccgccagatgtcaggcagagctytcctgtatgaggtttctgtccaccattgctgggagatgtctcccagtmaggaggcacagaggtcagggacccacttaaggaggcactctgtcctttagcagagctcaagtgctgtgctgggagatctgctgctcttttcagagtgtcaggcaggaaagtttatgtctgctgatgctgctcccacagctgccccttctcccaggtgctctgtcccagggagatgagagttttatctataagcccctgactggrgctgctgcctttctttcagagatgccctgaccagagaggaagagtctagagaggcagtttggctacagtggttgtgcagagctgctgtgggctccacccagtttgaacttcctggtggctttgtttacaccgtaaggggaaaattgcctactcaagccccagtaatggcggacrtccttcccttgactaagctcaagcatcccaggttgacttcagactgctaaactagcagtgagaatgtcaaaccagtggatcttagcttgctgggctccaaggaggtgggatccactgagctagacaacttggcttcctggcttcagccccctttccaggggactgaatggttctgtcttgctggcattccaggcaccactggggtatgacaaaaaacttctgcagctagcttggtgtctgcccaaatgatcgcycagttttatgcttgagacccatggccctggtggcataaacactggaggaaatctcctggtttgtgggttacgaagaccatggggaaagtgtagtatctgggccagaatacrtcgtccctcactgcatggtcccttacagcttcccttggctaggagagggagttcccygaccccttgcacttcccgggtgaggcaacaccacaccctccttyggctcrtcctccgtgggcttcaccygctgtctaaccagtcccartgagatgagccatgtaactcagttggaaatgcagaaatcacccaccttttgtgttgatcttgctgggatttgcagactggagctgttcctattaggacattttgccagccactccactattttttttcattattacttcatcatttagtttttctatttaagtgatgtttatgcaccacatttacagtgttatattagtctgtgttttctgtctccttactattacccgtacgttttatagcttcaagtgattacttattgcccattaatgtccttttctttctgactgaagtaatccgtttgaaatttttctaggasagatctggtgctgatgaaatcactcagcttttgttggtctggaaaagtctttatttctctttcacgtttgaaggatattttctccagttacactattctaggctgaaagttttcttycttcagcacttttaatatgtcataccactctctgcacttttaatatgtcataccactctctcctggcctttttccactgaaaagtctgctgccacatgtagtggagctccattgtacattatttgttccttttcttttgctgctttcagaatcctttctttatccttgagcttagggaaattgattattaaattctttgaggtagtcttcttcaattttacccagcattgtttkttgagaaaaaccattaattcctatcaaattgcagkagtcccttttttgaaatcaattgaccaygaatgttggtgttaatttctggactctcagttgtgtttcattgttctttttgtctaccctaatgcgagtaccatagaatcctgattcgtgcagctttgaaggaagctttgaaatcagaaagtgtaatcctccaaatttgttattttttaacaatttctttttgtgatcttgtcacttggcatttccagacacattttaggagtagttttccactttctgtgataaaacatctgctgggatttgatagggattgcactgaatatataactgcaatctataaagactctccctgtgctggatttcagttcagctggtcattcttgcttgtacaactctgtgacaaattgaaaatataattttggccttttatttctcttatcttaattgtagcagaaggtatcatgcttttctgaaccttgtgcattctgcccaaaaatggaagttctcagccaygtgtggttgttcacacctgtatscaagcactttgggaggccaagatgaggggaccacttgagaacaggagttgaagaccagactgggcaacatagggagactctgtctcaacaaaaaaattaataaattagctgggtgttgtgatgcatgcctgtagacacagctactccagaagctgaggtgggaggacacaaatgtttgagactggagtgagctgtgatcaagccattgcactccagcctgggtgacgagtaagaccctgtctttctcgctcccctaccccaaaaaagaaggtctcactggttatcttttatgtatcaagtaacacacgatcatacaaaaaattaataattcttggttcctgcctgtactagacagataaaattgaaagcagttatacaactagtatactaactcctcataaagactacctgaagagaatattattatcatttgcattttacagatgattataccaaggcagagagtagttgtcaaatgaagtctcagaccatatttgaagcagaaaatctgctttcctgtcttggcagtctgactccacaatcttctgttagaaacaattatactgtaaaaatggaaaagaaataaaatccaagattggagactgattttaacatcgattcctcttaaaccattaagtaatcaaaaataaattaagtaatcaaaaataaattaaatagagaaaaataaaaccaaatattcatatatgaagatctagactcttcaatggaaaacgtgttttttaagtagcccacaatagttacacaattgctgagtattttaactaaaaaattaatatttaacaattaagtaaactcaagagaaaaacttagtcaaaggtctcagcatgagagataagtttgaaaaatattgaaaatgggttgaaaagcccaaatgggaaaatagggctatttttacctggatgatgtccctgaaattaattttccattttggaaattataggacaacaatttcttctatccatgagtgagtgagtatgtgtgtatgggtttgagtgtgtttgtattaatgagcttcttaagaataagttattcaaaagtattagkagcaaccrggttttaagaattattggcctttctgagattcccaagaaaaacttgaatccttttgstaggaaaagtttggattcactctacatattactcacgttgaaaaattaaatttactttggtgatgatcctagttatgtccaagctccctttaccaggttatacaaccagtgtgtcatctctgtattaggttgtaaaatttctctaacaactgaagttgctgaacacaaattgtggagaggttaaacaaagaartaagtgcagaacaattaaaaaactcttcattggcatgctagtagatgagaaatcacttttcacttcaacaccaatatggaaaattttatcttacagcaaggacrttgtgtttgaataggagttaatttgagctgttttggaaatcatcatgttttccataaagacagcattgatttcatccactggcatattgagatgctttcctgtttgacattggtcacagaatttaaaaaggaacaagracattcctgcaaattcaggaatcaggtacacatagatgttaaggtcaagaccttaaaggaaatcttgaccagtgatatcaggcttgcctttaaaaaaattcagacatgataaatttactaccaatcattttttcwtcaacaataatatatttatattttcccatggacacctacattaaacttatagactctttttatttttcaactttttttctttgagtccttttaagagttgttaaacaatcctgaaatttcccttactgtatgctgttaactaattatattttttcaaagtcatctgacacaatgattgattaaaggaagtatctccagtataattacagttacttataacaagagtatttgaaatttgaagaaaaaggttagacaatttataatgaaatataaataaatatgtataatatataaggcattattaataagtgtatatgaaatagtcatagaatgaaaaagattaatgtaattcattgaagtaaacatacattctgaataagaatagaaaaggacttggaaaatattgtttaataatrttttatataaatacaaaaatgtatatattagcccaacattatttattttggaaaggatatgacacaatgggaattttcatacactactcctagaattataaatctgtgccatcatttcggctgagtatggcattatctcattaaggtgaaggatcatatcctaagatcaagtatttacactcttatcagaatacatatacatacacatgcatatcactgagtttyaatagctaaagttgagaagtcctccaaatgtctcagtcctccaaatggataaagaaattgtggcatacttatacagtggaatactrtacagtgatcaaaattaacaaacaagactgacatgtttacaacagaataatacaacaaagaaaatgaacaaatttgagctacatagataataatactcacagatgtgagaggaattatcaagrtggaaaaatacatttactgtaatctcatygacgtaaagtttgaaaaactttatttttaatacattgtcattcattacattggtgataaaaccctacagtgaaacatatgagtgatcatcatatgagtgatcatcataacaatttgggatagtcagaagggaggaaaatatcaacaagaagacatatatcgggagtatctggattgctagcaaattctattttcttccttttttttttttttttttttttactctttcatttggatcttatctgtgcgaagtatctttgactgtgttggtcaccgttgaatcaaatatctaaataaagtgaatctggaacatcctagtgtccacatcaaaagcactcaatraagytggatgggggagtggtagtggtggtacagcaacagggtagcctagttaggttgcacaagcccatctaaacacgtgtgattatctgattagaaccaggaaactggttactagaaaaagtaatttagtgaactgtagaaagaaaatattacatattgaagcacctcacaatgacttaacaccaattttatttgaggaatttctttagtgttaaaatacartaaacagccacagtaacagtaatrccactaacattcttgagcatttattgtgtgcttagaaatttgtgtatgaattcatttaatatagtcctatggcttaacacgagattttgttcatttttttwatattttatttatttatttatttttattttactttaagttctagggtacatgtgcacaatgtgcaggtttgttacatatggatacatgtgcttgttggtgtgctgcacccattaactcgtcatttacattaggtatatctcctaatgctatccctccctcctccccccaccccacaacaggccccagagtgtgatgttccccaccctgtatccaagtgttctcgttgttcagttcccacctatgagtgagaacacgtggagtttggttttctgtccttgyratagtttgctcagaatgatggtttctagcttcatccacgtccctacaagggacgtgaactcatcattttttatggctgcatagtattccatggtgtatatgtgccacattttctttatccagtctatcattgatgggcatttgggttggttccaagtctttgctattgtgaatagtgctgcaataaacatatatgtgcatgtgtctttatagcagcatgatttataatctttcgggtatatatccagtaatgggatggctgggtcaaatggcatttctagttctatatccctgaggaatcgccacactgtcttccacaatgtttgaactagtttatagtctcaccagtagtgtaaatttttcctatttctccacatcctctccagcacctgttgtttcctgactttttaatgattgccattctaactggtgtgagatagtatctcattgtggttttgatttgcatttctctgatggccagcgatgatgagcattttttcgtgtgtcttttagctgcataaatgtcttcttttgagaagtgtctgttcatatccttcacccacttgttgatggggttgtttgatttttttcttgtaaatttgtttaagttctttgtagattctggatattagccctttgtcagatgggtagattgtaaaaattttctccttctgtaggttgcctgttcactgtgacrgtagtttcttttgctgtgcagaagctctttaktttaattagatcccatttgtcaattttggcttttgttgccattgcttttggtgttttagccatgaagtccttgcccatgcctgtgtcctgaatggtattgcctaggtttacttctagggtttttatggttttaggtccaacatttaagtctttaatccatcctgaattaatttttgtataaggtgtaaggaatggatccagtttcagctttctacatatggctagccagttttccagcaccatttattaaatagggaatcctttccccatttcttgttttkgtcaggtttgccaaagatcagatggttgtagatgtgtcatattatttgtgagggctctgttctgttccattggtctatatctctgtttwggtaccagcaccatgctgttttggttactatagccttgtagtatagtttgaagtcaggtagcgtgatgcctccacctttgttcttttggcttaggattgtcttggcaatgcaggctcttttttggttccatatgaactttaaagtagtttttttccaattctgtgaagaaagtcattgktagcttgatggggatggcattgaatctataaattaccttgggaagtatggccattttcatgatattgattcttcctatccatgagcatggaatgttcttccatttgtttgtatcctcttttatttcattgagcagtggtttgtagttctccttgaagatttccttcacatcccttgtaagttggattcttaggtattttattctctttgaagcaattgtgaatgggagttcactcatgatttggctctctgtttgtctgttattggtgtataagaatgcttgtgatttttgcacattgattttgtatcctgagactttgctgaagttgcttatcagcttaaggagattttgggcagagaagattaggttttctaaatatacaatggcaaattctattttcttaccaaggtatggtaacatcaattttaaccttataattttttatcttactstttattagttgttattactctgtatmtgtatgttttgctccacaataaaaaatgttaaaaaagcagaaacctaaagtacatttctaagtgtaaaattagrgtgatgcagcatattcttatagatatcattgtaattagagtttttgctgaataaagaatagaggattatggtactaagaaatccaagttaaaatttaaaacttttctatttttattttgagacaggatctgactctgttgtccaggctggagtgcacaagaacaatcttggctcaatgcagcctctgtcaccttggctcaagtgattctcccatcttagcctccagagtagctaggacaacaggcgtgcaccactacgccctgctaattttttctatttttttgtagagacatggttttkccatgttgcccaggcaggtcttgaactcctgtgcttaggcaatccacctgcctcagcctcccaaatgatgggattacaggtgtgagccaccacacctggcccaaaacattacttaaattaattcacacaaaagaagagataggcaagaattgttaatccactttcttagtgctaatatgaatttgaaacatcaaaatttgaatatccatgattgatagacaccttttttcttatttccaatttaattatttwtgatacacatttgaaagtgtaagaaattcaggaatttacaataaattatagtacgatggatattaaatatattaaattaaatgtattaaaaatgtgtctctaaatgaaatatttatattcacattgttagcattctaatttcactatactattcctgtgtacaccagtgtgttgggtaaaattttttgttactataaattttttggctgtccattagagaaaaaaatcatagaaaggcaaattttttaaggtataaaaaataatttagcctgatctttgagyatgtttgtgcacatataatgctactttgactgctgtagtaaaataatccagatttagtcaccatagctaagaatgagaaaaagcatttgtgatagtttgctgagaatgccgtcattttttgataaagttttaagtactgttttactatttgatsttttaaagattgttaaaaactaagaagtgttgatttctgctaataaaaacagcttaaaatttawatcatggaatagaatggtggagctgtggyggagatactttgtcttattaattgaaatgacattttgagatccagtgctgctcactgaatttccctgtgaggagagtttgtggtgatgaccccacaacagacaagctactatccaaaaaaactcctcacatcaaatcaatttccagtttcttccaagttgcaggaggatgcctagaccttggttttattctcttctttgaccaaagtattacaaaaggaagaaaatcattaccattttcatgtcaggagggtggcatggagatggacttagcctattttcrgtgttccatctcttgccctttataagggttagttgactgtttatgatrcattccggtatttcccatttttgttttggttcatttctaagtgtgcattataattttaatattaaagkttttgattaggagaaatgtctcatagaaattattattactcatctgattatatactgaagggaaaaatcaattagttgtatatacattcttatacaactctaagatagttgaaataggaactttcttatttagttgcatcatgaggaaatttgagatgatgttatctgccaagcgcagatctctccaaaggatttcttctagccttaattatccacctcacaggacaaacctttgccattccccatctaytttttctttcggctcctcaattcctgacacaacaaagttgtacatatttcccacactcttggtttagcagagttcttttatcagttatgtttttmtgcaagagaagaccctctaaaacattagacatatatatctcacatgtctttggatttcatttktgtgtgtgtgtgttttctgttttttgagatggagtctcactctgttgcccaggctggagtgcagtggcactatcttggctcactgcaacctccacctccagggttcaagcgattctcctgcctcacccttctgagtagatgggactacaggcacactccactgagcccacctaatttttgtatttttagtagagatggggtttcaccatgttggccaggatggtctcaatctcttgacttcgtgatctgccctcctcagcctcctccacacctggcctggatttcatttttctaagctgggtttgatggatggctctggtgatttgagatgggccaaattcggsatcttggagatagagtttggccaatttagtctggatcaggtgggggcaatctgactwcattactttctcattctccttctgggaacagtgtacttgcgaggcgatattctcatggtaaatggaaagaggaagaatccccagtatggaagccatctcaaatctctatgcaaagtgtagtaattttctgtttatcaaagtaagtkaaatgattgaactccaagttcaggggaaaggtagtcagtcttcctgtgataggaggatactgcaagatkatataccaaagggtcgggtactcaggaattcttataaaatggctaaatattttatataataataaatatttaaacattagacttgagagaaactttaccaaaggcctaagaattagagatatgtttgataaataaatattattcwtgggctgaaaactcttgagtgggaaaatagggctaatttcatctggacaacttcttggaaactcattttttattttggaaattwtgagaaaataatttgttccattcataagtggtgtgcacatgcgtgtatttgtgttcatatttatgagcttgtgaataatgaagttatacaaaagtattagcagcaaccaaatcttatggagtattggcctgcctgtggttctcaagaaaatcttagatgcttttgataaaagcagtttggattctgtgtatacaaatctggcattttaaaaagtccatattggtaatgatcttagttgtgaccaagctccctttaagactttagacatttgctatatgatctatgtattgggttataaaacttcccaaacaactgaagttgctaaacacaaatgatggagaggttacacaaagaaaaattgcaaactctgaaagagagtacrttcttatttgtgtactagcaaatgaggattcaggtttccagtcaatttcagtatgaataattcyagcctgtaacaagaacaaacagtgaatgaatgagttaatttgagttgtttgaaaataagaatgttttccataaagagatcattgaactcatyagttaacacgccatggtgatttctggcttgacactggtcacaacgtttaaaagtaaaaagaatgacccagcagatttacaaattaggtgcatatagaatttaaggtcaggatattcaagcaatcacaaccagtgatattacattgagaggtgaagccagctggacttcctgggtggagtggagatttggagaactattctgaagctagcaaggggattgtaaaatgcaccaatcagtgctctgtaaaaggcaccaatcagcactctttaggtagcatggggattataaaatgcaccaatcagcactctttaggtagcrtgggaattataaaatgcaccagtcaacactctgtaaaaatgcaccaatcagcactctagctagccagaggattgtaaaatgcaccaatcagctctctgtaaaaggcaccaatcagcgctccataaaacgcaccaatcatcaggatcctaaaagtagccaatcacagggaggattgaaaaaagggcactctgataggacaaaaatggaacatgggaggggacaaataagggaataaaagctggccattccagcccacggggcagcccacggggcaacccactcaggcccccttccaccctgtggaasctttgtccttttgctcttaacaataaaccttgctaccactcagtctttgggtccacacmgtctttaagagctgaaaccttgctactgctcagccctgggkccatgccatctttaagagctgtaacatcaytgcaaaggtccgtgcctccattcttgaagtcagcgagaccacgaacccacctgcaggaaccaactccggatacaacaccagcattttaaaaatttctttttgtctgttcagacatgataacttttctgcccatcatattttccattctagtagtggttacatttgttattggaaattttgctaatggcttcatagcgttggtaaattccaccgagtgggtgaagagacaaaagatctcctttgctgaccaaattgtcactgctctggcggtctccagagttggtttgctctgggtgttattattaaattggtattcaactgtgttgaatccagctttttrtagtgtagaattaagaactactgcttataatatctgggcagtaaccggccatttcagcaactggcctgctactagcctcagcatattttatttgctcaagattgccaatttctccaaccttatttttcttcgcttaaagaggagagttaagagtgtcattctggtgrtgctgttggggcctttgctatttttggcttgtcatctttttgtggtaaacatgaatcagattgtatggacaaaagaatatgaaggaaacatgacttggaagatcaaattgaggcgtgcaatgtacctttcagatacgactgtaaccatgctagcaaacttagtaccctttactgtaaccctgatatcttttctgctgttagtctgttctctgtgtaaacatctcaagaagatgcagctccatggcaaaggatctcaagatcccagtaccaaggtccacataaaagttttgcaaactgtgatctccttcytcttgttaygtgccatttactttgtgtctgtaataatatcagtttggagttttaagaatctggaaaacaaacctgtcttcatgttctgccaagctattggattcagctgttcttcagcccacccgttcatcctgatttggggaaacaagaagctaaagcagacttatctttcagttttgtggcaaatgasgtactgrgtgaaaggagagaagccttcatctccatagattcagaagaggggcrttgtgtgtcttctagcagaaaacaaactggtggtgtatgaaacattttatatttcttacwgtgttttctgtaatgtatgtgtatgaataatttccaaacatatacctagataaatctttaacctagtctaaaaaatgtatgtatgtgtgtgtrtatgtgtgtgtgaaaaacttaagaacattgacaataacatactcttytttgtttttttcatatgaactgccagattatacaaaatatgacaaaaattcctcagaattatgaagccatgtgtatttcattcatgtattttatctttcatttgtagaatttacaatgtctatttataattattaagaactaacagcttatctcaggaaagatattgctgttttctattgttatttgaaccacacaaatataccacagtgtgcttagaaatcattgtttgaacctctatcttattggatggtaaggtcattcaattctaaaccaataatgtggatgtatctttggggttttattccattatgaattcctattttatggttagtaaaaagcaaacagaattattgtaaacaatgcacactatagaattcgagtgacaagtataggtagaataaatttcatatatgtctaccataaacagtactgaagaatactagatttaaagcaagtatgtgaatagcttagaaaaaaatctctttgataataaagggaggaaatatgatcatggtcttgattgctattatcggtttccatacgcagttagaaacrtcatttcttccagcttttgaattaaagaaaagctgtttttgaagttgagatctgatgtaaattattttagtatttttttctaagrcacttctaagcccctgaattgctaattatatcctcatcttccatttacaaaattccttctaaacttcagataagagaactcaaatcttctcttttctaaaaaaaaaaactatcaatgtaaaaatagtatagaaattatggaaaataattcagtgaaactttttgtaaatgttaaaatagtatctatgaaatctatgtattaattatgggatgtgccttaccattgtaattttgttgtcagtgatgaaagtgttttgacatattcattaayaggaagttctattataagaaagaaatgtacagtcttgttcacagctaaattctatatgactayattaattcttggtgttatgaagttttaacaatgttatttaatgttatttaaaccttaagataaatcatccccacacctgatttatgtaatttttkaatcatatatcttcctcagtacaatgtaagaactgtaaagaaagagatcatgtctgwcttgctttctgttgaytcccaggacctagaacccagcaccaagaatagatggccaaaaatgatactttaatgaacaaataaatgggtggctaaaatggataagttgatgtggtaaatcaatgaaaaggaaactcatcacaaaatctgcagttgcatgaattcccctgttctggtctcaggttgaggttkcaggcttatccaagcagaatccttcctcagaggaaaagtttggctattccacaattttaggggaaatatcacactagtgatatatatagtgatatatagtcacactatatatatatatwgtgatatatagtcttgatgcagctgtgtcaggtgtctgaattggagacaaggtaaaacatcaaaattagatggcaccttggaaggctgaggcgggcgratcacgaggtcaggatatcgagaccatcccggctactatggtgaaaccccgtctccactaaaaatacaaaaaaattagctgggagtggtggtgggcacctgtattcccagctactcggaaggctgtggccrgagaatggcgtgaacgtgggtggcagagcttgcagtgagccgagaccgcgccactgcattccagcctgggcgacaracaaaaaaaaaaaaagaaaagaaaaaattaggtggcacctatgacaatactttaaaaagcatataaaagactttggtctatttgcataagtatttttttattgtgaattatatatttgtgttatgatattttctagttgattattaggtaaacaaaatggcatttcatttcaaaaaattgagttagtaaccagctacttgaccaaaatgtttttaattaatacctgttaatgaaagtgatgacatttatttagaagtaaagttcaagacaaaaatggcagggacatgtggaaattgagacaggaagaaatgtgaaacaatgctctagtcgctttgaattctgctggatcatctggcacagtggccatagcagcttggaccagagcctgtatctgctgtagagccctcttttgttctgggttccacttgagaccagtagcctttggaaactttattaatgagtcagagcaatattttcaaacgtggaatatgttggctccaaaatctcaataggtccccaaaacattgtatctcttttgtagtgataggaagtacayagagagagcaacatgccatttactttaaaaaagattgttttgacatgtgccctagggacactgcacaccttaaaacatcacctatgctgtaggtccctgaatcttctcaggtttatttcttttcttctggtattttacttccatccaacattagggtattttactatatttaataaacttgcaacttcctgattattgtaccaactaatactttattattattgttattattttgaacagggtctcattctatccctgaggctggagttcagtggcaggatcacacctcattacagcctcaaccttctgggctcaagtgattctcccacttccgcatttctagcagctgggactgcaggggtacaacaccttgcctggctaattttgktatttcctgtagggctaggatttcaccatgttacccaggctggtctcaaactcctgggctgaagtgatctgtytgtgtcggcctccaaaagtgctgggattacagtcatgtgccacagggcccggtttgtaatattactaatatattaaattagcacgatgttttaaaaaatgtaaattaaactgagaacagaagtgacatagccctgacataaaacagtgaagcagtgctattattcttacaatacaagccaaattgttttgattttcctgcataatgggtgtagattaacaaacattcaccaaatcatgagccccgtaaaaagtatcaaaagctctgctctgctcagtgaagatagcacatcctggaaagcatttgtgagtgttgattgaagtttatggtagtctgcattcastataacctgtctgtctttggtagaggccagataggttaagtgaatcgggttatagaaaggactaccatcccctgtaactttcaagtgttttgtcatgacagtgaccagttccattccttggggaatgcagttattatattttatacattgtgttgccaatggaggagaatttcagaggcttccccttggtcctgctataataatgttccttactctacagttcaggaagaatgtgatagttctgccagctgccatacgtatccatttcaattacacattcaggaagaggtaataactacaaactggttagatccaccttgggatagacatgagcygaagctctgggcagcatctgaccttcaagaactcccactgcaggctggatgtgatggcgcatgcctgtagtcctagtactttgggaggccaaggtgggaggatcttttgagagcaggagttcccttcgcaacatatggaaactctgtctctacaaaaaatttaaaaaattagctggcggggtggtgcatgcctatagttccaaatacttgggaagctgaggcaggaggattgcttgagcccaggagttccaggctgcagtgggctatgatcctgccactgtactccagcttgggtaacaaacggagactgtctcggaggaagaaaaaaaaaagaagtgcaagttctcactggtatcttaaatatcaagtaaaaagggatcaaatcaataattaacaatctttggttcctgcctatagcaaacaggtaaaatggaaagtagttatacaaagggtatattatattaacycctaacaaaattaaacaaagccagttttttttcatctcctttcattttttttttttttgaaacagggtgttgctctgtctccccgttggagtgcagtggtgtgatctcgaccaattacaacctccgtctcctgggttcaaatgattctcctgccgcagscaaccaagtacctaggatcataggcatgcacaaccacaactggcaaatttttgtatttttagtggagacagggtttcaccatgttggccatgctgttttctaactcctgacctcaggtgatccacctgcctcggcctcccaaagtgctggaattacaggcctgagccaccgtgcccagcctattatctgctttttataggtaattatactgaggcaggcagtagttgtaaaatggagtctcacatatctrtatgaaacagggaatctggtttcctgtctttgtagtctgactcgaagatcccctcttagaaaccattatagtgtaaaaactgaaaagatataaaatccaagattggagactgattttaatatctattcatcttaaaccatttagtaatcaaaaataaatagggaaaaataaagctggatattcatacatagagaagtgtagattcttcaatggaaaacatgttttttaagtgtccaaggaatagttataaaatttctgagtattttaattaaataactaagatttaagtgttagactcatgagaataacttagtcaaaggcctaagcatgagagattaagtttgataaacattgaaaatgggctgaaaagcctgagtaagaaaattaattactttttcattttagaaattataggacaacaatttttcccaaccgtcaggggtgtatatatgtgcatgtgaaagtgcttatgttaatgagcttgttaataataagttatacaaaattattagttggcagcaaccagattttaaggaatattggccttcttgggcttccgaagaaaaccttggacgcttttggtaggaaaagttgggattcactctccataaatccggcgttgaaaaaatgaatcaacagkggtcatgattctagttttgaccaagctacatataacagtgtaggcatctgatktatgatctatgtattaggttggaaaatttcccttacaactgacattgctgaatacaaattatatagaggttaaacaaggaaaaaaattacaaaatgatgaataagaatatgacttratttgcatgctagcaaatgagaattcagctttcacatcaacatcagtatgaaaatttttatcttataacaaggacatagtatttgaataggagttaatttgagctgttttggaaattatcatgttttccattaagatagccttgaactcattcaatagcatgctccggtggtttcctgcttggcattagtcagagaacttaaaaggaacaggaacattactgcacaaccagaaatcaggtgcacatagaaattaaggtcaggaccttaaagggaatcttgcccattgatattagtcctgccytaaaaaaagtcggacatggtatgtttactactaatcattttttttccataacgttaatggtaktttgtattttcccatgggcacctacattacacttatagactattttgatatttcaacctattattttctttgaatccttttaaggagttgttaaacaatgctgaaatttgccttacagtatgctgttaactaatcatatttctcaaagtcatttgacataatgtttggttaaaggaaatatgtctagcatagttatacccgttcataacaaaagagtatttaaatctttaagaaaaaatattagaaaagctaataatatgaataaataaatatatgaagtatataattcattattaatatayktgcatgaaatcatggtcatagaatttaaaagtaataatttttgaattaaggatacattctgaactataatagaaaaaggcttcaaaaatgttaggtttataatgtttcatatagatacgaaagtgtaaaaattagtctgatgttacttattttggaaagcatatgaagcaatgggaattttcatacattgctcctagaattgtaaatcagagcaattactttgtctgactatggcattatctgattaagttgatggatcacatttgaacacccagtatttgcactgttatcagaatatatgtgsacacacatgcatatcactgagttttaatagctaaagttgagaagtctctcaaatatccatcagtgataaaatggataagtaaattatggcatacttgtacaatagaatactatacagcaatcaaaatgaactgttggagacatgtgctcggagtagccaaaagaaatccccacttggacaatttctcagcaaggcacctttacgtyrgcagaagggtgctgcttgcacctgttacaatcccaagagaagagcatacctaacaaaggagggaaggagtttttaatcctaacacagttcctgtttctgtgtccttcccttattggctggggttggattgcacaatmtaagctgatcctgaatggcttagacttaaacttttccaaatagggtaaacgcacattttgcaaaaagaaagaggggtgggaggtaggattcatttacaacatttacaacttatggctggraagttgagtctttaaagaggaatttagttgtcctaacggaaccagctagagtgacatgtttacaaagaatataaataaaaagaaaaatgaagaaatttgaactacatagatatgagaggaattaagtttgaaaaaatgattcagtataattccatttatataaagtttacaaaaatgtatttttaataaattgaaatttattacactggtggtgaaattctaaggtgagacatatgagtgattatcctaacaattgggatggtagggatggaggaaacaaaagggaaatgttatcagtaagatggcatatatggagagtgtctggattgctggtgaaatctactttatgaccatgatgtggaatcatgactcttaatgctataatttttttctttactgtacattagrcctcattactttatatactttatatatatatgttatgtttcacaatattaaatatttcacaataatgaaaatatttaaaaagtagaaacatacactaaatgaatgaatataaaataggctgaacaaacatattcttatagacatcattgtaattagagtttttgctgaataaagaatagagcattatgatagtaataaatccaagataaaattttaaacttttttttaaattaattagaaaaaggaagagataagcaggaagactacctccacattcctaatgttattcttactttgaaacatcagattttgagcacttatattttrctggacacmtttttttcttatttccaatttaawtatttatgataacatttcaaagtggcagaaattagtgaatttccaataaattatagtagtatagatattaaatgtataggacaatttttctaartttatctttaaatgaaataattatacacatatttttaccattcaaagattataataccatgcatgtgtacacatgtgtaaggaaaaatattttgatactgcaaatttttttaatattagagaaaaattagtagaaagataattttattaaggcataaaacatatttagwgtagttactttgactgctataataaaaacacccagattttstgacagtagctgagaatgtaaataagcagtcaagagaatttaacttggtaatgatgctattaaaagatgaaatgaagcttattcartctataattgcacagagtatttgtgtaagttcatatgaaactggaccaaaactaaacagccaaaaaaagagtattatttgctttaggtcacttttgccataatttttagaatgtggtgaaagaaaaaaaatagcaagtaaatcattggaaatgtgttggctttgcgttattcctgatgaaatactatatgagggtatttgtctaggcctgattctgagaataatataagaatggtgccaagcacagtggctcatkcctgtaatcccagcactctaggaggccaaggcagtggattccctgaggtcaggagttccagaccagcctggccaacatagtgaaaccctgtctctactaaaaatacaaaaattgacgggtggggtggtgggcacctgtaatcataggtacttgggaggctgaggcaggagaattgattgaatcagggaggcagaggtttytgcaagccgagattgtgccattgcactccagcctgggtgacaagggagaaacttcatctgagaaaaaaaaaaaaattgtaaatccatgaggaagaataagagtgttctcccatcacccttaactccagtactttgaaaagaagacccaaatcacagttatttggtaacattctcccttttagttgacatcatcatcattattatcatcatctmtatttacatctgttttatgaaatgatttatttttgaaatatttacatacataatttcgtaacatctatgtaatttctaagagatatcattgtgggaaagttacattagtaaacagcaaagttcaagtaacaataaatacatttagatttagaaagttaagtgtagtgtagtttaacatacattgcttaagaaaacaattgtagatgacattaaactaaaccaagaaacactataaaaaagattttgattttagtataaataaaattccttaataagaaaaataaaccatttcatgatcaagctctgatttacaaagagaggattttagggctraataaatcaaagagaagtaagccttcccccacatcttctctatttcatttaggtaatgatggggttcagaggcacagagccccatttctacaacataagcaaagtgaaaattaattcattgaatacagcaatgtagctgtggtagatgaactatattttatctattgccatgatattttgagatccagtgctgctcattgagttcccctgtgggcagagtttgtggtgaggasccagcaacagacaagctaatatccaaaaacatctactcacatcaacttaatttccagtttctttcaaattgaaggtaagttccaagacaaactttttattctattctctgaccaagtgttgggaaaagaaaactgttaccattttcatttctagcatactaaaacaaaaaacataaaaaccccaaaatctaaaacacttttaaaaataacatggtgttaagagtagtttgttcagtttccctatagaaaatgatttatggaaggagaataaaagwttattctgaacactaaaacaataagaccaaaaaaatgaattatcaatattgagaatccaatagacagaattagcctgttagatgcagtagaagagagaattagtgaattggaagatagctaaacagaatgaagcatagagagaaacagatggaaatataccaagctagagggtawcacaytgatgctacagtcagaacacctaacatacttctggagttctgtaagattagaggagagaaaatsaagcaagagaaatgttgcaaggatttttccaaaagtgataaaatgtattcctccatatatttttagtaatctcaaacttcaagcatgataaattaaaccaaattarcataaaataatacaggacaccaaagaccaatagaaaatctgaaaagtagcgagaggtggaagatagagtatgtcgtgtgttgaaaagaactgcattctaaatacaacctgattttaacagaaaacatggaagaaggaactcaatggaaacatgtcttcagtgcatttccaaagagtagtagaacttcataaacagaaattgaaaatatttttcagagaaaataaaaatgactgmaaatgcaaagttgaacatgcaaggagcaataaaaattattgacaatgaaaaataagtgtaattctaaataaatgttgactgtataaaaattattgtcttgttagattaaatttataattgataagatatatgcaaatggcaataaagagactggagataaaggtgacaggaataaatttagttagactatgttttgggcttttctatgtctgtgcagataatttgaacatcataatcaaggaccctgtaattctacacccaggtatatatatgcaaaagaattgtagtaaatgatgtaggtcattgaagcattattcataatagctaaaaaataagctgcccaaatatatatcaaataaagatggataaataatyacagtaaaatcataaaatggaaaaatatggagaaatgaaawgaaataaatcacatgtacatgcaactatgggattaaatttctgatacagaatgttgatttcaggaagccatgaataagaacatatagaattgcacctatacmcagttcaaagaaggccaaaccaagctattgagtttagggtcgcatacctagttggtaaagtataaagaaaattttaaaaagatcaacataaattatggatgttgcttatcacaggagatgtgaagaaacgtgtagcagattggaaagtggcattgaggtaaacctaggctcttagcaattttccatgtcttgccctacatgatgattacatgagtatttatgacacattgctatgyttcccagttttgttttggctcatttctaagtgtgcastctagttacaatacaaaaattgttaatgaggagaaatgttccatgaaattattattactctgctcattatatactgaagggaaaaatccactatttgtatacattcatgtataactctaagaggttttaagtagaaatgttctgattttagttgtaacttttggaaatttgacatgatgttacctgccaaccccacgtttttcaataggtttttcttctaggtttaattatctacttcatatgacaaaactttgacattctccatctatttttcccttggatccagaattcctaacacaacaagkgtggtcatgttacccacactcttagtttagcagaatacctatatcagttatgtttttctgcaagagaaaatcctccaaaactgctttagatatttgtgtctcataagtctttggatttcrtttttctaagcttggtttggcagatggctctggtgattggagatgggccacatactgcatcttgcagctagtttggctgatttaggctggatcaggtagtggcattctgactccattagtttctcattcttcttctgggaacagtgtactagccagatgatgtcctcatggtaaaaggaaaagagcaggaawctccaacatggaagctgtcttaaatatctgtgtaaagtctactaacttcctgttgactgaagcaaattagaggagtgaattyagagtccaagttcaaggtagtcaccctgcctrtggtgggaggatactgcaggattatatgacaaaatgtagggtacttagaaacatttacaaaattgctgaatattttaattaaaatttaaacaaaaaacagacttgaatgtaaatttaccaaagacctaagcataagaaacatgtttgataaacattattcattgtctgacaaygctgaataggaaaatagtactaattctacctggatgacctcctggaaactcgttttccatttggtgagtaataagaaaataattccttccrtcccctaatggtgtgagtgcatgtgtgtctatgtgtttaggagcttattaacaataatgtcatataaatgtattggttatcagaaaccagattttcaggtgtattggcctcacaggactttccaagataaccttggatgattttgacaaaaggtttagaatctggtatttaaatctggcataaaaataaatccatattgatatgatcctatttatgaccaagctyctttaacaatttagacatttactgtatgatatatgtattgggttttaaaatttccctatgtaacaactgaagatgctggatacaaattatggagaggttaaacaagaaaaaaattgcaaaacaatgaaaaagaatatggctttatttgcatactaacacacgagaattcacttttgacttcaacatcagtataaaacatttcagcatatagcaaggacagatagtctataaagaggaatgagtttcagctgttttgagattaataatattttccctaaagacagctttgaattcatccattggcatatgctggtgctttcctgttgacattagagaacttaaaggcagaaaatgttactgcacatttagaaatcaagtgtttatcgaagttaatgtctggatattaagggaatcacaaccagtgttattaagcctgcatttttttttttgttgttgttcaaacatatgtgttctgctcatcattttatcaattctggtagtgtttgcatttgttcttggaaatgttgccaatggcttcatagctctarttaatgtcaatgactgggttaagacacaaaagatctcmtcaactgaccaaattgtcactgctctggcattctccagaattggtttactttgatcatattattacattggtatgcaactgtgtttaattcagctttatatagtttagaagtaagaattgttccttctaatgtctcggcaataatcaatcatttcagcatttggcttgctacgagcctcagcatattttatttgttcaagattgccaatttctccaattttatttttctccacctaaagaagagaattaagagtgttcttcttgtgatactgttggggtccttggtatttttgatttgtaatcttgctgtggtaaccatggatgacagtgtgtggacaaaagaatttgaaggaaatgtgacttkgaagatcgaattgaggaatgcaatacacctttcaaacatgactataaccaaccatgctagcaaacttcacactgttcattctgactctaatatcttttctgctgttagtctgttctccgtgtaaacatctcaagatgatgcagctccatggcaaaggatctcaagatctcagcaccaaggtccatataaaacctttgcaaactgttatctccttccktatgttatttgccatttactttctgtgtataatcacatcaacttggaatcctaggacacagcagagcaatcttgtattcctgctttaccaaactcttgcaatcatgtatccttcattccactcattcatcctgattatgagaagtaggaagctaaaacagacctctctttcagttttgtgtcaggtgacgtgctgggtgaaataacagaaaccctcaactccatagattcacaaggggagcatggtgtgtcttttagcagaaaagaaactgatggtgtctagaacgttttatatttctgtcagtttgttgtagtgtatgtatktgagtaatttcaaaacagattcctaggatagtcttttatatatatataatatatataaaaytcatatatatataaaatacgtatgggtgtatatgtgtgcatgtgtgtgaataataacattgaccataaattatgaagcctagtatatttcayatatataagtatgtgtattttatgatagctaattgtatgatatttcatttgaagaatttatctctctttgtaattaagaaattacagcatttatcagaaaatcattgctgttttccattgtaatttgtaccacatacatgtacttaactatcattgtttgaacctctcattttctggatggtaaagacattcaattctaaatcaatgatgagactgtatctttgtagtaggttttatttcattatgaattsttactttacttttagtataaagcaaatagaatttttgttagataatgatgtacacaataaaattagtgtacatattaaataaaatcagtgacaaacatgtagagtatatgtatttgcctttgggaaggcaaattttgtatatgtataacaaaactgtactaaagaatactagatttaataccartatgtgaatagcttagaaaaaaatcatttctataataggaatgaagaaacaaaaccatgatcatttcagtgctattataattttttaagtgtagttagaaaaatcatttcttccaccttttgagttaaagaaaatcttttttgaagttgacatctgatgtcaagtatttccatttattttgcttagcaacctctgagcctctgaatttccaatattcttctttgtctcccattcctratattcctcaaaaaaactcaaatattccctktctttaaaaaaaaaagcccaacataaasagggtgtagaaactatagatgataatcgaatgaaactttcttcaaatgttaaaaattgcctgtgaaatctatatattgatgataggaaatatattaatgactattataatgatgtaaatggtgaaatgatasaaagtgtgctgatgtatccattgataccaagttctattataagaaggtaatctacagccttgtggaacagctaaattctgtgtgactatattcattcttggtgttatgaaattttaacattgttatctcaaccttaaaataaatcaactcctcatattatatatatataatatatatatacacacatacattttgtttatcatacatcttccctagtactatgtaatcagcataaaaagagaggtaatagctgtcttgctttctcttgactcacaggatctaaaagccagcacaaagaatagttggtcaaaagaatatattaatgaacacataagtgattggataaatggataatttgwtgtggtaaaccaatgamaatgaaactcatcacaaaatctgcagttgcttgaattttctagtttcaggttgaggttataggcttatcaaagaagaagcatttctcagagcaaaagtttgactrttccaaaattctaggggaaatatcactgtaatatagctttgctgtagctatatcaggtgtgtgaagtagagacaaggtggaacgtcaaaattagatggcacttattctaatgctttttgaaaagcatatwaaagattttggtatatttgcacagggtcagggtcagcagtgwgtgccagctgctcggggctagctgaccccatgacaagaatgttagggaacttcccagtagctgctaaacacacttttgtttttagggaatgtctctttctccttcawtatgacttatgctgccttcaatgctttgctgatacaaaagaastgaactcaaaagaagtaaaaataaaagctagcaaactttgcaactggttaagctggttgtaaacgtacctaatcactttctactgtgaatgatatatttgtattgtgatattttttagctggttattagatacacaaaaaaggtatttcatttttaaaaattgagttagtaaccactcaccttacttacamattatttgtatattattttgtttagtatcctttctaaatgaatgttttaattgccacgttataaacrcatggaaaagtgattcaratgaatgtatatcttagctttgggtgtctagaactagagccaatgtctgattttacagtgatgacatttatttgggaaggcaagtccagggcagcaatgagggatacatgtggaaactgaggcaaaggaagatgtaaaatcatgtgtcatgatgttgatatgactttgccagttgtcgcttcacaatgaggtgagacagacagcatggtggtcatcagatacatgcacttggctccccrtacttttccagaagggttacaaggggaagccacaacaaatattagtccatggaggagagaaaagggagaatgtatcctagctgtcttctgtcttctatyttcctttggccaaagattgtttgaggcagaactaccatctttgcttttcttccttacattatccaaccccttggtggctgtttgggaaagtcacactaaccaatacccccatttttctaagagatagtttttttttaatttattttttctcttytcctctcccctttccctatgtttcctgctttctacttaactttttagacatgcacatagaactgtttactttcccctcaccagacagtcccttcgggcaagttcatctaactgtgtgctccamgarggatctctccttgagacttgacagttgatttgcagacaaaagtatgccctcatsgaactgtcacctccagggtttagcttagacctcacatccattaggaggggatgtggagasgatgcccaggtggccacttctacaatggctgtcctgctcatttccttcccaactttaaaaaaaaatccactttctgctccaaaggtgaagtgtcacattagaaggcaggatgctttgtgctccttcccgcaagctaacttccaaatacattctctatttttatatcagactyttttattactttttattattttttatattagactttacatgaagtgagccgttaaccttttttgttacaagacttcatgcccacaggtatattcaagtcccagatggaaagatgatctggatcaggcaagatgctgaccaggggaacaggagacacagtcaagggaatctgaggaagtrcatgtttttgcccartacagtccccaccttgtgccactcagatgtcctcatgccctccaaytgtggctggttttataagcacatgactagtgtagttgcacgcggtcttgtgcttttgggmtttttgcttggattaatgttctgcacttgcatttttatttttcagacagcggatactcctccgctgaagagggaatagttctgcagtaattccctaggggtttgctttctcctctcctaagggcttgatggagacaggcacagagtcctataatgcccacgatgcatgcctctagcagctttgaattctgctggatcatctgacgcaatgggcagagcaggtttggccacagcctatatctgctgtagagatatywtatgttctggattccacttgaaaccactagtctttgcattcattctgcaacccatctagttttggcagaggctaggtaggttaactgaacagggatttaaaaaggactttattaacacgttggagcaatatcctctattgtggtatttgtggactcygaaaccccaagaggctcaataaacactgtgcttcctttttagtgataagaagtatatatagggcaacatgccatttaccttaaaaaggatgtttctgctgggcgtggtggttcaagcctgtaatcccagcactttgggaggccaaggtgggcagatcacttgagaccatgagtttgagaccagcctggataacatggtgaaaccctgtctctacttaaaaaaaaaaaaaaatgccagkcmtggtggcacatgcctgtaaacactgctactcaggaggctgaaagatttgaactgattgaacccaggagacaaagcttgcagtaagccgagattgcactagtgcgctccaacctgagcaacagaatgagactctgtctcaaaaataaataaataaataaataaatgaataaataaacagattttttgacatgtggactaggagtatgggacccctaaaaacaatatctgtgttgcaggtctctaaatattaycaggtgtatctctttctgctggtattttatttctatttaatgttcaagtattttactatatttaggaaactttccatttcctggttattgcaccaattactgtaacattattaataaattaacatgatgttttgcaaaatgtaaattaaactgagagcagaagtgacatcgcctgacataaaacactgaagcagcgtttttgttcttaccacacaaaggtcaattgttttaatctcctgacccacccatgggtgtaaaataagaaacattcactaaatcaagagccacatgcaaagtgccagaagctctgctctgctcagggaagataccttatcctagagagcatttgtaagtagtgatttaaatttatggaactctgccctcattttataatgcatctgattttggtagagaccagttaggttaagtggagagggatgtaaaaagactaccatcccctgtaactttcaagtgttttgtcatggtagtgatcaattccattccttggagaatgtgattattatttttcaatccttgttgccagtggaggagaatttcgcaggcttcgccttggtcctgctctaatagtgtcccttactctacaggtcaggaagaaagtgagagtcctgccagctgccatgtrtgtccatttcaattacacattcaggaagaggtaataacagcaaactgatcagattcactttgggatggacatgagtcaaaactctaggtagcatctaaccttcaaaaactcccagtgcaggctgggtatgacggctcatgcttgcagtctycacactttggtaggcacagttgggaatatctattgaggccaggagttccagaccaccctgggcttcatggtgagagcctgtctgtacaaaaactaaaaaaagaaaaaacaacaacaaaaaattagtttggcatggtggtgctcacctgtagtcccagttatccaggaggctgaggcaggatactcccttgaacctaaaarcaatatgtgagtcagttgctggccacatccagagtactgttaacaagagtgatgcctggtagaaaagtaatgaatttattccaaacctagcttggggaaggggcacaaagagtcctgcctttaagtgtaccacttcacctttggagcagaaagcagacacttttataagataaggggggttattgagcaagggtagagggtcctyctgcaagcttggtgccttttctaccatgcgggggtctgtcctgcagaycctgactcaatgacagaggagtaatatacacygacacatatattttgcttgtcagtccagctgagcatcctggccacttacagactctaaggaagagtgctgtcagctgccgccccaamttgctggccttcttggcatttatttagaacacattaaatgacaaacgctttgagtcaacaccattagagggtaatcaacctggtcaccttcccccaggagagcaatcctgcctgtgagtgatgaaaggttagctttaggactacctgagtaaacaagctctttagataaactactatacattcctttgtatctgtgccccaagtgcccaggctccrgcaaagagactggctgccttcagccaaactatctgaagctatgcaaaaacttttggtcttccaagaaggtttttgttttgttttatacttttccctaccattctgactgaayccctacactaccagatagttgaattggtgccttcctttgcagaaatacgttataaaagtggccaagtgggtatgttttccatatgccctcctgttggatgaaagcccttgggtaattcctagagtggagaagagyctggaatttccaggtccactttctggaggtaaaaattctgtggcgggtgtgctttggtctgcaaattgactgtcagttctcaggagaatctgtcttggagcastaagttwgaaaatgtgccctgtagggaatgtctagtgagtgggagtgaaaggttatatttgcatttatgaagggctaagcaggatacagggaacaaagagaaaggggagagaagagaagagaaaataataattaaaaaaacagtaaatcattctctttttcttagaaaaaaatggggcaatctgttacaaacccaggagttcaaggctgtagtgagtaatgatcatgccactgtactagatacagcctgggtgacagattgaggctgtgtctctaaaaaaaayctaaggcaaataacacaaaaaacaaaagaacattaaaaagaaaatctcccattccatctcatggaacacgttgtctttggggtacctagatattagtgttagttcaggctctgctggggtggccaatatctggtttactggtggcaatttcatacgagtctgcagcaacgtcaagtcttgcctccccagaggaaggaattcaactgaggggcatacgtaagaagagactgaaggaagtttctgagcaggaatggaagtttattaaaaagagagcaggaaagaaaggaagagactttattggaagtctcttggaagacacttggaagagaccacagtgggcactttggagatcaagtgcagtgtcacacctttgacttgtggttttatatgttggtatacttctggggtcttgtgttccttttcccacgattcttctcttagggtcttgtgttcctttttccatgattcagccccttagggtgggctgctcacatgcatggtagcttgctaacactttagaggtgagyatgcgcagtgtgtttactggaattgtacacatgcttgcctgaggcattcttcccttttttggtggaatgcccacagaaggtcatattccaccattttctctcttaacacgcatgcctcagcctactcaccctattcctgagctgctgactaccaattttaagcgtttttatttattgtgaaatgcctctccctggcacctatgaycaattattatttttagagaggcagggtgtcaactgccaggccatcagctgatggccacttgacattccttgtgggtggtgggagccttcttctgccctactcatgcctgactaactacgtactgtaagagccctatacctaaaagtctcagatgrtatggatgtgtgtccttccctctgagtactattatctgggaaatggctacaggtctttgagaaagcatcatatgaatacattctgaatattctgtggtgaattttctgcatcttttatcaaggggacttaagcttcccttcagttattgaattcttgttctctgaattggctcagtcctgacaactggttgaggttcttggattttccacttctaaggctgacctcaggaatcagcttttcagctccattttgctcttggtttataagtatttatcaaagtatgaagcctcttcaactattggcttatgaactcattccaatgaagctgctactgtcatcgtttcattgattctgacatttgcaagatcaccagagtctgtgttgctgaggttagtcttcatgttgcatgctctattagccacattgaacatagtttatttgcatttcaggatgctgtcctctcctgattttatctttgttcactgggcagcacttctcagtctcctttgctagttcttttttgtctctaaactgaaaataccaattttcaacagggtctcaattcttcaatctctacaatgatgcctgttgtgttggtgatctcatgtattctccttactgacaatgtagtcaaatcagtcaacagacagkcataagggtgattatccatttatattgtttatttattcacatatcttggtatatagcacattatgtaaatatttttccttcaaatgtcaaatttacatttagaagtaatagtacgatggtgggtgctctggcttaagcccgtaattgagcagcttgggaggtttaggcaggcagatttcttcagcgcaattagtggagaccaacctgggaagaacggcgaagcccagtctctagtaaaaatacaacaattagccaggtgtggtggcatccatctgtagtcctagctacttgggaggctaatgtgggaggatagcttgaggctggaactgtagacagcagtgagccaatctcaaaccactgcactccatttggggctacagagtgagaacatgtctcaaaaaatgaaaaatagaagtaataataccaaaaatctaagggaaaagatggagtattaataatatttttgcttgaatttccactaaatcagagtgagggtgacccaccatctaatttagttttatttaaaatagcattatacatattgatagattactatgcaggggattattattattatagaaataatgatctaagtagagaaatatacagatggaattatggttgattaacccacttatattacttgcagttgtacaggtagtatgttttagtatcttagttactaatctcaccttttatgtatagctctataatcaaatatgagttattttttgtgtatggtatgaaataagaatataaatttatctttatgcatgtcctccaaatgtctttcagacctccaaatggataaacaaattgtggcatacttatacaatggaatactatacagtgatcaaaattaatgaactagacagacatgtttacaacagaataatacaacaaagaaaatgaacaaatttgagctacatagataataatactcacaaatgtgagaggaattannnnnnnnnnnnnnnnnnnnnnnnnnnnnnnnnnnnnnnnnnnnnnnnnnnnnnnnnnnnnnnnnnnnngatatactgtattattgcagagagtatttttctatattcatattgaaaaatgcccaaaaagccccaaaatagaatcctaattattggatgtcacttttgctatgaatttttaaaatgtagtaaaagaaaaagaagcaaagaaattcttgaaaatatgttggttttacattattcttgatgaactaccacatgaggatacttctctaggcctgatgctgagaatcatagaagaaacatgaggccatgaggaagaatagtagggttctctcactaccctgaactccagtacttaaaaaacaagatggaaatcacatttatcaaatagcattctcccttttacctgccataattattatcatcatcatctatatatacatctatctcattaaatgatatatttttgaaatatttaaatacataatttggaaaataagtaatttttaaaagaccatcattgtgggaaagttacaggagtaaacagcaaagcttagtcatgctcaatacatgtagatttagaaattaagtatagcttattttacaatatattgcttaagcaaataattatttatagatgagcttaaactaatctttgtttcattatgatcactatagaaacaatttagattttagtgtaactaaaactaaccagtaagaaggacaaagcaaatgatacattttatgagctagcttttatttctaagagaggattttaggaccaaatagtcaaacagagttaagacctcagatcttctgtcacacttgtgtgagtgatggtggagttcgaaagttatagttctataaacaaaactatactcacggatagggattaaatggtggaattctttagaaacaccagattcagttttgtttccatgagacttaaagttcttcaatctttcataaacttgtatgtactgttttactctttgatcttttaaagattgttataaatgaagaagtcttgatttctgctaataaaaacagagtaaaatttaaatcatggaatagaaaggtggagctgtrgttgagatattatattttattaattgtaatgacaktttgagatccagtgctgctcactgaatttccctgtgaggagagtttgtggtgatgacccagcaacagacaagctactatccaaaaaaagctactcacatcaaatcaatttccagtttcttccaagttgcaggagaatgcgtagaccataattttaatctcttctgtgacctaagtattacaaaaagaagaaaatcactamaattttcatgtcaggtgtrctaaaaatttayaaaaactattttttaagaasttggtgttataaatactttgtttagtttctccattaaaaatgatttatagcaagagaataaaagttcatttctacccctaaaacaataagataaaaaagagtaatgaatattgagaatccaatagacagakttgagaaccagttaaacataagaaagaattagtgaattggaagataactgcccagaatgaagcataaagagaccaagaggtagaaaatataaggctagagggtcagagacattgaagctacaatcagaacaactaacatacttctgcagttccagaagattagaagagagaaaatgggccagaagcattgtggagatttttccaaaagtggtaaagtgtatcagttcatatatttttagaaaccatcaaacttcagacaagataactaaaaccaaattaatataaaatgacaggacatcaaagaccaataaaaaacctgaaaggtaactaaaggaaaagacagattatgttaaagggaataactgtctaaatgacaacctgattttcaacagacaaaaatgaagctagaattcaatggaatcatgccttcagtgcatttcaaaagtagaatagaccttgataaacagaaacttaaaatgatatttttttcagataatagaaaaattattattattatcagtattattctatgtggagttggagtctcaatctggtgtccaggctggagttcagtggtaggatcatggcttactgcagtctggaactcccgggatcaaaccatcctcccacctcagccttgtgagtagcttccttatgcctggctttttcatttattgtagacacagtttcgctgtgttgcacaggctggtcttgaactcctgggtgttcctgactcagccttacaaaatgttgagattatgggtgtgagccaccctgccttgccaataaaaggactttttgaaactattaaattgaatatgcaaaaaggaatacaaattaatgaagtggtaaatatgtgcataattctaaatgaatgtttactgcataaaataataatgtcttgttggggtaattatataattgataagatayatgcaaatggcaaaaaatagaatggaggtaaagctgacaggagtacatttagttaaattatcttttaaacttttctatgtctatgaggatattttgcacaatgaccctgtaattctactcaaaggtatatatacagaggaattgcatcaaatgatatatgaaagaatgctctagtagaattattcgtaactgttcaaaaaagaagctggccaaatatatattaaggatagatcaatcattacagtaaatccacacaatggaacartatagagaagtgaaaaaaaatcacatgtacttgcaactatgtgactaaatttcagaaacacaatgttgagtccaagaagccacaaacaagaagaacatgtaggattgcacctacacrcagtgcaaagcaggccagaccaagcgatggagtttagsgttgcatacctagttggtaaagtgtaaagaaaattaaggaaataatcaccataaattttggatatygcttatctcaggaggtatgaagaaatgtttagggacttggaaagtggcatggaggtggacctaggttgtgtttggtgttccttgtcttgcctgcatcatggttacttgaatgtttatgatacactgcrgtatttcccatttttgttttggttcatttctaagtgtgcattataattttaatgtaaaatgtttaattaggagatatgtctcatagaaattattattattcatctcattatatactgatggcaataataaactatttgtatacattgttatacaactctaagggagttgaagtgagcactttcttatttagttgcaacgtgaggaaatttgagatgatgttatcctccaaccccagaactttccaatggatttcttctagccttaattatcgacctcacaagaacaaacctttgcaatttcccatctrtttttgcttttggctcctgaattcctgacacaacaaggttgtacatatttcccacactcttggtttagcagagttgatttatcagttatgtttttctgcaagagaaaaaccctccaaactacattagatgtttatatctcacatgttgttggatttcattttttttaagctgggtttggtggatggctctgtttatttgaaatggaccaaattctgaatcttggtagtagttagagtttggccaatttggtctggatcaggtgggggcaatctgacttcattagtttctcactctccttctgggaacagtgtactagccaggtgatattctcatggtaaatggaaagaggaagaatccccattatggaagccatctgaaatctctatgcaaagtgtagtaattttctgtttatcaaagcaagttaaatggttgtactccaagttcaggggcaaggtagtcagycttctcagtgatggcaggatactgcaagactatatatcaaagggttgggtactcaggaattcttatacaattgctaaatgttttgtatagtaataaatatttaaacattagtcttgagagaaactttaccaaaggcctaagaattagagatatgtttgataaataaatattattcrtgagctgaaagccctgagtgggaaaataggactaacttcacctagacaacctcctggaaactcctttttttattttggaactgatgagaaaataatttgttccattcgtgagtggtgtgcacatgtgtgtgtttgtgtgtgtatttatgagcttgtgaataatgaagttatacaaacgtattagcagcaaccagattctgaggttctccagaaaatcttagatatttttgataaaagcagtttggattctgtgtatttaaatctgtcattwaaaaaagtccatataggtgatgaacttaattatgaccaagctccttttaagaatttagacatttactatatgatctctgtattgggttataaaacttccctaacaactgaagtcactaaagacaaatgatggagaggttacacaaggaaaaattgcaaacactgaaagtgaatatgtccttgtttgcatactagcaaatgagaattcaggtttcatgtcaacttcagtatgaataattccagcctataacaaggacagacagtgaatgaatgggttaatttgagttgttttgaaaataagaatattttccataaagagagcgttgaacttacccattagcatgccatggtgatttctggcttgacaytggtaacarcaattaaaagtaaaaagaatgtcacagcacatacacaaatcaggtgcatatagaatttaaggtcaggatattcaagcaatcacaaccagtgatattacaccagcattttaaaaatttctttttgtctgttcagacatgataacttttctgcccatcattttttccattctaatagtggttacatttgtgattggaaattttgctaatggcttcatagcattggtaaattccattgagtggktcaagagacaaaagatctcttttgctgaccaaattctcactgctctggcagtctccagagttggtttactctgggtattagtattaaattggtatgcaactgagttgaatccagcttttaacagtatagaagtaagaattactgcttacaatgtctgggcagtaatcaaccatttcagcaactggcttgctactagcctcagcatattttatttgctcaagattgccaatttctccaaccttatttttcttcacttaaagaggagagttaagagtgttgttctggtgatactattggggcctttgctatttttggtttgtcatctttttgtgataaacatgaatcagattatatggacaaaagaatatgaaggaaacatgacttggaagatcaaactgaggagtgcaatgtacctttcaaatacaacrgtaaccatcctagcaaacttagttcccttcactctgaccctgatatcttttctgctgttaatctgttctctgtgtaaacatctcaaaaagatgcagctccatggcaaaggatctcaagatcccagcatgaaggtccacataaaagctwtgcaaactgtgacctccttcctcttgttatgtgccatttactttctgtccataatcatgtcagtttrgagttttgagagtctggaaaacaaacctgtcttcatgttctgcgaagctattgcattcagctatccttcaacccacccattcatcctgatttggggaaacaagaagctaaagcagacttttctttcagttttgtggcatgtgaggtactgggtgaaaggagagaagccttcatctycatagattcacaagagcagcattgtgtatcttctagcagaaaacaaacgtgttatatgaagcattttatatttcttactgtgttttctgtaatgtatgtatatgaataactttcaagcatgtacctagaaaagtcttttacctaacgttagtctaaaaaagtgcgtatgtatatatatgtatttttgtgtgtatgtttgtatgaaaaacaaaagaacattgacagtgacatactcttttttgttttttcacacaaactgccaaattatacaaaatatgacaaaaattcttaagaattatgaatccatacctatttcatttatgtattttatatttcatttgaataatttatgatctatatttataattattaagaactatcagcttatctcaggaaagacattgctgttttctattgttatttgaaccacacaaatataccacagtgtgcttcgaattcattgtttgaacctgtaactttttggatggtaaggtcattcaattctaaatcaataataaggatgtgtctttgaggttttattccattatgaattcctattttatgtttagtaaaaagcaatcagaattattgatagaaaacaatgcacacaataaaatttgagtgacaagcatatgtagagtaagtttcaactatgtctaccataaacagttctgaggaatattagatttaatacaagcatgtgaatagcttagaaaacaatctcttctataatagggatgaaaaatcatgattgtgatcttgattgctattatcagtttccatatgtagttagaaaagtcatttcttccagcttttggattaaagaaaagctttttttttgaagttgagaggtgatgtaaactattttagtatttttttctaaagcacttttaagcccctgaattgttaattatacccttaccttccatttataaaattccttctaaacttcaggtaacagaacccaaatcttccttattctaaaaaaaaactatcaatgtaaaaatagtatagaaattatggaaaataaatcaatgaaatttttgtaaatgttaaaatggcatctatgaaatctatgttttaattatagaatgtgctttacagttataattttgttgtcaatgatgaaatgaaagtggttgacatattcattaataggaagttctattatgagatggaaatgtacagtcttgttcacagctaaattctacatgactgtattaattttggtgttatgaaattttaaaaatgtgatttaaaccttaagataaatcatccccacatgtgatttatgtgtttttttaaaatcatgtatcttcctcagtacaatgtaagaactgtaaaatcagatcagagatgatctcatctctgtcttgctttctgttgaatgtaagatcagagagcaagatgatctcatctctttcttgctttctgttgactcccaggacctagaacccagcaacaagaatagatggtcaaaaatgatattttaatgaacaaataaatgggtggataaaatgggtaagctgatgtggtaaaccaatgaaagggaaactcatcacaaaatctgcagttgcrtgarttcccctgttctgttctcaggttaaggttacaggcttatccaagcagaatccttccgcagaggaaaagtttggctattccacaattttaggggaaatatgacaataatatagtcttgatgcarctgtatcaggtgtctgaattggagacaaggtagaacatcaaaattagatggcgcctattacaatatttttagaaagcgtataaacaaccttggtctatttgaatatgtatttttttctattgtgaattatatatttgtattatgatattttctagttgattattatttaaacaaaaatggcatttcattttaaaaattgagttagtaaccagctactttactaaaatgttttttatgtattacctgttattaaggtgatgacatttatttagaaatcaagttcaagacaaaaatggcaaggayatgtggaaattgagacaggaacaaatgtgaaacaatgtgtggtgatgtctggtatgrctctgctggcagccacttcacagtgaggtgagagagacagcatgacggtcatcagatgcgtacacttggctcccagcacttttccagaagggctacaaggggaaaccacagccggcattagtccagggatgagagagaggagggagaatggagaatgtatctgctcagtkgtcttctgtatttgatttcccattggccattgtttccctgaggcagaactaccatctctgctgttctgccttccatcatccagtccctaggtggaggttgtgaaagtcagacctcatgcccacagtgtggtgttccattcaagtcccaaatggaaggatgatctggatcaggcaaggtgctggccaggggaataggagatagtgaagggaatctaagaaagcacatgtctgtgtccaataccaccactctttgtgccgctcagatgtactcatgccctccagtcatggctggctttatgagcatatgacttgcacagttgcacagaggatactcctctgctgaagagggaatggtcttgcactaattccatagggatttgctctcccctctcccacaggcttgtcagagacgtgcacagagtcctataatgcccactatgtatgcctctaacagctttgaattctgctggatcatttggctcagtggccatagcagtttggatcagaacctatatctgctgtagagccctcttttgttctgggctccatttgagaccagtagcctatagaaacttcattaatgagtcagagcaatattctcaaatgtggaatatgttggctccaaaatcccagtaggcccccaaaacactgtgtctcttttgtagtgataggaaatatagagagagagcaacatgccgtttactttaaaaaagattgttttgacatgtggactagggacactgaaaacctgaaaacatcacctatgttgtcagtccctgaatcttcacatatctcttttcttctggtattttacttccattcaatgttatagtattttacaatattaagaatcttgcctcttcctgtttattttaccaaataatatataattattatttgagacagggtctcattctgtccatgaggctggagtgcagtggcaggatcatagctcattgcagcctcaaccttctgggctcagttgattctccctcctcagcattgctagcagctgggactgcagggacacaccaccttgcctggctaattttggtattttttgtagggctgggatttcaccatgttacccaggctggtttcaaactcctgggcccaagtcagcctcctaaagtgctggaattacaatcatgtgccacagggcccgggctgtaatattattaatatattaaattagcatgatgtttttaaaaaaatgtaaattaaacagagaacagaagtgacataktcctgacataaaacagtgaagcagtgctattattcttacaatacaaggcaaattgtcttgattttccctcataaagggtgtagattaacaaatattcaccaaatgacgagccccgtaaaaagtgccagaagctatgctctgctctgtgaagacagtacatcctagaaagcatttgtgagtgttgattgaagtttatggtaatctgcactcattctataatccatctggttttggtagaggccagataggttaagtgaatccrgttatagaaaggwctaccatcccctgtaacttgcaagtgttttgtcacggcagtgaccagttccattccttagggaatgcggttattatattttatacattgggttgccagcagtggagaatttcagaggcttcaacttggtcctgctataataatgtcccttactctacagttcacgaagaatgtgaaagtcctgccagctgccatacgtatccagttcaattacacgttcaggaagaggtagtaactacaaactgattagatccaccttgggatggacatgagacraarctctaggtagcatctgaccttcaaaacctccccctgcaggctggatgtgatggctcatgcctgtagtcttagtagtttgggaggccaaggtgggagaatcccttgagagcaggagttccctttgcaacatatggaaactccatgtctacaaaaaattgaaaaattagctggcgtggtgctgcatgcctatagttccaaatasttgggaaactgaggcaggaggattgyttgagcccagggtttcaaggctgtagtgggctatgatcctgccactgtactccagcttgggtaacagagggagactctgtctaagaagaaaaaaaaaaaagtgaaagttcttactggtgtcttaaatatcaagtaaaacaggttcaaatcaataattaacaatctttggttcctgcctatagcaaaaaggtaaaatggaaagcagttatacaaatagtatgttaactcataagaaaactagccaaagacagatttattatcatctgctttttttgttgttgttttctcgagacggagtctagctctgtctcccaggctggtgtgcagtggtgtgatctcgactaactacaacctccacctcctgggttcaaatgattcttttgctgcagccatctgagtacctgggattacagacgggyacyaccacacctggctaatttttgcatttctagtggatatagagtttcaccatgttggccatrctggtcttgaagtcctaacctcaggtgatccacctgcctcagcctgccaaattgctgggagccacgggcctggccaatcatctgctttttataggtgataatactgaggcagggagtagttgtaaaatggagtctcagatcatagctataccaagcagggaatctggtttcctgtcctggcagtctgactccaagatcccctcttagaaaccatcatactgtaaaaactgaaargaaataaaaatccaagattggagactgattttaacatctattcatctaaaccattaagtaatcaaaaatgaattaaatagaggaaaatacaactgactattcatacacagagaagtgtagactcttcaatggaaaacatgttttttaagtgcccaaggaatagttataaaattgctgagtattttaattaaacaactaatatttaagtattaggctcaagagaataatttagtcaaagtcctaaatatgagaggctaagtttgataaagattgaaaatgcactgaaaagcccaagtaagaaaattattttttcattttagaaattataggacaataatatttcccarctatgaggtgtgtgtatgtgtgtgtgtgaacrtgtttgtgttaatgagcttgttaacaataagttatacaaaattattagttggcagcaacsagatttttaggaatattggccttcctgggcttcccaagaaaacsytggatgcttttggtaggaaaagttaggactcactaaatctggcacagaaaaggtgaatcaacagtggtcgtgattctagttttgaccgagctgcatataacagtgtaggcatctgatgtasgatctatgtattaggttagaaaatttcccttacaactgccattgctcagcacaaattatagagaggttaaacaaggaataaatggcaaaatgatgaataagaatatgacctgatttgcatgctggcaaatgagaattcagcttttacttcaacatcagcatgaaacattttatcttataacaaggtcacagcatttgaataggagttaatttgagctgttttggaaattatcatgttttccattaagacagccttgaactcattcagtagcatggcccggtgcgttcctgcttgacattagtcagagaatttaaaaggaacaagaacattactgcacaatcagaaatcaggtgcacatagaaattaaggtcaggaccttaaagggaatattgcccattgatattaggcctgccttaaaaaaattcagacatggtatgtttactactcatcattattatccataacagtaatggtagaatttgtattttcccataggcaccttcattacacttatatactkatttgatatttcaacatattattttctttgggtccttttaagtagttgttaaacaatgctgaaagttgccttacagtatgctgttaactaatcatattttctcaaagtcatttggcataatatttggttaaaagaagtatgtctagtataattacatgtgttcataayaaaagagcacttaaaactttaaaaaatattagaaaaacgaataaaggaaaatgaatacatatataaaatatataattcattattaataaatrtgcataaaatcacactcatagaatttaaaaagagtaacaatttttgaattaaggatacattctaaattataatagaaaaaggcttataaaatgttagttttaataatactttatgtaaatattattgagtttcctgcttcatacatgtccctgcaaaggacatgatctcatccttttttatggttgcatagtattctatggtgtatatgtgccacattttctttagccaatctatcattgatggacatttgggttggatcccagtcttcactattgtgaatagtgccgcaatgaacatacgtgtgcatgtgtctttatagtagcatgstatttaatcctttgtgtagatagccagtattggaatcactgggtcaaatggtatttctagctctagatccttgaggartcacyacactgtctttcataatggttgaagtaatttacactcccaccaacagtgtaaagcgttcctatttctccacatcctctccagcatctgttgtttcctggctttttaatgatcgccattctaactggcatgagatagtatttcattgtggttttgatttgaatttctctgatcaccagtgatgatgagcattttttcatgtgtctgttggctgcataaatgtcttctttcgagaagtgtctgttcatatcctttgcccactttttgatgggatttttttattgtaaatttgtttaagttctttgtagattctggatattagccctttgtcagatgtgtagattgaaaaattttctcccattctgtaggttgtctgctcactctgatggtagtttcttttgccgtgcagaagctcttcagtttaattagatccaatttgtctattttggcttttgctgccagtgcttttggtattttcgtcctcaaggccttgcctatgtctatgtcctgatctttcatatcactgagttttaatagctaaagttgagaagtctctcaaatttccgtcagtgataaaatgtataaataaattatggcacacttgtacaatagaacactatacagcaatcaaaatgaaccaactagagagacaagtttacaaagaatataaataaaaaggaaaatgaacgtatttggacaacatygatatgagaggaattattaaaattgaaaaaagattcagtataattccatttatataaagtttacaaaaaatatttttaataaattacaatttattacattggtggcgaaattctaaagtgagacatgtgagtgattatcataacaattgggatagtagggatggaggaaacaaaagggaaatgatatcaacaggaaggcatatatggggagtgtctggattgctggcaaattctactttatgaccaagatgtgataacatgactcttaatgccataattttttaatttactgtacatttaggctttattactttataaatatgcttcacaataatgaaaatacttaaaaagcaaatcatataataaataaatataaaataggctgaaaaaacatattcttatagacatcatgataattagagttttgctgaataaagaagaatagagcattatgatagtaagaaatccaagataaaattttaaacttttctttaaatattttaaaaagtaasagataagcaggaagtctacctccacattcttaatgttagttttactatgaaacatcagattctggccgggtgcggtggctcatgcctgcaatcccagcactttgggaggccaagttgggtggatcacgaggtcaggagatggagaccatcctggctaacacggtgaaaccccctctctactaaaaatacaaaaaataagccaggcctgatggcaggcgcctgtagtcccagctactccggaggttgaggcaagagaatggcatgaacctgggagatggagcttgcagtgaggcagagcttgcagtgaggcggagcttgcagtgaggcggagcttgcagtgaggcagagcttgcagtgagccgagatctcgccactgcactccagcctgggtgacagagcaagactccgtctcaaaaaaaaaaaaaaaaaaaaaaaagaamcatcagattctgagcatctgtattacactagacacctttttttcttatttccaatttcattatttatgataacatttcaaagaggcagaaattagtgaatttccaataaattatagtaatatagatattaaatacacaggacaatttytataaatttatctctaaatgaaataattatgcccatttttaccattcaaagattataycatgcatgtgtacacatatgtgaggaaaaatattttgatagtacaaagtttttgaatattagagaagaattagtagaaagataattttgttgaggcataaagcatatttagtgtaactactttgactgctgtaataaaatcacccagattttgtsacagtagctgagattaaaaataaacagtagagagaatttcacttgttaataatgctattaaaagatgaagcttatacactttataattgcacagagtatttgtgtaagttcatataaaagtggaataaaattaaacagccaaaaagagagtattctttgctagaggtcacttttggggtaatttttagaatgtggtaaaagaaaaaatatcttgcaaatcattagaaatatgttgattttgtgttactcttgatgaaatactatgtgagggtatttgtctaggcctgattctgagaataatataagaatcgagccaggcaccatggctcatggttgtaatcccagcactttggaagttgagactggtggatcacctgaggtcaggagttccagaccagcctggccaatatagtgaaacccactgtctactaaaaatataaaaattagctggatgtgatggacagcacctgtaatcccagctacttgggaggctgaggcaggagaatcaattgaaccttggaggcggaggttgcagttagctgagattgtgccattgcactgcagcctgggtgacaagagcgaaactccatctcacacacacacacacacaaaatgtaaagccatgaggatgaataatagtgttctcccaccacccttaactctagtgctttgaaaagaagactcgaatcacaattatttagtaacattctccctttcaggtgacatcatcatcattattatcatcatctacatttacatctgtcttattaaatgatttatttctgaaatatttacatacataatttgggtaaygtctatgtaatttccaagagatatcattgtgggaaagttacattagtaaacagcaaagttcatgtcaggctgaatacattgagatttagaaagttaagtgtagtgtagtgtagtttaaaatacattgcttaagaaaacaattatagatgatattaaactaatccaaggaacactataaaaagattttgattttagtataaataaaattgcttagtaagaaaaataaataaaccatttcatgatcaagctcttatttctaaagagaggattttagggctaaataaatcaaacagaagtaagctctcccccacawcttgtctatatcatttggataatgatgtaattcaaaggcacagagcaccttttcaacaacataagcaaagtgaaaattatgtcatggaatacaatgatgtatctgyggttaatgaactatattttatctattgcaatgatattttgaaatccagtgctgctctttgagttccctttgagcagagtttgtggtggggacccagcaacagacaagctaatatccaaaaaaagstactcacatcaacttaatttccagtttctttcaaattgaaggtaaattctaacacaaagcttttattctattctctgactaaagtgttgggaaaagaagaaaattgttaccgttttcatttctaacatactaaaacaaaaaacaaaaaatcaaaaaaatcagaaacatttttaaaaagaacagagtgttaagagtagtttgttcagttttcctatagaaaataatgttcagaaagagaataaaagattattctgaacactaaaacaataagactaaaaaaatgaaatatcagtactgagaatccaatagaaagagtcaaccagttagagyackagaagagataattagtgaattagaagatagctamacagaatgaagcayagagagaaagaaatggaaaatgcaaggctagagggtaacacactgatgctatcatcaaaacacctaacatacttgtagagttctgtaagattagaggagagaaaacagagcgagagaaatgttgcagggatttttccaaaagtgaaaatgtatcccagcatatatctttagtaatcacaaacttcaggcatgataactaaaatcaagttaacaaaaaataatacaggacaccaaagaccagtagaaaatctgaaaagtagctagaggtagaagatagagtatgttgataagaaytgcattctaaatacaacctgattttaacagaaaatatggaaggaggaattcaawggaatcatgtcttcagtgtgtttccaaagagtagtagaccttcataaacagaaattgaaaatgatatttttcagatataataaaaattactgaaaatacaaagttgaacatgcaaggagcaataaaaattaatgacgaaaaataagtgtgtaattctaaataaatgttgactgtataaaacaatattgtcttgttggattaaaygtataattgatamgatatatgcaaatagcaataaagagactggagataaaggtgacaggaataaatttagtcaaactgtgttttgggcttttctatgtctgtgaggagaatttgaatgtcataatcaaggacsctgtaattctacacccagctatatawatgcaaaggaattgtagcaaatgatatgtgaaagaatgctcattgtagaattattctaacagctcagaaaagaagctgcccatatgtacatcaaataaggatgaataaataattacaataaaatcataaaatgraaaaacatagagaagtgaaaagaaatgaatcacatgtacatgcagttatgtgattacatttcagatccataatgttgagcacaggaagccatgaatacgaacatataggattgtatctatacagagttccaagcagaccaaaccaagctattgagtttagggttgcatacctagttggtaaagtataaagaaaaattttaaaaaatgatcatcataaattatggacgttgcgtattacaggaggtgtgaagaaaggtgtagagggatggaaacacattgaggtaaacctaggctgttagcaacattccatgtcttgccctacctgatggttacatgagtgtttatgacatattgctatgttttccatttttgttttggctcatttctaagtgtgcagtctagttataatataaaaattattaatcagaagaaatgttccatgaaaattattattactctgctcattatataccaaagggaaaaatacactgtatacattcatgtacagctctamaagattttaattagaaaatttttgattttagttgtgactactgaaaatttgacaagatgtttcctgccaaccccagatttttcagtagatatttcttctagttttaattatctacttcatgtgacaaaacattgacattttccatctatttttcccttggatcctgaattcctgacacaacaggggtggacatgtttcccacacgcttggcttagcagaatacctatatcayttaagtttttctgcaagagaaaatcctccaaaactgcattagatatttgtgtctcatrtgtctttggatttcatttttgtcagctaggtttggtggatggctgtggtgattggagatgggccacattctgcatcttgaagctactttggctgatttaggctggataaagcagtggcattctgactccattagtttctcattcttcttctgggaacagtgtactcaccagatgatgttctcayggtgaatggaaaagagcaagaaactccaatatggaaaccgtcttaaatctctgtgtaaagtctactaatttsctgttcactgaagcaaattacatgagtgaattcagagtccaagttccaggtagtcaccctgcctgtggtgggaggatactgcaggattatatgacaaagtgtagcgtacttagaaatatttgcaaaattgctgactgttttaattaaataattaatatttaaacaaaaaacagacttgagaataaatttaccaaaggcctatgttgggcacaggcccccaaatctggccataaactggccccagtaaactggccataaataaaatctctgcagcactgtgacatgttcgtgatggccatgacacccatgctgaaggttgtgrgtttaccagaatgagagcaaggaacacctggcccacccagggcaggaaaccacttaagggtattcctgagccacaaacaatagcatgagcgatctgcaccttaaggacatattcctgctgcagataactcgccagacccatccctttgtttcggcccatcccattgtttcccctgaagaatactttcagttaatctataatctatagaaacaatgcttatcactggcttactgtcaataaatatgtgggtaaatctctgtttggggctctcagctctgaaggctgtgagacccctgatttcccactccacacactatatttctgtgtgtgtcttaattcctctggcgccacaggattagggtctccacaaccgagctggtcttggcaggcccaagcatgagaaacatgtttgataaatattattcattgtctgacaaccctgagtggaatatgactaattccacctagatgacctcctggggaaactcgttttccaattggggatttataagaaaataattcattgcatctgctaagtgtgtsagtgcatgtgtgtctatgtattgaggagcttattaacaatgatgtcatataaatgtattggttatcagaaaccagattttaaggtgtattggcctcccaggactttccaaaataatcttggatgatattgataaaaggtttagattctggtattaaacaaaccatattggtattatcctagttatgaccaagctccttaaacaatttaaacctgtactgtatgatatgtgtattgggttttaaaatttccctatgtaacaactgacgatgctgracacaaattatggagaggttagcaaggacaacaattgcaaaacaattwaaaaaatgcctttatttgcatactaacacatgagaatttacttttcacttcatcctcaatataaaatatttcagcatatagtaagacagacagtgtatgaagaggagtgaatttgagctgttttgagaataagaatattttctatttctataaagacagctttgaattcatccattagcatatgatggtgctttcctgttgaaattagtcatgaatttaaaggcagaaaatgttactrcacatttaaaagtcaagtgtttatcgacattaaggtctggatattaagggaatcacaaccagtgttattaaggctgcattttttctttcttttcatttgttcaaacatgatatgttttctgctcatcattttatcaattctggtagtgtttgcatttgttcttggaaatgttgccaatggcttcatagctctagtaggtgtccttgagtgggttaagacacaaaagatctcatcarctgaccaaatttctcactgctctggtggtgtccagarttggtttactctgggtcatattattacattggtatgcaactgtgtttaatttggcttcayatagattagaagtaagaatttttggttctaatgtctcagcaataaccaagcatttcagcatstgggtgttactagcctcagcatatttcatttgctcaagactgccaatttctccaaccttatttttctccacctaaagaaraggattaagaatgttggtttggtgatgctgttggggcccttggtatttttcatttgtaatcttgctctgataaccaygggtgagagtgtgtggacaaaagaatatgaaggaaatttgtcttggatgatcaaattgaggaatgcaatacagctttcaaacttgactgtaaccatgccagcaaacgtcacaccctgcactctgacactaatatcttttctgctgttaatctattctccatgtaaacatgtcaagaagatgcagctccatggcaaaggatctcaacatctcagcaccaaggtgcacataaaagctttgcaaactgtgatctccttccttatgttatttgccatttactttctgtgtctaatcacatcaacttggaatcctaggactcagcagagcaaacttgtattcctgctttaccaaactcttggattcatgtatcytttgttccactcattcatcctgactatgggaagtaggaagccaaaacagacctttctttcagctttgtgacaggtgaaatgctgagtgaaaggacagaaaccctcaactccatagattcacaaagggagcattgtgtatcttttagctgaaaacaaactgacggtatctggaacattttatatttccattcgtttttccttagtgtatatatttgaataatttcaaaacagatacctagaaaagtcatctatctatctatctatctatctatctatctatctatyayacacacacacacatatrtgtgtgtgggtatatgtgtgcatgtgtgtgaataacaacattgaccacaaattatgaagccgagtatatttcacatatatatgtaggtatattttatgatagttcatcctatggtatttcatgtgaagaatttattacctctatttataattaggaacttacagcttttatcaggaaatcattgttgttttccattgtaatttgtaccacatatatgtacttaactatcattgtttgaacctctaattttttggatggtaaaaacattcaattctaaattaatgatgagaatggatctttggggtaggttttatttcattatgaattcttattttatatttattataaagcaaatagaatggttgttagctaatgatgcacacaataaaatttgagtgacaaacatacatacataagtagagtaaattttgtatgtgtatrccaaaaactgttctaaaggatactggatttaatagtagtatgtgaatagattagaaaaaaatcatttctataataggaatgaagatacatgatcatgatactttcagtgctgttataattttttaatgtgtagttagaaaagttgtttcttccactttttgaattaaagaaaaccttttttttttgaaattgacatctgatgtcaagtatttccatttattttgcttagccacctcygagcccttgaatttccaattttccctttgtctcccattcttaatatttctcaaaaaaattcaattattccctctcttaaaataaactcaatgtaaacagggtatataaactatggatcacaattgaatgaaacattctgcaaatattgaaaattatctgtctaatctatatattgatgataggaaatgtattaatcatatgtttcaytgtgggtgggcagtgagctgaggctcctcaagcatctctttctatttttattttgtttcttgacataggttctccagcatttggctcaaggcyccaagggcacatgtgacaagaaggcgccrgctttttaaacattggaagttcttctgtgtcagttctgtgacagaacatttacttaacacatcatgaaggctagtttggatgtggaggggaatagactccatctatccatatgaggtgagycaaagcacttagacgtgttttcaaaccactaatcttgatgattcagaaatgtgctcccttttccaatttcatcctgatacaaatgtawcatctccggatgatgccaatattctccccaattccatcatgagctgttctctataattcagaatctgtagactaagttgtaaaactaatgactgtcaatgtattctacatgaaatagtgggccaaagaaagagggaaacatgataagtagaaaaatatacatacaacatttttttcttacactaaagatcaaataaaacccataggaccaagcctcccacagatactttttataaattctggataaaatatttwaaaaaacagccattcattggcaatggagaatgaacaaaataggcagatactagagagaggtcagcacttggaagaagggaatagcaaggagtgagtttcctgattttatagctggccctagtgtgcaccaggcagaggactaaaacgtcagaagaaaactgtagacttactgggttgaagtaacagaggactgagtttggcataacacgagcagcaggagrtcaggagaaaatctgagaaaggagaaggccagaaaaggggagccccaacttctgaatataaactatccaaagctttgtctggtccctataccatgcatgtatagggcagacttcatgtagcccagctaaaataattaaattgagatttcagttatcatcaagcacagtgaagacagagatagcaacaaaacatattactttaggcaaagatactctattcttgaaaacctaaactacattccattacctttcataacagtcatattccttgtccattctggtttctaccttggttctaactcctacttttattaattacactaatcaaagtaattctctttcaaggagaaaactggaagttatgtaattgargactattaaaaataactattttggcagatgtgcaaaattctcaagcrcatatattacaactttctatagtcatatacatcctttttacacttgcttgaattggtctacaaaacccccatgtttcatagtgtaatccaaacaaatagccactccataaaatataagaataaaagttatatttatttattatataactttgattggtgaccacatttcagtattccaacttaactagaaattatcygaagattttcatcaactcactgaatttaatattagtctaaggtcttaaattgcaccaggaatcttggaaattaaatttaagctgataggctagagaaaataattactgtcaatatgtggagtttttcataatttgtattcagtttatttgaaagcataattttacattttttggtattttaacattatgtggacatattaatttaccttatcagtaaacagatataggaagtttaggaatttctttttttaaaatgtatttttaagtttcrtggatacatactaggtgcatacatttattgggtacatgagatgtgttgatacaggcatgcaatgtcacataatgaagaatggggtagccatcccctcaaacatttactcttttttgttacaaacaattcagttatactctttcagtcattttaaaatgtacaactgaattatcattgattatagtcaccctgctgtgctatcaaatagtaggtcttattaattctttctatttttttttttttttggtaaccattaacmagccactccttccctttagcctccactacctttcccagcctttgtttagcatccatgtactctctatgtccatgccttctgtgcaaacattgcagttgtttctgatgtattcaacttaacataataatctccaattctatccatatattgctgcaaatgacaggatctcattttttaatggctcaattgtactccattgtgtatatgtaccatattatctttatctattaatctgttgctggacactcaggttgcttccaaatcatggctattgtgaacagtgctacaacaaacatgggagtgtagatacctgtttgatacacttatttcctttcttttgggtatatacacaccagtgagattggtggaacatatggtagctctaatttttgtcttttaagaaaactttcaatggttttccatagtggttttactaatttatattcccacctgaggtgtagaatggttcccgtttctccacatcttcaccagcacttgttacatgccttttggatataagctgttttaacggggttgagatgatatctatctcattttagttttggtttgcatttctctgatggtcaatgatgttgagcaccttttcaccttttcatatgtgtgtttgacatttgtatatcttcttttgagaaatgcatattcaaatctttcacccattgtttgatcagattgttagattttttttttcctatacagttgttaaagctccttttatattctggttattaatcccttgtgagatgagtagtttgcaaatattttctcccattctgtgggttgtctctttactttgttgattgtamcctttgctgtgcagaagtattttttaacttgatgtcatcccaattgtgcatttttgacttggttccctgtgcttgtggggtattactactcaagaaatttttgctcaaaccaatgtcctggggagtttctctgaagttttcttatgggagcttcatggtttgaggtcttaaagatacatctttaatccattttgatttgatatttgtatagatatatgggactagtttcattcttctgcatagggatattcagttgtcccagcaccatttattgaagagactgtctttttccagtgtacgttcttggcatctttttcaaaaatgagttcacygtaggtgtgtggatttgtttccaagttgtctattctattccgttggtctatgtgtctgtcttaatgccagtaacatgctgttttggttactacagcctctgtagtataatatgaagtcaggtaacatgattcctccacttttgttcttttttcttaggatactyttggctattctgggtcagttgtggctccatataaattttaggattgttttctctatgtctgtgaagaatgtttttagtattttgataggaattacattgaatctgtagattctttgggtagtatggccattttaacaatgttgatacttctaatccatggacatggaccatcttttcttttgttgggtgtccttttcaatttcttgcattagtgttttatagttttcattatagagatctttcatctctttggttgagttaatcttcagctatttaattttatgtgtggcttttgtgagtgggattaattttttgattttgttttcagattgttcactattgacatatagaaatactactaattttttatgttaattgtgtatactgcaaatttattgagtttgtttatcaattctaatagttttttggtacagtcttcaggttttataaatataagatcatattgtttgaaaacagggrtaatttggcttattcttttcctatgtggatgctctttatttatttttcttgcatgattgctctagctagagcttctactattatgttgaatagcagcagtgattgtgagcatttttggmatgttccagatcttagaggaaagtcttttagtttttcccaattcagtatgatactagttgtgggtctttctatatgatttttattatgtttagattttccttctatattcagatttctgagggtttttatcatgaaggaatattgaattttatcaaatgctttttcagcattaatttaaatgatcatatggttcttgtcctacattctgttgatatgatgtattacattgattgattttgatttgtgtatgttgaaccacccttgcatctcagggataaatcccacttggccatgaggaattatctttttaatgtattatttaatttgattcgctagtatattgttgagactttagcatcaatgttcatcagggatatttayttgtagttttcctttttcaatgtgtctttgtctggttttggtatcagggtaataagattttcaagaataagcctgggccgggcctggtggctcacgcctgtaatcccagcactttgggaggctgagttcggtggatcacgaggtcaggagatcaagaccatcctggctaacacagtgaaaccccgtctctactaaaaatacaaaaatttagccgggcgtggtggtgggcgcctgtagtcccagctactcgggaggctgaggcaggagaatggcgtgaaccygggaggtggcgcttgcagtgagtggagagcatgccactgaactccagcctgggtgacagagtgagactctgcctcaaaaaaaaaaaaaaaaaaaaaaaagaatgagcctggaagtagtccctctttctctattttttcagaagagtttgagtaggattgrcatcagttctttaaatgtttggtagaattcagatctaaagccgtctgctcccaggcttttttttttttttttttttaaactgggagacattttattgcagaatttatctcattacctgtttttggtcttatcaggttttgggcttctttatggttcgatctttgtaggttgtatgtgtctaggaatttgtccatttgttttagagattccaatttattgatatatagttgttcatactagtcactaatatttctttgaatttctgttgtatcagttgtaatatctccattttcatctctgattttattaatttggatctttttttcttrgtctgcctaaacgtttgtcaatgttgtttaacttttcaagaaaacaagtttttgtttcattgatcttttgtattgttttcttcatttcaatttcatttatttctgctgtaatttttattatttgtgttctactaattttgggtttgggttacttttgtttttctagttctttaagatacacaattaggttgtttatttgaatttttcttcttttctsatgtaggcttttatagctgtaaatttccttcttagtattgtttttgctgtatttcatagattttggtatgttttgtttccactatcatttgtttctagcaattttccatttccttttaaatttatttgttgacctactggtcattcaggagcataytgtttcatttccatgtgtttatatagtttccaaaattattcttgttattgatttctagttttatcccattgtggccagagttgatgcttggcaatatttcagttttttggattgtttaagacttgttttgtgatctaacatatggtctatccttgagaaaaatccatgtgctgaggaaaagaatgtttattctgcaacttttgggtgaaatgttacgtaagtatctaataatcagtttgttccatagtgcagattaagtctgatgtttctttgttgattttctgtctggaggatctgtccaatgctgaaagtggaatgttgaagtctccatctattattgaattgaggcttttctctttgctttgctctaataatatttgctttatatatctgggtgctccagtgttgagtgcacatatatttacaattgctatatccttttggtgaattgacccttttatcgttatatggtgaccttctttatgtcctcatagtttttgtcttgaaaactattttgtctaatattagtataggtactctacttttttgttttgttttttttttttttttttggtttgcmttgacatggaatatctttttccatccctttattttctctctgtgcatgtctttataggcaaagtgtgtttcttagaggcaacagattgragttttttttttgttttgtttttccatttagccaaactatgtcttttgattggagagtttagtccattttcattcaacgttattactggtagtaaggtcttacttctgtcattttattatttcttttctggttatgttgtagtctgctattctttctttccttccttcctatttttcattagtgaaggttattttctctggtgatatgatatagtttcttgctttttattkttttgtgtatccattctatgctgttaggtttgagattaccatgaggcttgcaaatgctatcttctaacccatcatttcaagctaataaccacttagtactgtttacataagcaaacaaacaagcacaaaaacaaaacaaatgaggactctgcaccttaactccatcttctcaggttttaactttttgttttcactattaatatcttattgtactgtctatgtcttcaaagcctgttgtagctattttttaaaattatactttaagttctggggtacatgtgcagaacacgcagggttgttacataggtatacatgtgccatggtggtttgctgcacccatcaacccgtcatctacattaggtatttctcctaatgctatccctagctccccaccctccaaaaggcccaggtgtgtgatgttcccctccctgtgtctgtgtgttctcactgttcaattcccacttatgagtgataacatgtggtgtttggttttctgttcctgtgttagtttgctgagaatgctgatttccagcttcatccatgtccctgcaaaggacatgaactcatcatgaacagatgattatactgaggcacagagtagttataagatgaagtctcagagcatagctatgtgaagcagaaaatctggtttcctgtcttggcagtttgactccaaaatcctctcttagaaacaattatactttttaaatggaaaagaaataaaatccaagattggagactgattttaacatctattcctcttaatcctttaagtaatcaaaaataaattaaacggagaaaaatgaaaccaaatattcatatacaaagaactctagactcttcagtgagaaacatgtgtttttcaagtcacccaaaatagttacacaattgctgagtattttaattaaacaataaatatttaagtattaactgggctctagagaaaaacttagtcaaaggcctcagcatgagcgataagtttgataaatattgaaaatggtctgaaaagcccaagtggaaaagcagggctatttctacctggatgatgtccctgtaattaattttccattttggaaattagaggacagaaattccttctatccatgagggggtgagtatgtatgtatgtgtgtatgtttgtgaatgtgtttgtatgaatgagcttgtaaacaataagttatacaaaagtattagtagccaccaggatttaaggattattggcctttctgaggttcccaagaaaaccttaaatgcttttggtaggaaaagaygggattcattctacatattactggcgttgaaaatataaatctactttgktgatgatcctagttatgcccaagctccctttaccaggtaataaaaccaatgtgtcatctgtgtattgggttgttaaattgctgaacacaaattatggagagtttaaacaaggaaaaaattgcagaacatttaaaaaactcttcattggcatgctagtagatgagaattcaggttttacttcaacaacgatgtggaaaattttatcttacagcaaggacattgtgtttgaacaagagttaatttgagctgttttggaaattatcatattttccataaagagagcattgattacatccgttggcctattgagatgctttcctgtttgacattggtcacagaatttaaaaggaaaaacaacattactgcacacttaggaatcaggaatagaagtaaaagtcaggtaaagggaatctcgtcaggatatcaggcctgcctttaaaaaaattcagacatgataagtttactaccaatcattttttcaataacaacaataatatatttatattttcccatggacacctacattaagcttgtagactatttttatatttcaatatttttttctttgagtccttttaagagttgttcaacaatcctgaaatatcccttacagtatgctgttaactaattatattttttcaaagtcatttgacataatgattgattaaaggaartatctccagtataagtacacttgcttataacaaaagagtatttgaaattgacattacttattttggaaaggataygacacaatgggaattttcatacaccactcctagaattataaatctgtgacatcatttcggccgagtatggcattatctgattaagatgaaggatcacatcctaagacccagcatttatactcttatcagaatacatatacattcacatgcatatcactgagtttyaatagctaaagttgagaagtcctccaaatgtctatcagtcctccaaatgrataaacaaattgtggcatacttatacaatggaatactatacagtgatcaaaattaacaaasaagactgacatgtttacaacagaataatacaacagagaaaatgaacaaatttgagctacataaataataatacagatatgagaagaattatcaagatggaaaaatacatttagtataatctcatttacataaagtttgaaaaacattctttttaataattgtaatttattacattggtgataaaactctgtagtgaaacatatgagtgatcatcataacaactgggatagtcaagaaggaggaaaatgtcagcaagaagacatatattgggattatctggatggctggcaaattcttttttcttgccaatgtgtggtaacatccatgttaacgttacaattttttctctttctgtttctgttgtgttattactctctatgtgtatgttatgctccacaataaaaaatgttaaaaaagcagaaacataaagtatatttctaagtataaaattarggtgatacagcatattctcatagataccattgtaattagagtttttgctgaataaaggagaatagagcattatggtactaagaaatccaaattaaaatttaaaacttttctttttttattttgagacagcgtctcactctgttgcccaggctggagtgcacaagcgcaatcttggctcaatgcaacctccgccacctgggctcaagtgattctcccatctcagcctcctgaatatctaggacaacaggtgtgcaccaccacaccctgctgattttttctatttttttttagaggcaaggttttgccatgttgcccaggctgggcttgaactcttgtgctcaggcaatccacctccctcagcctttcaaaatgctgggattataggtgtgagccaccacacctgacctaaaacttttcttaaattaattttaaaaaaggagagataagcaagaactgtaaatccaccttcttaatgctaatatgaatttgaaacatcaaaatttgaatatttattattgatagacactttttatttccaatttgattatttatgatacacatttgaaagtgttagaaattcatgaatttccaataaattatactacgatggatattaaattaaataaatatatccaaaaatgtgtctctaaatgaaatatttatactcatatttttagcattttaatttcacaatactattcacatgtacacctgtaagttgggttaaatattttgttactataaattttttggctctacattagagaaaaataccatagaaaggcaaattttttaasgtataaaayatatttagcatgatctttgagtatgtttgtgcatatataattcwactttsactgctatagtaaaatgatccagatttagtcaccatagctaagaakgggaaaaagcatttgcaagaatttggcttgctaatgatgctattaaaagataaactaaagttgatatactgtattattgcatagactatttgtccatgttwgtrttcaaaaatgccaaaaaaaawcccaaaatagaatcctaattgttggaggtcgtgtttcttatcgaattttaaaatgtagtaaaagaaaaaaaagcaaataaatcgttgaaaatatgttggttttacattattcttgatgaaataccatgtgagggtacttgtctaggcctaatgctgagaatcatagaagaatcrtgaggccatgaggaagaatartagtgttctctcatcacgctgagctccagtacttagaaacaagcctgaaatcacactgatcaaatagcattctccctttcacctgccatcatcattatcatcatcgtctatatcttcatctatmtcatgaagtggtttgtttttgaaatatttaaatacataatttggaaaataagtaattttaaaaagatcatcattgtgggaaagttacaatagtaaacagcaaagttcaagtcaagctccaatacatttagatttagaaattaagtgtagtttattttacaatacattgcttatgcaaataattatttatggatgaccttcaatgaatcctcctttcactatgatcatgatagaaacaattyagattttcgtgtaaataaaattccttaataagaaagataaagcgartaacacattttttgagcacgcttttatttctaaagagcggattttaggaccaaactgtcaaacagaggtaagaccccagatcttctgtcacacttgagtgagtgatgatggagttagaaggttgtagttctataaccaaaactatattcatggataggattaaatggtggaattccatagaagcaccagattcagttttgtttccatgggacttaaagtctacttatgtcagatgtccttcattttttgataaactcgtaagtactgttttactatttgatctttcaatgattgttataaactaagaagttttgatttctgctaattaaaacagcatagggcgggcgcggtggctcacgcctgtaatcccagcacttcgggaggccgaggtgggtggatcacgaggtcaggagatggagaccatcctggcgaacacagtaaaaccctgtctctactaaaaatacaaaaaattagccaggcgtkgtggcrggctcctgtagtcccagctactccggaggctgaggcaggagaatggcgtgaacccgggggacagagyttgcagtgagccgagatcgcgccactgcactccagcctgggagacagcgacactccgtctcaaaaaacaaaacaaaacaaagcaaaaacagcgtaaaatttaaatcatggaatagagtggtggagctgtggttgagatgctctatttaattaattttaatgacattttgagatccagtgctgctcattgaatttgcctgtgaaaagagtttgtggtgatgacccagcaacagataagatactatccaaaaaaagctactgacatcaaatcaatttccagtttcttctaagttgcaggagaatgcctagatcttgcttttattctcttctttgaccaaagtattacaaaaagaaaaatatggttaccattttcatgtcaggtatactaaaagtttaaaaaaactctttttttaataacttggttttaggamtacytggtttagtttctccgttagaaaaatgatttatataaggagaacaaaagttcatttctacttctaaaacaataagacaaaaacaaaaagagtaatcaattttgagaatccaatagagttaaaaaccagttaaacataagaaagaattagtgaatttgaagataactacccagaatgaagataaagagacgaatagatagaaaatataaggctagagggtcagagacagtgaagctacaatcagaacaactaacatacttctgcagttcccgaaaattagaagagarcaaatggggcagaagcaatgtggagatttttccaaaagtgataaagtatatcagttcatatatttttagaaactatcagacttcagacacgataactaaaaccaaattaacataaaatgacaggacatcaaagaccaatagaaaacctgaaaagtaactagaggaaaagatagattatgttaaagggaataactgtctaaacgacaagctgattttcaacagacaaaaataaagctagagttcaatggattcatgtcttcagtgtatttcaaaagtagaatagatcttgataaacagaaacttaaaatacatcttttcagatagaagaaaaattattattaatattattattattatttttgttggtagagttggagtctcactctgttatccaggctggagttcagtggtaggatcatggcttactgcagtctggaactcctgggctcaaaccatcctcccacctcagccttgtgagtagcttcactatgcctgactaactttttcattcattgtagaggcagttttactgtgttgcacaggctggtcttgaactcctgggtgctcctgccccagccttacaaaatgttgggattatgggtgtgagctaccctgcctggccaataaakggtcttwttgaaaatattaagttgaatatgcaagaaggaatacaaattaatgaaagtggtaaatatgtgcataattctaaatgaatgtttagaaaataataatgtcttgttggggtaattatacaattgataagacatatgcaaatggcaaaaaatagaatggaggtaaaggtgacaggagtaagtttagttaaattattttctgaacttttctatgtctatgaggagattttgaacaatgataatataattctactcataggtatatatgcaaaggaattgtatcaaatgatatatgaaagaatgttctagtagaattattcataactgttcaaaaaagaaactggccaaatacatattaaggttggatgaatcattacagtaattccatgcaatggaacaatatagagaagtgaaaaaaaatcacatgtgcttgcaactatgtgactaaatttcagaaacataatgttgagttcaggaagccacaaacaagaggaacatgtaggattgcacctatacagcgttcaaagtaggctagaccaagcgatggagtttagggttgcatacctagttggtaaagtatgaagaaaattgaggaaataaccattataaattatggatattgcttatatcaggagatgcgaagaagggtttagggacttggaaagtggaatggaggtggacctagsctgttttmggtgttccttgtcttgccctgcatcatggttacttgagtgtttatgatacactgtggtatttcccatttttgtattggttcatttctaagtgcgcattataactttaatatacaaatttgtaattaggagaaatatctcatagaaattattattactcgtctcattatatactgaaggggaaatatcaattatttgtatacattcctatacaactctaagatagttgaaataggaactttcttatttagttgcaacatgaggaaatttgagatgatgttatctgccacccccagatctttccaaaggatttcttctagccttaattatcgacctcacaggacaaacctttgccattccccatctattttttctttcggctcctgaattcctgacacaacaaggttgtacatatttcccacactcttggtttaagagttcttttatcagttatgtttctctgcaggagaagacccttcaaaactacattagatatttatatctcacatgtcgtttgatgttggttttttgttttgttttgttttgttttgttttgttttgttttttgacagagtcttgctgtgtcgcccaggctggagtgcagtggcataatctcagttcactgcaacctccgcctcycgggttcatgccattctcctgcctcagcctcccgagtagctgggaatacaggtgcacaccaccatgccctgctaatttttgtatttttrgtagagatggggtttcaccatgttggccaggatggtctccatctcttgacctcgtaatctgccttcctcaacctcgcctgcgctgggcctggattttatttttctaagctgggtttggtggatggctgtggtgatttgagatgggccaaattctrcatcttggaggacgttagagttttgccaatttaatctggatcakgtggcagcaatctcacgtcwttagtttctcattcttcttctgggaacagtgtactagataggccatactcttatggtaaatggaaagaagaagaatccccagtatggaagccatctcaaatctctatgcaaactgtagtaattttctgtttatcaaagtaagtgaaatgattgaactccaagttcaggggcaaggtagtcagtcttcctgtgataggatactgcaggattatatatcaaagggtctggtactgaggaattcttataaaattgctaaatattttttataataatatttaaacattagacttgagagaaactttaccaagtcctaagaattagagataatgtttttgataaataaatatkattcatgggctgaaaaccctgagtgggaaaataggactaatttcatctgcacagcctcttggaaactcattttttattttggaaattacaagaaaataatttgttccattcataagtggtgtgcacatgtgtatatttgtgtgcatatttatgagtttgtgaataaygaagttatacgaaagtgttagcagcaaccagatcttatggagtagtggcctgcctgtggttctcaagaaaatctgagatgcctttgataaaagcagttaggattctgtgtatttaaatctgtgatttaaaaaagtccgcattggtgatgatcttagttatgaccaagctccctttgagaatttagatatttactatatgatatatatattgagttacaaaacttccctaacaactgaagtcactaaagataaatgatggagaggttacacaaggaaaaattgcaaacactgaaagtgaatatgtccctatttgcrtactagcaaatgaggattcaggtttcacgtcaatttcagtgtgaataattccagcctataacaagaacagacagtgaatgaatgagttaatttgagttgtttgaaaataagaatgttttccataaagagatcattgaactcatcagttaacatgccatggttatttctggcttgacactggtcacaacrattaaaagtaaaaagaatgtcacagcacattcacaaatcaggtgcatatagaatttaaggycaggatattcaagcaatcacacccagttatattacattgagagatgaagcgagctatactttctgaatcgagtggggacttggagaacgtttctgtagctagcaaggggattgtaaaatgcaccaaacagtgcactgtaaaaccacagcaatcagcgctctgtagctagcaagaggattgtaaaatgcaccaatcgctctaaaatacaccaagcaacaggatcctaaaagtagccaatggcagggaggattgaaaaaagggcactctgataggacaaaaaaaggaaaatgggaggggacaaataagggaataaaagctcatggcttcagccagcagcagcaacctgcctgggtcgccttcctcycggtggaagctttgtcctttctctcttctcaataaaccttgctgttgctcactctttgggtccatgccatctttaagagcagcaacactcaccgtgaaggtcggtggctccatttttgaagtcagggagaccacgaacccacctgcaggaaccaactccggacacaacaccagcattaaaacaatttttttttgtctgttcagacatgacaacttttatacccatcattttttccagtgtggtagtggttctatttgttattggaaattttgctaatggcttcatagcattggtaaattccattgagygggtcaagagacaaaagatctcttttgctgaccagattctcactgctctggcggtctccagagttggtttgctctgggtattattattaaattggtattcaactgtgtttaatccagctttttatagtgtagaagtaagaactactgcttataatgtctgggcagtaaccggccatttcagcaactggcttgctactagcctcagcatattttatttgctcaagattgccaatttctccaaccttatttttcttcacttaaagaggagagttaagagtgtcattctggtgatgctgttggggcctttactatttttggcytgtcaactttttgtgataaacatgaaagagattgtacggacaaaagaatatgaaggaaacwtgacttggaagatcaaattgaggagtgcagtgtacctttcagatgcgactgtaaccacgctaggaaacttagtgcccttcactctgaccctgctatgttttttgctgttaatctgttctctgtgtaaacatctcaagaagatgcagctccatggtaaaggatctsaagatcccagcaccaaggtccacataaaagytttgcaaactgtgatctttttcctcttgttatgtgccrtttactttctgtccataatgatatcagtttggagttttgggagtctggaaaacaaacctgtcttcatgttctgcaaagctattagattcagctatccttcaatccaccsattcatcctgatttggggaaacaagaagctaaagcagacttttctttcagttttgcggcaagtgaggtactgggtgaaaggagagaagccttcrtctccatagattcatgagaggggcattgtgtgtcttctagcagaaaacaaactggtggtgtatgaaacattttatatttcttactggtttttctatactgtatgtgtatgaataatttcccaacgtatacctagaaaagyctttgacctaatattagtctagaaaaaaawatatatatatgtgtgtgtgtgtttatgtgtgtatgaaaacttaagaacattgacaataacatgctcttttctgtttttttcatacaaactgccaaattatacaaaatatgacaaaaatttcttagaattttgaagccatgtatatttcattcatgtattttatatttcatttgtagaatttatgatgtctatttataattattaagaagtarcagyttatcccaggataaatattgctcttttctattgttatttgaaccacaggaatacaccacattgtgcttagaattcattgcttgaacctcgaatttattggatggtaaagtcattcaattctaaatcaataatgaggatgtatctttggtgttttattccattatgaatttctattttatgtttagtaaaaagcaatgagaattattgttagaaaagaatgcacacagtagaatttgagtgagaagcatatgcagagtaaatttaatgtatgtctaccataagcggtactgaggaatattagatttcatatgtgaatagcttaggaaaaaatcccttctctaataaagggatgaaatatcatgatcatgatctggattggtatcatcagttatgcatatgcagttagaaacgtcatttcttccgcttttgaattaaagaaaagctgtttttgaagttgagatctcatgcaaattattttagtattctttctaaagcacttttaagcccctgaattgctaattatatccttaccttccatttatgaaattccttctaaacttcagataagagaactcaaatcctctctttttgaaaaataaaatcaatgtaaatatartatakaaattgtggaaaatatttcagtcaaactttttgtaaatgttaaaawagtatctatgaaatctgtgtattaattatgagatgagccttaacgttgtaattttgtcatcaatgatgaaatgaaagggtgttgacatattctttaataggaagttctattataagaaagaaatgtacagtcytgttcacagctaaattctacttgactgtattaattcttggtgttatgaaatttaaacaatgtgatttaaaccttaagatgaatcatccccccacctgatttgtgtatttttttaatcatatatcttcctcagtacaatgtaaggactgtaaaaaaagagataatgtctgtcttgctttctgttgactcccaggaactcgaaaccagcaccaagaatagatkrysaaaaatratactttaatgaacaaataaatrggtggctaaaatggrtaagytgatgtggtwaaccagtgaaaaggaaactcacacaaaatctgcagttgcatgaattmccctgttccrgtctcaggttaagattacaggcttatccaagcagaatccttctcctaaggaaaagtttggctattccacaattttaggggaaatatgacaataatatagtcttgatgcagctgtatcaggtgtctgagttggagacaaggtagaacaccaaaattagatggcacctattataatrgtttgaaaaatcatataaacaactttggtctatttgaatatgtatttttttctattgtcaattatttgtattatgatattttctagttgattatttaaacaaaaatgacatttcatttcaaaaaattgagttagtaaccagctactttaccaaaatgtttttaatgtaatacctgttattgaagtgctaccatttatttagaagtcaagttcaagacaaaaatggcaaggacgtgtggaaattgagaccggaacaaatgtgaaacaatgtgtggtgatgtctggtatgaccctgatggcagccacttcacagtgaggtgagagagacagcatgatggtcatcagatgcatgtacttggcttccagcacttttccagaagggctacaaggggaaaccacagctggcattagtccatggaagagagagaggagggagaatgtatctgctcatctgtcattagtcttctatttcctattggtcagggtttccttgaggcagaactatcatctctgctgttctgtcttacatcatccagtcccttggtggtggtcatgaaagtcagacctcatgcccacagtgtggtgatgcattcaagtcccaaatagaaggatgayctggatcaggcaaggtrctrgccaggggaatwggacatagtgaagagaatctragaaagcacatgtttgtgtccagtaccrccactccttgtgccactgaggcgtgctcataccctccagtcatggctggctttatgagcatatgacgtccacagttgcatagggttttgtgcttatagggacttgtgyttagagggactctatgcttggattaatrttctgcacttgctrttttgtttktcasacagaggatacttstctgctgaagagagaatgktcttrcactaattccatagggatttgctctccystctccaacaggcttgtcagagacatgcacagagtcctataatgaccactaygtatgttctagcatctttgaatcctgctggatcatctggcwcagtggccagagcagcttggagcagagtctatatcttctgtagagccctcatttgttctggattccacttgagaccagcagcctgggaaacttcrttaatgagtcagagcaatattctcaaatgtggaatatgttgtctccaaaatcccaataggcccccaaaacattgtgtctcttttgtagtgataggaaatttatagagagagcaacatgccatatactgtaaaaaagattgtttcaacgtgtggtctagggacactgaatgctttaaaacatcacctatgctgtaggtccctgaatsttctcaggttgrtttcttttcttctggtattttacttccattcatcgttagagtattttactatagttaagaaacttgccacttcctgattattgtaccaagtaatatattattattattattgctattattttgagacagggtctcattctgtccctgaggctggagttcagtggcaggatcacagctcattacagcctcaaccttctgggctcaagtrattcycccacctcygcattgctagcagctgggactgcaggggcacaacatcacgcctggctaatttttgtattttctgtagggctaggatttcacagtgttacccaggctggtctcaaaatcctgggctcaaatgatcttcccgtgtcggcctcctaaaatgatgggattacagtcatgtgccacagggcctggtctgtaatattattaatatattaaataatcacgatgttttaaaaaatgtaaattaaacagaagtgacatagccgtgatataaaacagtgacacagtgttattattatgatacaaggcaaattgttttgatttttcctcataatggktgtagattaagaaccattcagcaaatcacaagcccagtaaaaagtaccagaagctctgctctgcttagtgaagacagcacatcctggaaagcatttgtgagtgttgatttaagtttctggtagtctgyattcattctataacccgtctggttttgatagagkccagataggtttagtgaatcggcttatagaaaggactaccatcccctgtaactttcaagtgttttgtcacggcactgaccagttccattccttagggaatgcggttattatattttatatattttgttgccagtagaggagaatttcagaggcttccctttggtcctgctataataatgtcctttactctacagttcacgaagaatgtgagtcctgccggctgccatacatatctatttcaattatactttcaggaagaggtagtaactacaaactgattagctccaccttggaatggasatgagccgaagctctaggtagtatctgaccttcaaaaactccccctgcaggctggatgtgatggctcatgcctgcagtcctagcactttgggaggcgaaggtgggaggatcccttgagagcaggagttcccttcacaacatgtggaaactccgtctgtacaaaaaatttaaaaaattagctggtgtgttggtgcatgcctatagttccaaatacttgggaagctgaggcaggaggattgcttgagcgcaggagttccaggctgcagtggactatgatcctgccactgtactccagcttgggtaacagagggagactgtgtctcagaagaagaaaaaaaaacaagtataagttctcaccggtatcttaaacatcaagtaaaacagtatcgagtaaaacaaaaaactaaaaactccaaaagtcaaaaacacttttaaaaagaacatggtgttaagagtagtttgttcagtttccccatagaaaatgatttatggaaggagaataaaagattattctgaacactaaaacaataagactgaaaaaatgaattatcaatattgagaatccaatagacagagttaaccagttggatacagtacaagagagaataagtgaattggaagatagctacacagaatgaagcatagaagggaagagatggaaatacacagagctagagggtaacacattgatgctacagacagaacacctaacatacttctggagttctgtaagattagaggagagaaaatagagcaagagaaatgttgcaaggatttttccaaaaggtataaaatgtatccctgaatatatttttagtaatctcaaacttcaggcatgataactaaaaccaaattaacataaaataatacaggacrcaaaagaccaatagaaaatctgaaaagtagctagaggtagaagatagagyatgttgaaaagaactgtattctaaatacaacctgattttaacagaaaacatggaagcaggaattcaatggattaatgggaatcatgtcttcaatgtgtttccaaagagtagtagaccttcataaacagaaattgaaaatgatatttttcagataaaataaaattactgaaaatacaaagttgaacacgcaaggagcattacaaattaatgacaatccatgctggctaacacggtgaaaccccgtctctactaaaaataaaaaawaattagcctggcstggtggcgggcacctgcagtcccagctactccggaggctgaggcaggagaatggctaaacccggaagrcggagctttcagtgagcagagatcgtgccactgcactccagcctgggtgacagggagactatgtctcaaaaaaaaaaaaaaaaattaatgacaatgaaaactaagtgtgtaattctaaataaatkttgactatataaaacaatagtgtcttcktggattgaatgtataattgataagatatatgcaaatagcaataaagaggctggagataaaggtaacaggaataaatttagtcaaactgtgttttgggcttttctatgtctgtgagaagaatttgaacatcataatcaaggaccctgtaattctacamccagatatatatacacagaggaattgtagcaaatgatatgtgaaagaatgttcattgtagcattattcataaaagctcaaaaaataagctgtccaaatatatatcaaataaggatggataaataattacagtaaaatcaaaaaatgaaaaaaatatagagaagtgaaaagawatggatcacatgtacatgcaatgatggggttaaattttggatacaaaatgttgattccaggaagccatgaataagaacatataggattgcacctatacatagatcaaatcaggccaaaccaagctattgagtttagggtcgaataccttattggtaaagtataaagaatattaaaaaaagaccatcataaattagggatgttgcttatcacaggagacatgaagaaaggtgtagggaattagaaagtggcattgaggtaaacttaggctcttagcaatgttccatgtcttgccctacatgatggttacatgagtgtttatgacacattgctatgttttccatttttgttttggttcatttctaagtgtgcagtctagctatatgataaaaattattaattagsagaaatggtccatgaaaattattattactctgctcattatatactgaagggaaaaatcmactatttgtatacattcatgtgtaactctaagagattttaagtagaaactttctgattttagttgcaactttaggaaacttgacatgatgttacctgccaaccacagatttctgaataggtttttcttttaggtttaattacccacttcatatgacaaaacttggacattctctattttttccttcgatcctgaattcctgacacaacaatggtgggcatatttcccacactcctgatttagcagaatacctacatcacttatgtttttctgcaagagaaaactgagttagataattgtgtatcattatgtctttggattacatttttctaacctaggtttggtggatggctctggtgattggagatgggccacgtactgcatcttgccgctagtttggctgatttagggtagataaggcagtggcattctgactccattagtttctctttcttcttctgggaacagtgtgctagccagatgatgtcctcatggttagtggaaaagagcaggaaacttcaatatggaagccatcttaaatctctgtaaattctactaatttcctgttgactgaagcaaattacgtgagtgaattcagagtccaaggtcaaggtagtcaccctgcctgaggtgggagggtactgcaggattatgtgacaaagagtagggtacttagaaatatttacaaaattgctgaacattttaattaaataattaatgtttaaacaaaacagacttgagtgtaaatataccaaaggcctaagcttgagaaacatgtttgataaatattattcattgtctgacagccctgagttggaaaataagactaataccacctggatgagttcctggaaactcattttccatttggggaattataagaaaataattccttccatgccctaagggtgtgagtgcatgtgtgtctatgtgtttaggagcttattaacaatgatgtcatatcaatttattggttatcagaaaccagattttaaagtgtatcagcctcccagggatttccaagataatcttggatgattttgataaaaggtttagaatctggtatttaaatctggcataaaaataagtccatattggtatgatcctagttatgaccaagctcctttaacaatttagacatttactatatgatatatgtattgggttttacaatttccctatggaacaactgaagatgctgtatacaaattatggagaggttaaacaaggaaaaaaattgcaaaacaatgaaaaataatatgcctttctttgcatactaacacatgagaattcattttccactkcaacctcagtataaaaaagtacagcatatagcaaggagagaatstatatgaagaggagtgaatttgagctgttttgagaataatgaccttttctatttctataaagacagttttgaattcatctattagcatatgctggtgcttgcctgttgacactagtcactgaatttaaaggcagaaaatgttattgcacatttagtaatcaagtgttcatcgaagttaacatctggatgttaaaggactcagaacaagtgttactaagcctgcatttttttatctgttcaaacatgatgtgttttctgctcatcatttcatcaattctggtagtgtttgcatttgttcttggaaatgttgccaatggcttcatagcyctagtaaatgtcattgactgggttaacacacgaaagatctcctcagctgagcaaattctcactgctctggtggtctccagaattggtttactctgggtcatgttattcctttggtatgcaactgtgtttaattctgctttatatggtttagaagtaagaattgttgcttctaatgcctgggctgtaacgaaccatttcagcatgtggcttgctgctagcctcagcatattttrtttgctcaagattgccaatttctccaaccttatttctctccacctaaagaagagaattmagagtgttgttctggtgatactgttggggcccttggtatttytgatttgtaatcttgctgtgataaccatggatgagagagtgtggacaaaagaatatgaaggaaatgtgacttggaagatcaaattgaggaatgcaatacacctttcaagcttgactgtaactactctagcaaacctcataccctttactctgagcctaatatgttttctgctgttaatctgttctctttgtaaacatctcaagaagatgcggctccatagcaaaggatctcaagatcccagcaccaaggtccatataaaagctttgcaaactgtgacctccttcctcatgttatttgccatttactttctgtgtataatcacatcaacttggaatcttaggacacagcagagcaaacttgtactcctgctttgccaaactgttgcaatcatgtatccttcattccactcattcatcctgattatgggaagtaggaagctaaaacagacctttctttcagttttgtggcagatgacaygctgagtgaaagaagagaaaccctcaactccatagattcacaaggggagcatcgtgggtcttctagcagaaaacaaactgatggtgtctggaacattttatatttctatcagtttttccatagtgtttgtatgtgagtaatttcaaaacagatacctagaaaagtcatatatatatttatgggtgtatatgtgtgcatgtgtgtgaataacaacgttgaccataaattatgaagctgagtatatttcacatatatagtatttatattttattatagttcattgtatagtatttcatttgaagaatttattatctctctttataattaagaacgtacagcttttatgaagaaatcatttctcttttccattgtaatttgtaccacatatatgtgcttaactatcattggtgaacctctaattttttggatggtaaagacattcaattttaaatcaatgataagaatggatctttggggtaggttttatttcattatgaattcttattttatgcttagtagaaagcaaatagaattgttgttagttaatgatgcacacaataaaattggagtgaaaaacatatgtagagtaaattttgtatatgtataccaaaacagtactaaagaatactagatttaataccagtatgtgaatagcctagaataaaaatcatttctataataggaatgaagaaacatgctgatgatcatttcagtgctgttataatttttttatctgtagttagaaaagtcattgcttccactttttgaattaaaggaaaccttttktgaagttgacatctgatgtcaagtatttccatttrtttttcttagccaccttgagcccctgaatttccaattttctcctttgtctcccattcctaatattcctcaaaaaaactcaaatattctctatcttaaaaaaacaggccaatcaaaggagggtatagaaactatagaagataatcaaatgaaactttcctcaaatgttaaaaattatgtaaaaattacataaaaatctgtgaaatctatataattgataggaaatgtattaatgatatgtattattataatggtgtaaatggtgaaattacacagtgtgttgatgtatccattgataccaagttctattataagaaggaaatgtacagccttgttgaagagctaaattctgtgtgactgtgttaattcttggtgttatgaaattttaacattattatgtagaacttaaaataagttaactccacatcatatatatatctatgtatctatatctatatctatagacatatatayatatatatatatawctmtygcttatcatacgtcctccctagtacaatgtaatcaccataaaaagagaggtcatatctgtctcgctttctcttgactcacaggacctaaaagccagcacaaagaatagttggtcaaaaatgatatgttaatgaacacataagtgattggataaatggataatttgatgtggtaaatcagtgaaaatgaagctcatcataaaatctgcagttgcttgaattttctattttcaggttgaggttataggctttttgaagaagaagcatttctcagagcaaaagtttggctagtccacaattctaggggaaatatcactgtaatatagctttgatgcagctatatcaggtgtgtgaagtagagacaaggtggaacgtcaaaattagatggcacttattctaatgctttttgaaaagcatattaaagattttggtatatttgcacagggtcagggtcacctgtgagtgccagctgctcggggctagcagaccccatgacaagaatgttagggaacttcccagcagctkccaaacacacttttgtttttagggaacgtctctttctccttcagtatgacttatgctgccttcaatgctttgctgatacaaaagaagtaaactcaaaagaagtaaaaataaaagctagcaaactttgcaactgattaagttggttggaaatgtacctaatcactttctactatgaatgatatatttgtattatgatattttctagctggttatcatatacacaaaaaggcatttcatttttaaaaattgagtttgtaaccagtcacctttcttacacattatttgtatatttttttagtatcctttctaaatgaatgttttaattgccatgttayaaacrcatggaaaagtgatgcaactgaatgtatatcttagctttkggtgtctaaaactagagccaatgtctgagtttacagtgatgacatttatttgggarggcaagtccagggcagcaatgaggggtaaatgtggaaactgaggcaaaagaagatgtaaaaccatgtgtcgtgatgttgatatgattttgctggtggccacttcacaattagtgagacagacagcatggtggtcatcagatgcatgcacttggctcyccatacttttccagaagggttacaaggggaagccacaacaaatattagtccgtggaagagagaaaagggagaatgtatcctagctgtcttctgtcttctatttccctttggccaaagtttgtttgaggcagaactaccatctttgcttttcttccttacattatccaaccccttggtggctgtttgggaaagtcacactaaccaatacccccatttttctaagagatagtttttttttaatttattttttctcttttcctctcccctttccctatgtttcccygctttctacttaactttttagacatgcacatagaactgtttactttccccccaccagacagtcccttcgggcgagttcatctaactatgtgctccacgagggatctctccttgagacttgacagttgatttgcagacaaaagtatgccctcatggaactctcacctccaggggttccccttagacctcacatccattaggaggggatgtggaaaggatgcccacgtggccacttttacaactgctgtcctgctcatttccttccctactttataaaacgttcactttctgctccaaagatgaagtgtcacgttggaaggcaggatgctttgtgccccttccagcaagctaacttccaaataaattctctatttttatatcagaccttgttcttgttaattagactttacatgaagtgagcaactaagcttttctgttacaagacttcatgcccacagatacattcaagtcccaggtggaaggatgatctrgatyaggcaaggtgctgaccatgggaacaggagacagtcaagggaatctgaggaagcacatgtttgtgtccaatatagtcccctccttgtgccactcagatgtgctcatgccctccaactgtggctggttttataagcagatgccttgtgtagttgcacggggtcttgtgcttgaggggctttttgcttggattaatgttctgcacttgcatttttatttttcagacagcggatamtcctccactgaagagggaatagttctgcagtaattccctaggggtttgctttctcctctcctacgggcttgatggagacaggcacagagtcctrtgatgcccacgttgcatgcctctagcagctttgaattctgctggatcatctggcacaatgggccgagcaggttgggccagaccctgtatctgctgtagagatattatatgttctggattccacttgaaaccaggagtctttgcattcattctgtaacccatctggttttggcagaggctaggtaggttaactgaacagggatttaaaaaggactttattaacacatcagagcaatatcctctactgtggtatttttggactccaaaatccctagaggctcaataaacgccgtgcttctcttttagtgataggaagtatataggaagccatttaccttaaacaggatgtttctgctcggcatggtggttcacgcctgtaataccagcactttgggagaccaacgcaggcagatcactggaggccaggagtttgagactagcctgagcaacatggtgaaaccccatctctacttaaaaaaaaatacaaaaaaakttagccaggcatggtggccaatgcccgtaaacccagctactcaggaggctgaaggatttgaattgattgaacccaggaggcgaagtttgcagtgagccrggattgcaacactgcattccggcctgggcaacagagcgagactctatctcaaatataaatwaatwaattaattaattgatttttcaacatgtggaccaggaatatgggayccctgaaaacaatatctgcgttggtgttctctaaatattttcaggcatgtctctttcttctgatattttatttctatttaatgtttaagtattttactataattaggtaactttccatttcctggttattgtaccaattaccgtaacrttattaatatattaaattaacatgatgttttccaaaatgtaaattaaactgagagcagaagtgacaaagccctgacataaaacagtgaagcagtgctcttgtttttaccacacaaaggccaattgttttaatctgctgacccacccatgggtgtaaaataagaaacattcactaaatcaagagccacatgcaaactgccaggagctctgctctgctcagggaagataccacatcctagagagcatttgtaagtagtgatttaaatttatggaaatctgcattcattttatagtgtatctggttttggtagaggccagataggttaagtggataggcatataaaaagactaccatcccctgcaactttcaagtgttttgtcatggtagtgatcaattccattccttggagaatgtgattattatttttcaatcattgttgccagtggaggagaatttcacaggcttccccttggttctgctctaataatgtccctgactctacaggtcaggaagaaagtgagagtcctgccagctgccatgtgtgtccattacacattcaagaagaggcaataacggcaaactgattagatccaccttggkatggacatgagtcaaaactctaggtagcatctgaccttcaaaactccctctgcaggctgggtatgatggctcatgcccgcagtccccgcacttttggaggcggaggtggraatatctcttgaggcccagagttgcagaccaccttgggctacacagtgacagcctgtctgtacaaaaactaaaaaacagaaaaaacaacaacaaaaaattagtttggcatggtggtactcacctgtagtcccagttacccagaaagatgagacaggagactcctttggacctataaccaatatgcgagtccgttgctggccgcatgcagtgtccagttaacaaaagtgaggtctggtacaaaagtaatgaatttattccaaacctagcttggggaaggagcacaaagtgtcttgcctttaagtgtaccacttcacctttggagcagaaagcagacacttttataaggtaaggagggatactgagcaagggtagagggtcctcatgcaggcttggtgccttatctatcagacagttgaattggtgccttcctgtgcagaagtaacttgtaaaagtggccaagtgggtatgctttcaatatgcccttctgttgggtgaaagtcctcaggcaactcccagagtggagcacagtctggaagttccaagtccatttcctggaggtaaacattccttggtgggtgtgctttggtctgcaaattgactgtcaattctcagaagagatctgtcttgctgcacatagttagaagaacgtgccctgcagggaatgtctagtgagtgggggtgaaaggttatatttgcatttatgaagggctaagcaggaaacagggaacaaaaggaaaggggagataagagaaaataataataaaaaaatagtaactcattccctgtttcttagaaaaaatggggcactctgttacaaacccaggaattcaaggctgtagtgagttatgatttgccactgtactacatacctcctaagtgaaggattgagactgtgtatctaaaaaacccaaatgcaaataacacacacacaaaaagaaaattttaaaaaatctcccacttcatctcatggactgcagtgtcttttgagtacccagatattactgttagttcaggctctgttggagtggccaatatctggtttactggaggcaatttggtacgagtctgcagcaacttcaagtctaacctcctcagaagaaagaattcaactgaggggcataaggcggaaaaagagactgagggaagtttctgagcagcaatggaagtttattaaaaagatttagagcaggaaagaaaggaaagtacacttggaagagaccacagtgggcattttggaggtcaagtgcagtgttagacctttgacttgtggttttatatgttggtatacttctggggtcttgtgttccttttcccacgattcttcccttagggtcttgtgttccttttcccatgattcagccccttagggtgggctgctcacatgtgtggtggcctgctaacactttggaggtgagcatgygcagtgtgtttactggagttgtacacatgcttgcatgaggcattcttcccttttttggtggaatgcccccagaaggttgttttctaccsttttctctcttaacacgtatgcctcagcctactcgccctmttcctgagctgctgactagcaattttaagcatctttacttattgtgaaattgcctctccctggtgcctgtgagcaattatcatttttagagaggcagtgtgacaactgccaggccatcacctgatggccacctgacattcctggtgggtggtgagagccttcttctgccccgctcatgcctgactaactatctactgtaagagccctatacctaaaagtctcagatggtgtggatgtgtgtcctttcctctgggtactgttatctgggaaatggctacaggtctttgagaaagcaccgtatgaatacgtcctgaatattcttgtggtgaattttcagcatccttttcaaggggacttacactttccttcaattattgaattcttgttctcggaattggctcagtcctkacaacaggttgaggttctttgattttccacttcaaaggctgacctcaggaatcagtttttcagcctttgaagtgaaaaggcttgctcttggtttataagtatttttcaaagtatgaagcctctttaactattggcttatgaactcattccaagaagctgatgctgtcatcagttcattgattctgacatttgcaagatcaccagagagtctatgttcccaaggttagtcatcatgttgcatgctctattagctgcatygaacttagtttatttagatttcaggatgctgccctctcctgattttatccttatccactgggcactacttctcaatctcctttgctagttctcttttgtctctaaactgaaaatatcagactgcccaaggtctcaattcttcaatctctacaatgatgcctgttgtgttggtgatctcatgtaatctctttactgacaatgtagccaagtgattcaacagacaggaataaggmtgattatccatttatattatttatttattcacgcatgttggcatatagcacattatgtaaatatttttccttcaaatgtcaaatgtacattttgaagtaacagtaccagggtggatgctgtggcttaagcctgtaattgagcaccttgggaggcttrggcrggcagatttcttgagcccaattattggagaccaacctrggaaacatggtgaaacccagtctctagtaaaaatacaacaattagccaggtatagtggtgtccacctgtagtyctagctacttgggaggccaaggtgggaaacagattgaggctgggagctatagattgcagttagccaatctcaaaccactgcactccagtttaggctccagagtgagaccatgtctcaaaaaataaaaatctagggagaatcaataatatttttgcttgaatttccactaaatgagattgagggtagcccagcatctaatttagttttatttaaaatagtaattttaatatcaatagattgataggcaggggattattattattatagacataatgatctaagtagagaaatacacagatagaattatggttgattaacccacttgtattacttgcaattgtacagttagtatgttttagtatcttagttactaatctcactttttacatttagctctataatcaattaaatatgagttattttttgtgtatggtgtgaaataagaatagaaatttatctttatgcatgtggatattcartgttctcrgtatcatttgttgaaaaaatgattaattcctattgaactgcartggtaccatttttgaaatcaattaccatcaatgtcagtgttaatttctggactctcagttgtgtttcattgttcttttgtctactgtaatgccagtaccacagaatyctgattagtgcagctttgtagttagctttgaaaccagaaagtgtaatcctccaaatgtgttattttatcaagatttattttggtgatctggtcactgggtattttcagatatattttaggactggtttttcactttttgcaaaacaggcttgttgggatttgatagggattgcactgagtatrtaagttgacccttcacctgcaaagactctccttgtgctggatttcagttcagctggccctccttgcttgtacaactctgtgatgaattgaatatataattttkgccttttattactcttatcctagttgttgcagaaggatatcttgcctttctgaaccttctgtattctgctcaaaaatggaagttctcagctagrtgcagttcacgcctgtatccaagcattttgggagaccaaggtgggaagatcrtatgagcccatgttttcaagaccatactgggcaacatagggagaccccatttctacaaaaaaactgaaaaattagctggctgtgttggtgcacrcccatagtcacagctactccagaagctgaggtgggaggatctcttgagcccaggagtacaaagctgwagtgaactaccactgcactccagcctaggcgacagagcaacatcctttctcaaaacaaaaaaggaaaagtggaagttttcactggtatcttttaagtatcaagtaacacagaatcraaagaataactaataatcctcggttcctgcctgcactgaacatgtaaaattgaaagcagttatacatatactatactagcacctcataaggactacccagagtattattatcatctgcgttttatacataattatactgaggtagagagaattcgtaaaatggagtctcagatcatagctatataaagcagaaaatctggcttcctgtcctggcagactgactccaagatcttctcctagaaacaattatactataacaactggaaagaaataatatccaatattgaagaccgatttttaacatctattcatcttaaaccattaaataataaaaaatacattagagaraaataaaagtgaaaattyacatacagagaagtgtaggctcttcaatggaatacacatgttttttaagtgcccaaggaatatttacaaaattgctaaatattttrattaaacaattcatatttaaatattaactagactcaagaaaatgacttactcaaaagcctaagcatgagacacaagtttataaatattgaaaatgggctgaaaacatgattgggaaattagggctatttcaacktggatgacctrcctgaaattcattttccattttggaaattacaggacamtaattcctcccatccatgaggagcatgtatgtgtgtgggcacataagtttgtgttaatgagcttgttaagaataaagttatacaaaagtattagttagcagcaaccagattttaaggaatgttggccttcctgggcttcccaagaaaaccttgragtcttttaataagaaaactttggattctgtctacataaatctgacattgaaaaaataaattcacagtggtcatgattctggttatgaccaagttccatatgacagtttagacatccaatgtaggaattaygwgttgggttttaaaatttccataacaactgacattgctgaacacaaattatggagaggttaaacaaggaaaaatattgcaaaacaatgaaggaraatatgtctgtatttgcatgctagcaaatgagaattcacctttcacttcaacaacagcatgaaaaatttcatcttatagccaggacatagtgtttgaatagaaatttaattgagctgttttgggaattattgtgttctccataaagacagcctcaractcatccattagcacaccctggtgctttcctgtttgacactggtcagagaaygtaaaaggaaaaagaacattactgcacattcagaaatcaggtgcacatagaatttaaggtcaggaccttacagagaatcttgtccagtgataatasgcctgccttaaaaaaattcagacatggtaggtttattaccaatctttttttgtgctagtaatggtagaatttattttttcctgtggacacctacgttaaacttatagactacttttacattttaacatttttttcctttgagttcttttaggagttgttaaacaatcctgaaatttcccttacaatatgctacaaactaatcataatttctcaaattcatttgacataatgattgattaaagaaatatgtgtagtataattacacctgctcataacaagagtatttgaaacttcaagaaaaaatagagaaattaataaagaaatatgaataaatatatggaatatataattcattcttaataaatgtgcatgaaatcagtcatgtaattaaaaagcaacataattttttgaactaaaaatacattctgaattataatagaaaaatgtttctaaaatgttaactttaataatagtgtatgtaaatatcagtgtaaaatttaatctgatgttactaattttggaaaggatatgacacaatagaaattttcatacactactcttaggattataaagtacaattactttggctgaatatggcattacctgattaaggcgaagtattttttattgtaccacactttagaatgtggtaaaatraaacaatatcaagtaaatcattgggaatrtgttggttttaagttattcttgatgaaatattacctgagggtgtttgtctagrcctgatactgagaataatataagaattataaggccatgaagaaaarttaaaatagtgttctcccatygccctgaattccagcacttaggaaacatgattgaagtcacatttacagaataaaatagtcccttttagctgacatcaacatcatcatcaatcatctacacctatctcattaaatgatttatttttcattgtacatgattttgataatgtctaagacatttttaaaagattatcattttgggaaatttgcattagtaaaagyaaagytcaagtcaagctgaatacatttagatttagaaattaagtgaagtttagtttaaaatgcattgcttaagcaagtaattgtagatgaccttaaactaatccattgaakgctataagaaagagtttgattttagtgtaaataaaattccttaattagaaaggcaattaaactgtttcatgatcaagctcttattcctaaagagaggattttagattaaataaatcaaacagaagtaagccctcacatcttctctrtctcgcttgggtaatgatggagttcaaagtcacagagccccatttctacaacataaacaaagtaaaaattagttcataaaatagaatgatktagttgtggtttagggactattttttatttattggaattgcattttgagatccaaagctgcttattgaatttccatatgaggagagtttgtgtgaggacccagcaacagacaagctgttttccagaaaaagctactcacatcaaattaatatccrgtttctttaaaattgcaggaacatggctagaccaagcttttattctattatctgaccagagttgggaatagaagaaaattgttactattttcatggctagagtactaacaactccagaaaaatacaaggctggagggtragagacaytgacgctayggtcagaatatctaacatacttctggagttctggaggattagagatgagaaatggggcaaaagcaatgtttgggaaatttttccaaaaatgatgaaatgtatatatttccatctctatatatttaggagccatcaaattttggacaagataactaaaaaatttaaaataaaatgacacaggayatcaaagaccaatagaaaatctgaaaagtagctagaggtgaaaggtagattatgttaaaaagagccacattctaaataacaaactgattttcaacagaaaatatgaaagcgggaattcaatggaatcatatcttcagtgtgtttccaaggaacagtagacttttatagacagaaattaaaaatgatattttttcagataaaatataaactaccaaaaatacaaaattgagcatgcaagaaggaataaaaattaatgaaaatgataaatatgtacataattataagtgaatgtttaccatctaaaataatagtatcttcttgttggactaaaggtgtaattgataagatatatgcaaatagtaataaagagactggagttacagaaataaatttagttaaagtattttttggacttttctatgtctgtgggcagaatttgtacatcttaatcaaggaccctataattctatacctaggcatatatgcaaaggaattgtagcaaatgtatatgaaagaatgctcatagtagcattattcataatagttcataaaagaagctgtcyaartatatatcaactaaggatagataattatagtaaattcayaaaattaaacaatatagagaaatgaaaagaaataaatcacatgtacatgcatctgtctgattaaatttcagattcataatgttaagtccaggaagccatgaataagaacatataggattgcacctatacacagttcaaagcaggccaaaccaagctattgagtttagggttgcataccttgttgataaagtataaagaaaatcaaggaaatgatcatcacaaataatggatattgcttacctcaggagatatgaagaaaggtatagaggcttggaaagtgtcatggaggtggaactaggctgtttgcagtgttccttgtcttgccctacatgatggttactcgactgtttatgatacattgctctatttcccagttttccagttttgttttggcacatttctatgtatgcattataattttaatataaaaattttgaattaggagaaatgtctcatagaaattattaatcttctcattacgtactaaggggaaaagaaactayttatatgcattcttatacaactctagagagttgaagtagaaactttcttattttagttacaacttgtagaaatttgacatcatgtcacctgccaaccccrtatttttccgtagctttatttcagtttttttctttcagctttaattatgcacctcacatgacaaaactttgatattcctcatctatttttcccttggcttcaggattcttgacacaacaagggtagacatatttcccactctcttggcttagcaaagtatttctatcatttagcatcattttaaaaagaaacttctccaaaactacattagatatttatatctcacatgtctttagattccattttcctaagctgggtttgggtggatcactctggtaatwtgagatgggccatgttctgcatcttgaagttagagtttggccaatttaggctacatctggagggggkgatctcattctcattctgcttctgggaatggtgtactagtgtggggatgtgcttgtggtaaatggagaagagcaagaaactccaatgtggaagccatctcaaagacgtatacaaaatttactaatttccagttcatcaaagcaaattacatgagtgagctcagattccaaggtcaaggtagtcaccctgcctatggcaggaggacactgcaagataatatatcaaaggatgagggagtcaagagtatttacaaaacagctgaatagtttaattaaataattaatatttaaacattaaatagacttgagagtaactttaccaaaggcctaagcatgagaaatatgtttgataaatattattctggtctgaaaaccctgagtgggaaaacagaactaattccacctggatgaccttctggaaactcattttttcatttttttaaattaaaagaaaataattccttccaaccccaatgggtttaagtgtgtgtttttgtgtttatgagcttgttaacaataaagtcatataaaagtattggttagcagcaacctgattttaaggcgtattggccttcttgtggttcccaagaaaaccttggatgattttgataaaaggtttgggttctgtatatttaaatctagcattaaaaaataaatccatatttatacgatcctaggtatgaccaagctcttttaacartttagacatttactgtatgacatatgtattgggttttaaaatttccctatgaaacaactgaaaatgctgaatacaaattatggagaggttaaacaaggaaaaacattgcaaaacaatgaaaaagaatatgtctttttttgcatactagcaaacgggaattcrcctttcacttcaacatcasttttaaaaatttcagcgtatagcaagaacagacagtggaataggattcaatttcagctattttgggaataagaaaattttccataaatgcagcattgaactcatccattagcatatgctggtgcttttctgttgacattagtcaaataatttagaagcacaaagaatattattacacatttaggaatgaagtgtatatccaatttaaggtctagatattaaaggaatcacaatctgtgttattaggcctgcatttttcctttctttttgtctcttcagacatgttaaaatttctacttatcattttgtcaactctgtgtgtttgcattcgttcttggaaatttgtctccacaaaaatgttaaaattagcaggcttgstggtgcatgcctgtagttccagttacttggcaagctgaggcaggaaggcaagagtatcacttgtgtccaggagttcaagactacrgcgaggtatgattgtgccactgcactccagcttgggtgagagagcaagagcctgtctcagaaaaaaaaaaaaaaaaaaagaaaaggagaaaagaaatggaagttttcactggcaccttctaaatatctagtaacacaggatcaaatcagtaactaaccatctttgttttttcctgtcccagacaggtaaaatggaaagcagttatacaaatgctatactaactcctcacaaagactacccaaagataatattatcatctgtgttttttggtgatcatactgaggcagagagcagttgtgaaatggagtctcagaatcgtcgstatatgaagcagaaaaactggtttcctctcttggcagtctgactccaagatctcttagaaacaattatactgtaaaaacctgaaaaagaagtaaaaaacaagattggagactaatactaacatctattcttcttaatagcataatcaaaaataaattaaacagaaaaataaaagtgaatattcataccaagggaagtctagagtcttcagtggaaaatacatattttttaataagtgcccaaggaatattttaaaaattgctgaatattttaattaaacaattcatatttaaatattagctagattcgagagaataacttattcaaaagcttaagcaygagagataagtttataaatattgaaaattgactgaaaagggtgagagggaaaatagggctatttcaacctggacgacttgcctgaaattgrttttccattttggaaattacagcacaataattcctcccatccatgaggggcgtgtatgcatgtgtgtgtttgtgttaatgagcttgttaacaatagacttatacaaacatattagcagcaagcagattttaaagagtattggcctttttgcactttccaagaaaaccttggattcttttgataagaaaactttggattctgtttacataaatctgacatttaaaaaatcaatccacagtggtcatgattctagttacaacaaagttccttttaacaatttagatatccaatgtaggaactatgtgttgctttttaaaatttccctaacaactgacattgctgaacacaaattatggagaggttaaacaaggaaaagtactacaaaacaaggaaacagaatatgtctttatttgcatgctagcaaatgagaactcatttttcacttcaacatcagtatgaaaaatttcatcttatagccaggacatagtgtttgaatagaagttaatttgaactgttttagaaattatcatgttttccataaagacagcattgaattcattcattagcatgccctggtgctttcctgtttgacactggtcagagaatttaaaaagaacaagagcgttaatgcacattcagaaatcaggtgcacatagaatttaatgtcaggaccttaaagggaatcttatccaatgatattaggcctgccttaaaaagaattcagacatgatatgttgataccaatcatgttttccatactggtaatggtagaatttgtgttttaccatggacagctattattaaacttatagactatttttatattttaatattttttctttgtttccttttaggagttgttaaacaatcctgaaatttcccctacaatatgccatgaactaatcatattttctcaaagtcatttgacgtaatgattgattaaaggaaatatctccagtataattacacttgttcataacaaaaaagtatttgaaacttcaagaaaaaattagaaaaattaataatgaaatatgaacaaataaatgtatgaaatatataattaatccctaataaatgtgcatgaaattatagtcatagaattaagagtgatgtaatttttcaactaaagatgcattctgaattataatagaaaaaggtttgtaaaatgttaagtttaayaatattttatttatttttgagacagtctcacttcgtggtctaggttggagtgcagtggtgtgatctcagctcaccgcaacctccgcctccgggttcactcaattctcctgcctcagcctcctgaatagctgggattacaggtgtgcatcaccacaccaggctaatttttgtatttttagtattttttgtattttagtattttttcaccatcttggccaggctggccttgaactccatacctgaggttattcacccaccttggcttcccaaagtgctgggattacaggcgtgagccaccgtgcctggccaagtttaattatattttatataaatatgaaagtgcaaaaattactctactaattttggagagcatatgaagcagtgggaattttcatacactgctcctaggattataaatyagtgcaattactttgtctgagtgtgacattatttgaataagatgaaggatcacatcctaagacccaggatttgcwctcatatcagaatacatatacaagtatatatcgctgagttttaatagctaaagttgagaagtctcccaaatgaccatcagtaataaaatggataaataaattatgacatacttacagaatgctatacagcaatcaaaatgaacaaactagagggacatgtttacaaagaatatatatgaaaaggaaagtgaataaatttgatttacatggatagcatagtaatatatacagatataatagtaattattaacatcaaaaacattcaatataatcacatttatatgaaatttgcaagaatatttttgtatttttgcaaataaattcttataattgcttataaaagaaattataaattcttataactccttaccaaagaaattataacattttataaaagaaattataacttctcataaaagraattttattttaagtttttataattcttataatttgaaataaattcttataatttattacattggtggcaaaactgtaaagcraaacatataagtgattatcataactgggatacttgggagggaggaaacaaaagggaaatcatatcaacaagaaagcmtatatggggaatgtcttcattgctggcaaattctactttttgacgaaagtgtggaatatgagtgttaatgttacattcttttttccttttactgtgcatttaggttttattgctttccctacatatgttaggttcccgaataatgaaaatattttaaaagcagaaatattaagtaaattaatgaatataaaactaggctgaaacaatatattcttacatgtaccatcgtaattagagttttgctgaataaagaatacagcattatagtagtaagaaatagggataaaattttatacttttaaaaattaatttaaaaaagaaagatataagcaggaagtgtacatccacattcttaatgctaatcttaatttgaaacaatagattttgaacaactatattgcaatagacttttttcttgtttccaatttaattattcatgatacacgtttcaaattggcagcaattagggaatttttcataaggtacaaatattaaagtatgtaggactatagatattaagtgtataggacaatttttgctacatttatccctaaatgaaataattatactcatgttgttcccattcaaagatcacaatactatgcatgtgcacagcatatgtgttggggaaaatattttgttactataaatttttcaactgtattagagaagaaaacatagaaagataactgttaagctataaaacatatttagtgtaatctttgagtgtgcttgtgtatatgtagtattactttgactgctatagtaaaataacccagatttagtgacagtagctgagattgtaaataagcagttgagagaattttgcctgctaatgatactattaaaagataaaatacagtttgtatgctatataattgtatagaggatttgtatatatgaagttcatatgaaagtacagtgaaaattaaacagcccaaaggagaatactctttgttgtagggcacttttgtcatgattttcagaatgtggtaaaagaaaaaaaaatagccagtaaatcattggaaatacattggttttaacttattcttaatgaaatactgtctgaggatctttgtctgtgcctgatgctgaraataatataagaaacaagttcatgagcccatcaccctgaaacgyagcacttagaaaacatgattgaagtcacatttatagaagagcatggccccttttaactgacattatcatcatcaccaatcatcatctatatctatctcattaaatgatttatttttgaaatgtttacataaataatttggataatgtctaataaatgtttaaaagattattattatgggaaagttagattagaaaatggaaaatttcaagttgaaccaaatacatttttaagtatagtttagtttaaaatacattgcttaagcaaatcattatagataaccttaaactgatcttaggaacactataggaaagatttagttgcggtgttaataaaattccttaattagaaagataaataagccacttcatgatcaagctcttacttctaaagtgaaggttttattttatttattttttaacctttccacattttattgacaaagaattaatagtataaattacgtttatattgcaaagtttatttatggaaatttgatacgtgtacttctactcctttttacaccttacatgaatatttaaataattgatttataacactccctgatgccaggtaaagtaaagcctaatcgcagttcagaaactcacatgtacaacaaatttaactttctggatatttttaaaactcagcttaatttccctaggtgctccrttaacctgatggcagaaattaaatcttaagcaactctgggttctcccacaagcacactttgcttcagagttgtgytgaagttttgaggaggatgggaggaggcaaggaggtgtccagtcctttgtgcatctatcccctggcattctcccatcctgccccaagtcatcagcccacacaggttgctggcacatytaaagtgagaattttaggactaaataaatcaaatagaagtaagccctcacatcttctatatctcacctgatagtgaagaagtttgaaggtacagagctccacttctgctaataaaaaaagagtaaaatttaatttgtaaaatagaatggtgtagctagggttgaggtgctataatttatttattggaatggcatcttgagatccagcacagctcattgaatttccctgtggggagagtttgtggtgaagrctcatcaacagacaagctgctatccccmccyaaaaaaaaaarctactaacatcacatcaatttccaggttcttccaacttgcggaaggatgtgtagaccaagcttttattctattttgtgaccaaagtcttgggaaaagaagaaaattgttagcattttcatgtcaagcatacgaaaaacaaaaaaacaaagccaaccaactgaacaaagaacccaactttttttaaaaaacttggtgrtaagagtrctttgttctgcttctccatagataatgatttatagaaggagaacaaaatataatttctgctactaaaacaataatagcaaaaaataaataatcaatattgagaatccaatagacagagttaacaaccagttagacatagaagagagaattagtgaattggaagacaactataaagaaagaagcctaaagagaccacaagacaaagaatgccaagctaagaggataagaggcattgatgctacaatcagagcatctaacatacttctggatttctggaagattaaaagggataaaatagggcagaatcaatgttgtggagattttcccaaaagtgataaaakgtattaatccatatatttttagtaaccatcaaaggtcagacaagataactaaaaacaaattaacataaaatgtcacaagacatcaaagaccagtagaaaatctgaaaagtagccagaggaaaagatagattattttaaaaggaacaactttctaaatgacaacctgattttcaacagaaaaatggaaagtagaattcaatggaatcatgtctttagtgtgtttcaaaagaatagaggaccttcataaacagaaatccaaatgatatttttcagataaaaaatattgaaaatacaaggttaagcatgcaagaaggaataaaaattaacagaaatgataaatatgtgcataattctaaatgaatgttgactgaataaaataatagcgtcttgctgagttaaatatattattgataagatatatgcaaatagcrataaagagactggaggtaaaggtgacaggaacaaatttagataaattattttttgcacttttctatgtctgtgaggataatttgaacaccacatttaatgaccccataataggaattgcatcaaatgatatgtgaaataatgctgatagtagtattattcataatagctcaaaaatagactgcccaaatatatattaactaaggatgattgaatgatatgaaagattacagtaaatccatacagtggaacagtatatagaggtgaaaagaaatgaatcacatgtacatgcaactatgtaactaaatttcagaaacatgatatctagtgcaagaagccatgaacaagaagaacacacaggactgcacctatacacagttcaaagcaggacagaccaagctgtggagtttagggttgtgaacctagytggtaaagtataaagaaattcaagcaaatgatcatcatagattatgaatattgcttatctcaggagatgtgaataaaggtttaggggcttggaaagtggcctggaagtggacctagtctgtttgcagtgttccatgtcttatcctgcatratggttacataagtgtttatgatacattgctcttacctatttttgttttggcccatttctaagtgtgcattataattttatttaaaaaattacaaattgggagaaatgtcacgtaaaaattattaattgctctgctcattatatacctagggggaaaatccaccatttacrtacattcttatacaactcaagagagctaaagtgaattcttattttagttgcaaaatggagaaatttgagatgctgttacctacagcctccagatctttccaaaagttttcttctagttttagatattcacctcatattacaaaaactttgatatttccaacctatttttcctttggctcctgaatttctgacacaacaagggygcacatatttctcaaactcttggattagcagagtacctatatcacttagctttttctgcaaaagaaacttctccaaaaccacattagatatttatatctcacatgtttttggattctgttttcttaagctggggtttggtggatggctctggtgatttgagatggtccaagttttgcctcttggatctagttagagtttggccgatttaaggctggatcaggcaggrgccatatgattccatgagttactcattcttattctgggaacagtgtgttagtgtggacatgttctcattataaaccggaaaggaacaagaaagcctaatgtggaggtcatctcaaatttcgatgtaaagtgtagtaattttctgttcatcaaagcaaattacatgatcgaactcagagccctagtgcaaggttgtcactatgcctgtggtgggaggacactgcaaaattatgtgacaaaggtctggtactcaggaatgtttacaagcttgcaggtagcattaccaaaagcctaagcatgagagatatgtttcatgaatattattcattggctgaaaatctggcatgggaaaaataggactaattccaccaggacgagctcctggawactcattttccatgtcataagttacaagaaagcaattccttycatccttgaagagtgaaagtgtgtgtgtgtctgtgtgtgtgtttatgagcttgttaatagtgatgccatatagaagtattggttaacagcaaccaaattataaggagtattggctttcctgtggtttccaagaaaatcttrggtgattttgataaaaagtttagattytgtgtatttaaatctggctttaaaaataaatccrtagtgattttgatcctagatttcaccaggctcttttaacaatatattttttgtgtcatctatgtactgggtattaaaatttcccyaacaactgaagggctgaacacaaattatggaaaggtgaaacaaggaaaaaattgcaaagcaatgaaagaggatatgtctttatttgaatgctagcaaatgagaattcagctttcccttcaacatcagtatgaaaaatttcagcctatagcaagaatagagactttatgaataagaattaatttgagttgttttgggactaacagtatttcccataaaggcagcattgaactcattcattagtttaagctggtgcttttctgttgacattgttcacagaatttaaaagtataaagaatgttattgracattcaggaatcaagtgcatatttaayttaaagtcttgaatatcagaggagtcaccatcagtgacattaggcctgaattttttacttgcttttttgtttagacatgatgagttttctacacattgttttttccattctagtagtggttgcatttattcttggaaattttgccaatggctttatagcactgataaatttcattgcctgggtcaagagacaaaagatctcctcagctgatcaaattattgctgctctggcrgtctccagagttggtttgctctgggtaatattattacattggtattcaactgtgttgaatccaacttcatctaatttaraagtaataatttttatttctaatgcytgggcagtaaccaatcatttcagcatctggcttgctactagcctcagcatattttatttgctcaagatcgtcaatttctccagacttatttttcatcacttaaaaaggaaggctaagagtgtagttctggtgatagtgttggggtctttgttctttttggtttgtcamcttgtgatgaaamacacgtatataaatgtgtggacagaagaatgtgaaggaaacgtaacttggaagatcaaactgaggaatgcaatgcacctttccaacttgactgtagccatgctagcaaacttgataccattcactctgaccctgatatcttttctgctgttaatctactctctgtgtaaacatctgaagaagatgcagctccatggcaaaggatctcaagatcccagcaccaagatccacataaaagctctgcaaactgtgacctccttcctcrtattacttgccatttactttctgtgtctaatcatatcgttttggaattytaagatgckaccaaaagaaattgtcttaatgctttgccaagcttttggaatcatatatccatcattccactcattcattctgatttgggggaacaagacgctaaagcagacctttctttcagttttgtggcaggtgacttgctgggcaaaaggacagaaccagtcaactccatagattcacaagaggygcattgtgtgttttctagcagaaaacaaattgatggtgtctggaacattttatatttcccacaagtttttccgtagtctatgtatttgagtaatttccaaaagttgacatagaaaagtcttttacctaagtttattatataaaagtatatatatataatatacatttgcgtgtgtgtgtatgtctgaatgtatatgaaaatttaatatttaccataacatacctttaatcaacttttcatataaactgttcagttataccaaagtaggataagaaatttctcagaattatgaacccatgtgtatttcacacatttttttatatgatatttcatttgaggaatttatgatctctatttataattaagaactgacagcttatatcagaaaatcattgctgtttttcgttgtaaaatcattgctgtttttcgttgtaatttgtatcacgtatatgtaccatagtgtgtttaactgtttaactatcattgtttgaacctctaattttttggatggtaaggacatttaattctaaatcgatgagaatgtgtctttggggtaggtttttttgttttttttttaatcatgaattctttttttcttttttttgagatggagtcttgccctgttgtccaggctggaatgcagtagcacaatcttggctcaccacaacgttcacctctggggttcaagtgatttccatgcgtcagcctcctgagtggctgggactccaggcatgcgctaccacacgtggctaattttttgtatttttctttttttttttagtagagatggggtttcaccatgctggccaggctggtctcgaactcttgacctcaagtgatccactgcctcagcctcccaaagtgctgggattatagacattcatgatgaattcttattttatgtttaatataaagcaaatacaattattgttagataacaatgcacaaaataaaattcaagggtgaaaaatatatctagtgtacatttttatgtgtatcaaaagcaatactgaggaatattatatttaatatagtatgttaatagcttagaaaaaatcatttctataaaaaggatgaagaaacatgatcatgagctcttttcagtgctgttataagtttccatacgcaattagaaaagtcatctcttccagtttttgaattaaacaaaaacctttttgaagttgagatctgatgttatatatttcagttttttgtctaagccacctctgagctcctgaattgtcaatttcctcctttatcttccatccttaaaattcctcaaaaagctcaaattttccttactttaaaaagaagctcaatctaaagagggtatagaaactatggcatctatgaaatctatatattaatgataggaratgtcttaaagatrtgttttattataatcttggtgtaaataatgaaatgagagaaagtgtgttgacatattcactaatagcaagttctattacaagaagaaaatgtataacctagttcaacagctaaattctgtgtgactgtattaatttctggtgttatgcaattttaacaatattatctaaaccttaagataaatcatctccacatctgatttgtttgtttatcatatatcttacctggtacaatgtaaataccataaaagtagagatcatatagatcttgcttactgtagactcccargacataaagatagcacatagaataggtattgaaaaatgatactttgatgaacaagttaattggtgaatgaatgaatatgaactatattggggtggtgaaccaatgaaaatgtaacacatcacaaaatctacagttgggtgcacatttctgttctggtttcagattgaagttacaggattatccaagaagaagaaraatttctcagagcaaaagtttggctattccacaattctaggggaaatrtcactataatatagcagtgatgcagctataycagatgtgtgacacaaagacaaagtggaaaataaaaagatggcatttattacaatactttttactaagcatataaaagatttttgtataagtgcacatatcttttctattgcgaaygatatatttatattgtggtatttctagctggttattatataaacaaaaatgacatttcatttaaaaaatttagttaccaactatcttactaaaatataatctttatttagtatttttaatatcctttctaaatgaccactttaatcaccatattataaactgatggaaaaatgaatgaataataattataacactgaatgaatatcttatcaggggtctagaagtagagcaaatgtctgatattaaagtgatgacatttatttggaaggaggtccactgcagaaatggctgggacatgtggaaattgagtcaagagaagatgtgacactatgtgctgtaatgtgtgatatgactctgctgacgaccacttcacaatgatgtgagagagacagcatggtggttatcagatgcatgcacttggctcccaggactttttcagaagggctgcgagaggacaacacagccagcatyagcccatggaagcaacagaggacggagaatatatctgctcagctgtcttctgtcttctatttcccactggccagggtttccctgaggcagaactaccatctctgctgttctgctttccatcatccaatcymttgatggaggttatgaaagtcagacctcatgcccacaatgtggtgatccattcaagtcccaaatggaagggtgatgtgggtcaggcaaggtgctgaccaggggaataggagacagtcaagtaaatctgaggaagcacatgtttgtgtcccatgcagtccactccttgtkccattcagatgtgctcatgccctccaatcatggctgactatgagcatataatttccactgttgcacagggtcttgtgcttagagacgcacacgcttaraagggctttatacatgggttaattttctgcacctgctgttttgtttttgagacagagggcactcctctgctaaagagggaatggtcttgcactaattggctaggggtttgctctcccctctcctgtgggcttgtgagaagcatgcacagagtcttataatgcccactatgcatgcatgcctctagcgggtttgaattctgctggattatctgtcacaatgagcacagcagcttggactagagcctacatttgctagaggcattttttgttctagttccacttgagaccagtagcctttggcaacttcattagtgaatcagagcagtatcctcaaatgtggaatacgttggctcccaaatcccagtaggcccaacaaatattgtgtctcatttttagtgacaggaaatagatgtatagagagcaacatgctgtttactttaaaagggtgtttcagcatgtggactaggagcactggacccctaaaatcatcatctatgttataggtcactgaatcttcttgttcatctttcttcttctggtatttagttctgttcaatgttatggtattttactatatttgagaaactcatcacttcctgcttatgggtaacagttaatgcaatattattaatatattgagttagcatgatgttttgcaaaatgccaattaaaytgaaaacagaagtgasrtagccatgacataaaacagtgaagcagtgcttttgttcttacctcaccaaaacaaatcattttgattttctctcccaaysgatgtagattaaaaagcattcaccaaatcaaacgcctcatacaaagaaccagaaaccatgttttctcagtgaaggtaccacatcctagagagcatctgcaagtgtgatttaagtttatgctaatgtgcattcatctgataatccatctggctttggcagaagccagataggttaacwgaatagggatcaaaaatggacaaccacctcctggaacttttgagttttttgtcatgtcggtgaccaattctattccttggacaatgcggttagtatgttttactcattttcttgccagaagaggagaattwccgaggactctttttggtcctacttacagtaatgtcccttaatatacaggtctgraagcaatgtgagagttctgctagctgttgaaactgttaatttcatttaacattctggaagagataataaatataaacccattacatccaccttaggttgaacatgagccaaagctttatgcagcatctgactttcaaaaactcatactccaggmctggtgaggtggctcacacctgtaatccaaacaatttgggaggctgaggtgggaggagcacttgaggccaggagttscagatcagcctgggcaagacagcaagaccctgtttgttaawgaaaataaactgattgtagtactgcgtgcctgtagttccaactacccaggaagttctggcagggggatcagtttagcccaggaatttgagtctgcagtaagctatgattgtgccatttcactmcagcctgggctgcactctagcctgggcaaccaaacaagactctgtctctaaaaacaaaaaaaaacgaacaaccraaaacaaagcctcccactccattctgtgaaacacagtgtctttttttagttctcaaatattattagtgttagttcaggccccatgtttaaaattctgagagtatggatatatgtcctttcctctgggtactgttatggctacaggtgaaatggctacaggtgcttgagaaagggtcaagtgaatatttcctgaatatttttgtggtgaatcttcagtgttgtttaccgagggcatgtaagctttccttcaatcattgaactctgcttctctgaactggctcagtccagagaactggctaagggtttttgattttcaatgtcaaaggctgacctcaggagtcagcttttgcaactcttgtcccctcttggtttataattatttagcaaagtatgaggcctcttcaactatyggtcyatcaacccatttaaatgaggctgttactgtcaccactccattaaatctgacatttgcaagatcaccgataagtctgtgttgccaatggttagttttcatgttgcatgctctatgagcagcactgaacstrgtttatttgcatttcaggatgctgccctctcctgattttatccttgttcactggcacaatttcttagtctcctttgctagttcttcctcttgtctgtaaactgaaaatatcagattgcccaaggtctaaattcttcaatctctaatcaattatgtctggtttttttggtgatctcatgcagtctccttacagataatgtagccacatggttcaatagagaggaataaggctgattattcatatatgttatttatttatatacatatagttacatatatcaaattatrtaaccctttttttcaaatgtcaaagttacatttaaaagtmacaatactaaaaatctrtggagaaggtyggagcatcaataatgtttttacttgaatttctgctaaatcagagtgatggtgaccagatagctaattaagttttatttaaaatagccatgtagattgataggcaggggattatcattatagaaaaaaatgatataagtaaggaaatatacagatagaataatgattgattaacccattttgacttattgtacttggtacagttaatgtcttagtatctcagtaatctstttttatatttttctctatgatcaattaattatgagttaatttttatatatggtatgaaataatrgtctacactcatgtttttatcattctgtttttactcccacttcttaggtaagttcatctagtcataaccttagttactttctgtgtgctgttgatgccaatatttaattcttcagctcagaagtcaaycctggtctctagaatcctttctctaagaagtcatttgacatcttcatttggatgtcktaacaagaacttgaactaacatgtccaaatcaaaatagtgatcttccctctagtctccagmgttgtttcttctatagcctttccctcttctgttaatgaccacttcagtctttcagatgcttagaccaaaaacacggagttaacattttctctctttcagaactcatctctaaggcatcagcaaattttgttggttctaccctcttgttggttctaccctcaaaaacatacagaatccaatcccttgtcatcacttttgccatactcatctaaactgctgccatacctagccaagataattgccatcaactcctaattattctttctagttctgcacatcattttctcctgatgtactctcaagrtagcagccaaagagagcctatgaagatkcaaatttgatcatgccattcttcagctttagatttttcagtggcttctcatctcattagagtaaggccaaaatccttacaaagtcctataatcatttgaatratcggattttgtctgcctgtctgtcctaaaatgcctggctatcccatgctagcaacactggactttgtgtaatttcttgaatgtaccaagaattgcctcagggacttcgtacttgtgtcccttcttctcggaatgctctttctcagaaatcaacactaaacactatcactcatcaaacatcactgaatcattgaggcctccttgatttgatctttgtatatggtgataaataggcatctagtttcatttttctgcaaatggatatccaattttcccagcaccatttagtgaagagactgtcctttccccagagtatgttcttgscacctttgtcatgagttctctataggtgtggatttgtttccacattctctattcyatttcgctgctctatgtgtctgtttttatgccagtaccatgctgttttggttactatagytctgtartatactttgaagtcaggtratgtgattcctccagttttgttctttttgctcaggataactttggctattctgagacatccgtatattttcagaagccattaaaatttagatgagataactaaaaccaattaaaaacaaatgccacaggatatcaaagaccaatcgaaaatctgaaaagtaggtagaggaaaaastttatgtaaaaagaaacaactgtctaaatgacaatcttattttcaacagacaaaattgaagctagaattcaatggaatcatgtcttcagtgtgtttcaaaaccawagcggrctttaacaaatagaaattcaaaagaatattttttagataaaaggaaaattactaaaaatataamgctgaacatgcatgaaggaataataaataatagaagtggtaaatatgtgcataagtctaaataaattttgactgtataaagtgrtggtgtctttttgggttaagtatttaataagatatatagaaatagccatatatagtctgtaagtaaaggtatcaaaaagwgaatttagttaatttaaattyggaattttctatgtctgtgaagagaatttgaaagctatatttgatgaccctgtaattmtctttctatgtatatatccaaaggaaatgaatcaaatgatatatgaaagaatggtcatactagaattattcataactcttcaaaaaagaaaccccccaaatatgtatcaactaaagatgaatgaatcattacaacacattcatacaatggaataatatagagaagtgaaaagaaatgaatcacataaagatgcaagtatgtgagtaaatttcagaaacgtaaaggtgagtccaagaagccatgaacaggaacatacaggactacacctacatatggcttaaaggtttaaagtaggyaaaaccgtatcataragtttagggttgcatacctagttgttaatgtataaagaaaatcaaggccaggcgcgrtggctcacgcctgtaatcccagcactttgggaggccgaggcgggtggatcacctgaggtcaggagttcaagaccaacctggccaacatggcaaaaccctgtctgtactaaaaatacaaaaagttagctgggtgtggtggcatgcgcctgtagtcccagctacttggaaggctgagggaggagaattgcttgaacccgggaggtggaggttgcagtgagctgagatcgcgccactgcactcctgcctgggtgatagagcgagactctgtctcaaaaaaaaagaaaatcraggaaatgatcattctaaattatggctattgctctcctcagggtatgtgaagaaaggtgtaggggcttggagagtggcatggaggtggacmtaggctatttgcaatgtgacatgttttgccctgcttgatggttgcatgagtgtttatgacacattgctatgtttaccatcttagttttcacccatttctaagtgtgcattataattgtatttaaaaattattaactggaaaaatgctccataaagaatattaattattctgctcattgtataccttgcaaaaaattcaccatttatacacatttttatacaactcttagagagttgaagtaggaactttattttagctgcaacatatggaaatttcagatgatgctacctgcagcacacaaatcctttcaaacatttttttattacctttaattatctacctcacrtgacaaaactttgccactccccatctatttttcttttggctcctgaattcctgacaaaacaggggcaaatatatttccccacactcttggtgtagcatagtagctgtaccagttaggtttttctactagagaaaccctccaaaactacgttagatatttttatctcatatatctttggattcaggttttctaagctgggtttggtggatagctctggtgacttgagatgggccaagttctgcatcttggagctagttagactttggccaatttaggatggatcaagtgcaggcaaactgactccattagttttcattctcattctgaaaacagtgtactagccaggtgataatctcatgatcaatggaaaagagcaagaaaccccaatatggaagccatctcaaacctcggtgtgaaatctaccaattttctgttcatcaaagaaagttgtgtgagtgagctccgagtccaggggacagataatcamcctgcttatggtgggaggatactgcaaaattatgtgtcrtagggtgtggtactcaggaatatttacaaaattgttgaacattttaattaaataataaatacttaaacattaaatagacttgagagtaagtttaccaaatgcttaagcatgaaagatatgtttgatgtttgatacatttttttggggggggtctgaaaaccctcagttttcactgggaaaataggactaatttcacgtggatggcctccaggagacttacttcccattttggaaagtataagaaaataattccttccatctcttaggggtgtcacagtctctctctctctctctctctctctttctgtgtttgtatctatttatgaacatggtaacaataaattcacacaaaagtattgggttagcagcaaccagattttaaggtgttttggtcttcttatggttcccaagaaaaccttggatgattttgatttaaaagtttggattctgtctgtttaaatgtagcataaatagtaaatccgttatggtggtgatcctagttatgactaaggtcttttaaagaacttagacatttactgtatgaacgatggactcgggggtaaaatttccctatctaacagctgaagttgctgaacacaaattacgtatcggttaaacaaggaaaacattgcaaaatattgaaagagaatatgtctttatttgcatgctggtaaatgaaaatttaggtttcacttcaacttcattatgaataattcaagcccatcacaagaacggacattgaatgaatgagttaatttgagctgttttgaaaataagaatgttttccrtaaagatgacatcaaactcatccattagcataagctggtactttcttgtttgacactggtcacagtrtttaaaagtaaaaagaatgttactgcacattcagaaatcagatgcacataaaatttaaggtcagagtattaaagaaatcacaaccagtgatattaggcttgcattttctttctttttttctgctcagatatgataacttttctatacatttttttttcaattctaataatggttttatttgttctcggaaactttgccaatggcttcatagcactggtaaatttcattgactgggtgaagagaaaaaagatctcctcagctgaccaaattctcactgctctggcggtctccagaattggtttgctctgggcattattattaaattggtatttaactgtgttgaatccagctttttatagtgtagaattaagaattacttcttataatgcctgggttgtaaccaaccatttcagcatgtggcttgctgctaacctcagcatattttatttgctcaagattgccaatttctccaaccttctttttcttcatttaaagaggagagttaggartgtcattctggtgatactgttggggactttgatatttttggtttgtcatcttcttgtggcaaacatggatgagagtatgtgggcagaagaatatgaaggaaacatgactgggaagatgaaattgaggaatacagtacatctttcatatttgactgtaactaccctatggagcttcataccctttactctgtccctgatatcttttctgatgctaatctgttctctgtrtaaacatctcaagaagatgcagctccatggagaaggatcgcaagatctcagcaccaaggtccacataaaagctttgcaaactctgatctccttcctcttgttatgtgccattttctttctattcctaatcgtttcggtttggagtcctaggaggctgcggaatgacccrgttgtcatggttagcaaggctgttggaaacatatatcttgcattcgactcattcatcctaatttggagaaccaagaagctaaaacacacctttcttttgattttgtgtcagattaggtgctgagtaaaagacctgaaactctcaactctctagattcacaagtgggacattgtgtgtgtattctaggagaaaacaaactgatagtgtctggaacattttatactttttactgttttttctgtagtgtatgtttttgagtattttctgaaagcatacctagaaaagtcttttacctaaagttagtctaaaagtgtatctatgtgtgtgcatctgtatatgaaagacttaaaagacattgacaataacataatgttaatcatattttcacaagatgccaaattatagaaaatatggtaagaagtttttcagaatcatgaacccatgtatatttcacatatacatttcatattatcatgtttcacttgaaaactgtgtgatctttacttataattgttaagaagtgacacattatctcaaaatctttgctcttttccactgatttttaccacacatatgtaccacagtgtgcttaaacatctaaattttttgatagtaagcacactcaattctaaatcaataatgaggtttcatytttggggtagtttttatttcatcatgaattctaattttatgtttagtttatagccagcataattattttcagaaaaagatgcacagaataatattcaaggatgacaaatatatttagaacacattttgtatatgtctaccataaacagtactgaggaataatagacttaatacaaatatgtgaacatttgagaaaaaagtcatttctataataaggatgaagaaagaaacaccgygatgacttatgttgtcataagtctcaacatgcagttagaaaagtcatttcttccagtttttgagttaaagaaaaccttttttgaagttgagatctgatgtcaagtatttcaggttttttttttctaaaccacctcagagtccctgaattgccaatgatctcctctatcttccatacttgaaattctttttaaacttcacataaaagaacttgagtcttccctaccttagaaaaatactctatgtaaaaatastatagaaattataaaaatcatttgaattaaactttttgcaaatgttaaaatggcatctatgaaatctatgtattaatgatagaaaacatctaaaatatatgttgtattataatctagttgcaaataatacaatgagacagtgtgttgatatattcagtaatagcaagttctattataggaagaaaatgtataacatcattaaacaattaaattctataarctgtattaattcttggagttatgaaattttaacaatattatctaaaccttgggacaaatcatctctacatctgatttagttatttgt[450 bp omitted]tatctttgcatacaatttttcagttgtgaatgatatatttgtattgtgatatttccagctggttagtgtataaacaaaaatggcatttcattaaaaaaaactgagttagttaccaactaccttactaaaacgtgacttttatagaatattttaaaaccctttctaaatgaacatttaaattgccatattaaaaacccacagaaaaatgcataaataacaattataacactaaacgagtatcttasccttgggtgtctagaactagagccaatgtctgatgttaaagtgataacatttatttggaagataagtccagggcagcaatggccaggacatgtggaaattgaggcaaagcaaatgtgaaaccatgtcttgtgatgtatgatatgactctgctgatgaccacttcacaatgagatgagagagacagcatggtggtcatcagatgcgtggacttgactcccagtacttttccagaagggctgcaaggggaaaccacagccggcattagtccacggaagagaaagagaagagaanatgtatctgctcagctgtcttctgtcttctatttcccattggccagggtttccctgaggcagaactaccatctctgctgttctgcgttccatcatccagtcccttggtggtagttatgaaagccaaacctcatgcccccagtgtggtgttccattgaagtcccaaatggaaggatgatctggatcaagcaaggtgctgaccaagaaaagagaagacagtcaagataatctgaggaaggatatgtttgtgggcaatactgtccactccttgtgcaactcagattggctcatgccctccaatcatggctggctttataggcatatgacttcacagttgcacagggtcttgtgcttagaagtgcttatgcttagaggggctttatgcttggattaatcttctgcacttgctgttttgtttttcagacagaaggtagtcctctgctggagaaggaatagtcttccactaattcgctaggagtttgctctccccactcctatgggcttgtgagaggcatgcacagagtcctataatgcccactatgcatgcctgtagcaactttgaattctgttacatcatctggcacaatggccaagcaacttgggccagactctatatctgctatagagcccgtttttgtttcgggtttgacttgagacaagcagcccttgcaaactcctttagtgagtcagagaaatatccttaaatgtggtatatgttgaattcaaaaccccaataagcccccataaaactgtatttcccttttagtgataggaartatatatatatagggcaacatgccatttactgtaaaaaggatgttttgacaaaaggaccagaagcattggacccctataaacttcatctatgttataggtctttgaatctgctgaagtttatgtctcttcttccagtattttacttctgttcaatgttataatattttactatacttaaggaacttgccacttcctgcttatgggtaccactttatgtaatattattaatatattgaattaacatgatgttttgcaaaatgtcaattaaactgaaagcagaagtgacagccctgacagaaaacagtgaagcagtgttcttgtttttaccacaccaaagcaaattgttttgattttcctccacaatgtgtgtagattaaaaagcattagctaaatcaaaagccgcatacaaagtgctggaaaccacattctgctcagtgaagataccacatcctagagcgaatgtgcaagtgtgacttaagtttatgctaatgtgcattcatcctataatccatctggttttgacagaggccagttaggttaactgaataaagatataaaatggacgaccgccccctggaacttttgagttttttgttgtggcagcgaccaattctgtttcctggagaatgcagttattatgttttattcattttattgccaggaaagtagaatttcagaagcctccccttggtcctgcttacaataatgtcccttggtatacaggtcaggaagaaatgtaagagtcctgacagctgttgaacctgtcaacttcamttacactttcaggaaggggtaactacgatgaactcattagaacccctttgggttggacatgggccaaagctctatgtaccatctgatcttcaaaaactcatactccagtcctattgaggcagctcatacctgtaatcctaataatttaggaggccgaagtgggaggatcactttaggctgagagtttcagatcagccttggcaacayagtaagaatctrtaaaaaaaaaaaaaaaaattagttgtttgtggtagtgtgtgcctgtagttacagctacccagaagactcaggcaggaggattgctttagcccaggaattcgagtttgcagtgagctatgatggtgtcattgcactccagcctgggcaatcaagcaagatcttgtctctaaaaagaaacaaacaaaaacaacaaacaaaagcccaaaaagggcctggtgcggtggctcatgcctgtaatcccagcactttgggtggstgagtggttggatcacttgaggtcaggagttcgagatcagcctggccaacatggtgaaaccccacctctactaaaaatacaaaaattagccaggtgtggtggtgttgcacctgtaatccaagccacttgggaggctgaggcatgagaatcacttgaacccgggaggcagaggttgcagtgagctgagatcatgccactgaactccagcctgggcgacagagcgagtctccacctcaaaaaaaaaaaaaaaaaaatccagaagtaaaaatttgccaccgtatcccatggaccactgtgtcttttggggtacccagatattagtgttagttcaggctccaaacttaaaagtctcarataatatggacgtgtgttctgttctctgaggactgttttctggggaatagctacaggtctttgagaaagcaacatatgatacatcctgagtgttcttgcagtgcattttcaatgtccatcatcaagaggacttaagattcccttcaatcattgaattctgcttctctgaattggctcagccctgagaactggctgagggttttccattttcaatgttaaaggctgacctcaggaatcagctttttcaactctttccccctcttggtttataattatttagcaaagtatgaagcctcttcaactattggcctatcaacccatttcaataaggctgttgtcaccacttcattgaatctgacatttggaagatcaccagggagtctgtgttgccartggtcggtcttcatgttgcatgctctgtgagcagtactgaatatagtttatttgcattccaggatgctgccctctcctgattttttccttatttactgggcaccacttctcagtctcctttgctagttctctcttgtctctaaattgaaaatatcacactgcccaaggtctcagttcttcaacctttaatcaatcgggcttgttttgttggtgatctcatggagtctccttactgataatgtagccaaatggttcaatagagaggaataaggctgattattcatatgtatttatatatattatttatttatgtacatctatttacatatttctcattatataaagcttttttcttcaaatgtcagttacatttaaaagtaacatgaccaaaaatctagggagaatgtgggaggatcaataatgttttcacttgagtttctgcctattcagagtgatagtgactcagtatctaatttagttttatttaaaatagcaatgtaaatattgatagattgataggcaggggataatcattatggacataatgatctaagtaaagaaatacatagatagaattatgattgattaacccattttttatttcttgcatttggtacagttagtgtctcagtatcgcagtaatcatagttcttaagtttttgctccatgatcaatgaattatgagttaatttttgtgtgtggtataaaataagggtctaaatttatgttttttctttctcttttggctcttactttttaggtaagttcatctggtcatggccttactttctgtgtgctgatgatgtgaacatttaatccttcagctcagaacccaaccctggtctccagaatcctttctctaatagcatatttgacatcttcatttggatgtctgacaagaacttagaactaagttgtctaaaccaaattactcatctttccttccatccccaaatctgtttctcctacagtctttccttttgttaatgaagacttcagactttcagatatttagacaaaaaacatagagtccacgttttctctccttcacatctcatctcagcaaattttatagactctgtcttcaaaaacatacagaatccaatcccttgtcgtcacttctgccatactcatctaaatttctgcatttcttgccaagataattgctatcaactcctaataattttttctagttctgcacattcccctgatgtattctcaatgtagcagccagagagagcctgcaaaagtgcaaatttgatcatgctgttcttctgctccagatttttcagtggcttctcaactcattcagagtaaggccaaaatccttacgaagtcctataatcatttgaatgatctgtttttgtctgcctgtctgtcctaaaacacacctggctcatcccatgctagcaacattggcctttgtgtcacttcttgaatatgccaagcattgcctcagggacttcatacttgtgtcctttcttcttggaatgctctttctcagatatcaacactaaacactaccactcctcaaatatcactaaatcactaaatcaatcctgccttatttaaagagaaatctcacttctctctgcagttttaaattttttttagattttattttaggttcagaggtatatgtgcaggtttgttatataagtaaattgcatggcatgggaayttgctgtatagattatttcatcactggggtgataagcagagtacctgataggtaactttttgatcctcacccccctcctgccctccgtcttcaagtgggccctggtgtctgtagctcccttctttgtgtccatatgtatttaatgtttagctcccacttgtaagtgagaacatgtggtacttgctttgctgtttctgttttacattcccaccagcagtatraaagcattccctttcatcacaaccttgacagagtctgtttttgtttgtttgtttgtttgtttgttttgtaataggcattctgaggggtgtgagaggttatctcrttgtggttttgatttgcatttctttaatgattcattcatattgagcattttttcatatgcttgttggctgtgtgtatgtcttcacttgaaaattgtctatgccttttattcatttttaaatggaggtgtttgttttttgctcgcaaaatcaagttccttatagattctgaataggactttgtcagatgcatagttagcaaaatattttctcccattctgcaggttgtctgtttactctgttgataatttmttttcttgtgcagaaactctttagtttaattaagtttcatttatcaatttctgtttttgttgcaattgcttttggcatctttgtcatgaactctttgccaggtcctatgtccagaaaggtatttcctaggttatttttcaggtgttatttttctttttacagttttaggttttacattttagtatttaatccagcttgctttgatttttgtatatgtattaggaaagtatccagtttgaatcttctgcatgtgactagccagttatctcagcattatttgttgaatagggggtctgtccccattgcttgtttttcttaactttgttgaagatcagatggctgtaggtgggtggcattatttctgggctctctattccatttccttggtctatgtgcctgtttttgtaccattgccatgctgctttggttactgttgccttgcagtrtggttcaaagttaggtaakgtgcctccagcttgttctttttccttgggattgccatggctatttgggctctttcttttttttttttttttattccatatgaactttaaaatagtttttttctactttggtgaagaatgtcactggtagtttgtcagaaatagcactgaatctgtaaattgctttaggcagcatgggcattttagcagtattgattctttctatccatgagctcggaatctttttccacttgtctgtgtcatatttgatttctgtgagcaatgttttgtaatactctttgtagcgatatttcacctccctggtcagctgtattcctctatatgttgtattcctttgctgctattgtgaaagggattgctttctttatttgtctctgtttggatgttgttgatatataggaatgttactaatttttgtacattgatttttgtatcctgagaatttgctgagtttgtttgtaagatcaaggagattttgggcaaatactgttgggatttctaggtataggattacattgtctgcaaacagggatagtttgacttcttctcttcctacttagatgacttttatttctttctgttgcctgattgctttggccaggacttccagtaattgattaagagtggtgagggaagatatccttgtcttgttcctatcttccaggggaatacttccagttttgctcattcggtatgatgtggctttgtttgtcataggtggtgcttattattgtgaagtatataccttcaattcctagtttgttgagagtttttaatatgaagagatgttgaatttattgaaagccttttctgcatctatcgagatgataatgcgattttcgttaattagttctgcttatgtgatgaagcacacttattgatctgcatatgctgaaacaaccttgtatgttagtgataaagcctacttgattatggtggattagctttttgatgtgctgctggattcagtttgctagtattttttgagtactttttcatctgtgtttattaaggatattggtctgaagttttctattttttgttgtgtctctgaaaagtttaggtattagggtgctgctggctttatagaatgagttatggaggagtcccttttcctcagtttcttagaataggttctgtataaatcataccagtgctttgttatacatttgatagaattcagctgtgaatctgtctggtcctgggctttttttggttggcaggcttcttattactgattcaattttggaactcatcatcggtttatttagggatgcaatttcttcttagttcagtcttggaggttgtatatgcccrggaatttatgcatttcttctaggttttctagcttgtatgcatagaggtgttgatagtagtttgtgaaggttgtttgcatttcagtggggtcagtggtaatgtcccctttgtcatttctgaaagtgttcatttgtatattctctcttttttctttatcattgtggctagtgttctatctatcttaatttaaaaaaaaaaaactcctcagcccactgatcttttgtatgattttatgcattgcaatttccttcacttcagctctgatgttggttattccttgtcttctgttagctttggcattggtttgctcatggttgtctaggtctttttgttgggatgttaggttgttaatttgagatctttctaacttttcaatgtgggcatttagtgctacaaactttcctcttaacactgccttagctatatcccagaaattctggtatgttgtatcttttttctcattagtttcaaagaatttcttggtttctgccttaatttcatatgtacccaaaattcattcaggagagggttgtttaatttccatgtaattatatggttttaagctattgtcttagtatttacttacatttttatagggctgtgrtccaagaacgtgactggtatattttttgttgttttgtatttgctaggaattgttttatgttagattgtgtggttcattttagattacatgccatgtacagatgagaagaatgtgtgttctgttcttttggggtgaactgttctgtggtggtctattaggttcrtttggtcaagtgtttagttcagattctgagtacctttgtcagttttctgtcttgatcatctgtctaatgctgtctgtggggtgttgaattctcccactagtgttgtgtgtttatctaagtcttttcataggtctctaagaacttgcattatgaatctgggtgttcctatgttggctgcatatatattcagaatagttaggtcttctcgtgaattgagtcttttactttacataatgcccttccttgtcttttttgatctttgttgatttaaagactttttttatgaaattagaatagtaactctgtttttttttttctattttttatttgcttggtagatttttcttcattcctttacttcgagcctatgcggtatcattacacgtgagatgggtctcttaaggacagcataccattaggctacgcttttttatccaacctgccactctttgctctttaactggggcaattagcctttttacattcgaggttagtgttgatatgtgaagatttgattgtttcatcatgttgttagctggttattatgcagattgggttgtgtggttactttatagtgttactggtctatgtacttaagtgtatttgtgttgtcagtgaagatcttttctttccatgtttagtactcccttcaggaccccttgtgaggcacggctggtggtaatgaaatcccttagcatttgcttgtctgaaaagatcttatttccccttcacttatgaagcttagtttgggtggatacgaaattcttgattaaaaattctttttaaaaaacaaaactgctgaatgtaagcccccattctctttctgtttgtagggcttctactaaaaggtccattgttagcctgatggggttccctttgtaggtgatctgtcctttctcttccagttgactttagcattttttcttttattttgagcttggagaagctgatgactatgtgccttggggatggtcttcttgtgagtttttagttcagtcagatcagtttggttccttcgttgattctttccccagcttgctcaattatgccgtgaatactttccattgtgttctgaaattcttgatgttagtttttcagttctgtcagaacacttttttttcttttttaaaataaccgttttgtatttcaacttctgcatcattttattgcattccttaaaaactttggatttggtttttactttctcctgaatctcattgatcttcattcccatccatattctgaattctatttctgtcatttctgccttttcagcctggtcaagaaccattgctgctgaactagtgtggttgtttggaggtaagaagacattctctggcttttcgtgttgccagagttcttgtgctaattctttctcatctgtgtgggctgatgttccttgaatctttgaaattgctgtactttggatgggttctttttttttcttttatcttctttgatacccttgggggtttgatttcggaataaggtgggtttcatttactagctttgtttatggtagattttgggggtgccaaggatcagctcagcactcccgcgctgaatgccgtaactctgggaggctagtattgggcccctggctttgctctctttccccttaaggttgggaatctgctatgctggaagggctattgtgttcctggattgctggttacgatactctgaaggatggtgccagcctaagcactttgttgggcagtggcattgtggctcatccttgttcacacatgccagcagcatcagtagtgtggcagagtacacactygtagactggggtggggtgcaggtggatccaaggctgctagcctctatatggacattggcagtagcctaaattcatctttatgcatgagaatattcattttgtctagcatcatttattgataaaaatgattcttatttaattgaaatggtatggtttttgaaattagctgataataaatgttgttactaatttgtggactcttaattgtgtttcattattcttgtctatagtattaaaaatgccagtgtcctgatgattagtccagcttttagcaaactttgaaatgagaaactgtaatcccccyactttgttctttttaaattatttctctaggtgctcttgtcacttggcatttccagatacattttaggagtagttttttatggtctaccaaaaaagcccgccagaatttgatagagattgcattaaatatataagttgactcttcacctmtaaagactctccttgtgctggattttagtttagctggccctccttgtttgcacagctctccgatgaattgaaaatataattttggccttttatttatcttatcctagctgctgcagaagaatattttgcctgctggaacctgctgtatctactcaagagtggaagttttcacaggtaacttctacatatcaagtaacacaggatcaaatgaaaacctagcaacacttggtttctgcctgtatcagacaggtgaaattgcaagcagttatacaagtagtgtactaacttctcataaagcctactcaaggagggtattrttattgtgtgcgttttacagatggctatcctaaggctgatagtagttgtaaaatatagtctaagttcatatytatatgaaacagagtatctgggtttctgtcctggccatcagacttgaagatcatttcttagaaacaattatattatcaaaactgaaaagaaatacaatccaaggttggagtcttattttagcatctattaatcttaagccattaagtaatcaaaaataaattaaaaagaaaaaaatatmttcaaatatcacatgtagagaagtctagtttcttcagtggaaaacacatgttttttaagtgctcaaggaatatttacaaaattgcttaatatttttaattaaataattaatatttaaagacttaatagacccaaaaggataacttacttatagacctaagcatgagagatcagtttgataaatattgaaaatgggctaaaaagcatgagtgggaaaataaggacttttcaacctacatgacctccctgaaatttattcttcattttgaaaattataggacaataatttctcccatccatgtggtgtgtgtgtgggcgggcggggggggtgggttgtggtgctttgtacgtgttaattggcttgttaccaataaggttatacagaggtattagcagcaaccagattttaaagagtactggccttcctggggttcccaaaaaaatcttgaatgcatttgataggaaaagttggattctgtctacataaatctggtactgaggaaaacaaattcactttggccatgattctagttacgaccaaactcccttcaaaaatgtagatatccaatatataatctatgtattgggttttaaaattttcctaacaactgatgttgctgaacaaaaattatggagaagttaaagagggaaaaaattgcaaaacaatgaaagagaatatgtcttcatttgcatgcttgcaartgaraaatcagcttttacttcaacgtcattatgaaaaattttattcaaattttttcaaaagaaaaaatagaaagaacastgtatgaatagtagttaacttgagctgttctgagaataacatattttccataaagacagcattgaactcatctataagcatgtgctggtgctttactgcttgacattggtcacacarctgaatttaaaagcatcaaaaatattagtgcacattcagaattcaggtacacatagagtttaaggtcaggaccttaagggggatcatgcccagtgatattagacttgcctttttttaaggtgtgtttgttcagttcatgggaagtttactaccaatcatttttttccatactagtaatggtrgaatttgtattttcccatgayacctatattaaatgtataaacatttttatatttcaacactttgtatgagtcctttcaggrcctgttaaacactccaaatttcccttgcaayatgccaataactaatcatattttctcaaaatgatctgacataatgtttgactgaaggcatatctctggtataattctatttgctgatatcaaatgagaatttgaaacttcatgaaaaatgattagaaaatttaataatagaatacgaataagtgcataaaatatacaattcattcttgagaaatgtgtataaaatcacaatcatagaatgataaaagagtaatatgtaatttttgaactaaagttacgttttaaaattgaatagaaaaagaattataaaatgttaagtttaataatttttatataaatataaaagtgtgaaaattattctgatattactcattttgaaaagaacaagaagtaatgagaattttcaaacactgctcctagaagtataaattratataattctttggcttagtatggcattatctgatgaagatgaaggagcacatcttaagactcagtacaggtactcttaccagaaaatgtatacacacacatgaatatcactgtgttttcatagctaaagttgagaagtttctcaaatgtcyatcagtgataaaatagataaataaattatggcatacctatataatagtatagtactatacagtaatcaaaatgaaccaactagagagacatgtttacaaraaatgtatataacaaagaaaataaacaaatttgagctgattagataatactcacaagtgtaagaggatctatcmatagtgaaaaacattcattttaattccatttatataaagttttcaaaaatatatctttaatacattgcaatttattacattggtgacaaaactctaaagtgaaacatatgagtgactattacaacaatatggatagtagggaggaggaaaacaagaggagaatgggatcaacagaaggcatatatggggagtgtctggatggctggaaaattcyattttttgaccaagatgtggtaaacacggggagtaaagttataaytttttctcttactgtgcttttaggttttgttgctttctgtctgtatgctrtgttccacaataataaaaatatttaaaaggcaaaaaaagtaaaataatgaatataaaattacactgaaactacatattctcatagatagaaytgtaattattagagtttttgctgaataaagtcaaatagactattatagtagttataaacrcaagttaaaattttagggccgggcaaagtggctcacgcctgtaatcccagcactttgggtggctgagcgggtggatcacctgaggtcaggtgttcaagaccagcctggccaacatggtgaaagcccgtatctactagaaaatayaaaaaattagctgrttrtggtggcgggctcctgtaatcccaactactagggaggctgaggcaggagaatcgcttcaacctgggaggcggaggttgtagtgggctgagattgtgccattgcactccagcctgggcaacaagaatgaaactccatctcaaaaaygaaaaaaaaaaacaaaaaaacttttctttaattttaaaaataatatataagcaagaactataaattcaaattcttaatgctaatcttaatttgaaacatcaaattttgaatattgatacattgctggacaccttttgttcttatttccaatttatttacaatgcacaaagtgacagaaattactgaattttcaataaattatggtactgtagatattaaattatacrgatgattatccctaaatttatccttaaataaaataatttcagtcatattgttaccattcaaaaatcayagtatgtgcacacatatrtsttggaaaaaatattttgttgctataattttttggctctctattagagaaaaaaccagaaagttaaatgtgttaaagtgtaaaacttacttagtataatctttgggtatgtttttgtatgtgtagtgctgcattgcttgctataataaaatactccaagggaccaggtgcagtggctcaygtctgtaatcccaacactttgggaggccgatacaggcagatcacctgaggtcaggagttcaagactagcctggccaacatggcaaaaccccatctctgctwaaaaatacaaaaattagccgggtgtggtggtggatgcctttaatcccagctactcaggaggctgatgcaaggagaattgcttgaacctgggagtcagaggttgcagtgagccgagattgtaccatggcactctagcctgrgcaacagagtgagactccatctcaaaataaaataaaataaaatactccatatttcatcacagtagctgagaatgyaaataaccatttgaaagaatttggcttgctaatgatgctattgatacatatgataaattttaygtactgtataattgcacagagtatttgtacatgttcatatgaaaatgcaaaaaaacaaaaaamcaraaaaaccaaagagcaggtgctatttgctggaagwcatgtttgctatgatttttagaatttaataaaagaaaaaaaatagctagcaaacttttggaaatatgttggtttaaagttgtcattgatgaaatactatgtgaaggtgataggagcaggaggctgggaaattctagacagaaaagggcgggtcctcagctaaagccccactctcaagccaaatagactgagactgtggcccaaagggagtacttctatccctgttttcccactcaaatgttgcctttttkggcctgccccacccctcatcctatgcccataaaaccccaggctccaccggtagtgagaagtggctgaagatcgagaggagaagcagctcaatgttgtagactatggtgggacgttggagagaagtggcttgacttcagagggacaggttgaaggcgtgactttcgagaagagtctggctggagacagccggacttcaggggaagattaccttcctgcttcacattccctttccagctccccttcctgctgagagtcacttccatcaaaataaaatctccctcatttmccattctccaattcggttgtgcaacctcatttttcttggaagctggacaagagctcaggagccaggaatgcagatacgaaaagttgttamactgaacctctgcccttgctggcaagaggcagccgcctcaagcgaaaaggcaaagggcccactgagctactaacacttaagacgtctgcagatagcagagctaaaagagcactgtaacaccctccccctcgaggtttcaggggtgcgggcaccccccyagatgctgctgcggggcctgcacagaatttgttcctgctggcatccaaaagtgctcctgcacctgttcacctgtgtgctccctcccatgagggctgggcgcagtgggtcccagcgagtggatttcacccctgccagccctaaagcagctggctggttctagcgtcagtgagccccagttccctcccatgaaggggtaagggaaatgtcctccatcaaaggtattattycagtctaagccctgatgctgagaataatatgagaatcataaagccaggagaaagaataattgkgttatcccattaycctgaattgtagcacttagaaaaatgaatggtcacatttattagcyagcagtctaccttgtagctatcatcatcatctctatctacatctatcccattaaataatttactttttgaaatatrtacattcataaattggataatgcctacgtaatttaaawaaasaatatcattatgggcaagttacrttagtaaacggtaaagttcaagtcaagctaaatacatttagatttagaaattaagtttagtttagtttaaaatacattgcttaagaaaatagttatttatggatgaccttaaactaatccaaggaacactataataaasatttagtttttaacgtaaatacaattcttcaatcagagagataaaccatttcatgatcaatctattatttttgtttattatttttattatttatttatttttcttttgagacggagtctygctctctagcccaggctggagtgcagtggckccatctcagctcaytgcaacctccgcctcttgggttcaaacgattctcctgcctcagcctcctgagtagctgagatgacaggcacgtgccaccacaccctaatctcttatttttaaaaagaggattttaggactaaacaaatcaaatgtaagtttcccctcacctctttgatctctcacttgrgtaatgatgcagtttgaaggcaaagagccccatttctacattataagcaaaataaaagttaattcatggaatacaatggtgtatttgtaattgaggtactatattttatttattggaatggcattttgagatccagtgctgttcattgmatttccctgtaaggagagtttgtggtttggactcatcaagctgctatgccaaaaacaaaacaaaacaaaacaaaacaaaaagctaatcacatgaaatcaatttcctgtttcttccaacttgcaggataaggcctagacgaagcttttattgtattgtgtgacccmagtgttgggaaaagtagaaaattgttaccagatgtgaagaaacatttaggggcttgaaaagcagcatggaggtggacctaggctctttgcaatgttccacgtcttgccttatttgatggttacatgagtgtttataatacattgctgtgtttaccatttttattttgactcatttctaagtgtgcattataattttatttgaaaattatttattaggagaagtgcaccataaaaattattgattactctgctcattatatacctaggaaaaaattcaccatttatatatctttacatacaactctaagagagttgaagtgggaactttattttagttacaacatgtagaaataagagaagacgctacctgaagtacccagatctttccaaaggtttttttctacttttttttttttttttttttgagacggagtcttgctctgtcgcccaggctggagtgcggtggcgccatctccgctcactgcaagctccgcctccggggttcacaccattctcctgcctcagcctcccragtagctgggactacaggtgcccgccaccasgcctggctaattttttgtattttttgtagagacggggtttcaccgtgttagccaggatggtctcgatcccctgatctcttgatctgcccacctcagcctcccaaagtgctgggattacaggcgtgagccaccgcgcccagcctctacctttaattatctaccttgcatgacaaaactttgccrttccttatctatttttcttttggctcctctattcctgacacaacaagggtggacatatttcccacacgcttggtttwgcagagtacctatatcagttaggtttttctgccagagaaacctctccaacactacattacatattgatatctcacatgtctttggattcagtttttctaagctgggtttgctggatggctctggtgatatgagatgggccaagttctgcatcttggaattagttagagtttggacaawgtaggctggatcaggcarggacaaactgactccattattttctcattctccttctgggaacagagtagtagccaggcaatgttctcataataaacagaaaaggaaaagaaactccartgtggaaaccatctcaaacctctgtgtgaagtctaccaattttctgttaatcaaagcaagctatgtgagtgtactcagagtccaggggcaaggtagtcaccctgtgtgtggtgggaaaatactgcaagattatatgtcaaataatgggatactcaggaatatttacaaaaatgttgaatattttaatgaaataacaaatatttagacattcaatagacttgagagtaactttaccaagggtctaagtatgagagatatgtttaatatatttttatgggctgaaaaccctgagtgggaaaataggactaatttcaccaggatgacctcctggaaatgcattttccattttggaaattattttaaaagttcattttttctggatgggtatgtgtatgtgtgtgtgtctgtctatgtgtgtatgttttatgagcttgttaacactaatgtcatacaaaagtactggttagcaggaataagattttaaggtgtattggcattcccatggttcccaagaaaattttcgatgactttgattaaaaagtttggattttgtctatttaaatctagcataaaaattggtcatggtgatgatcctagttatractaatctccctttaagatttaggcatttactgtgtgaaatatgtggcacattttccataacaaacagctaaagttactgaacacaaattatggaaaggtgaaatgaggaaaacattgcaaaacactgaaagagaatatgtctttatttgcatgctggcaaatgaaaattccggtttcacttctacttcagtatctaacaagtctctaacaagaacagacattgaatgaatgaattaagttgagctgtttgaaaattagaatgttttccataaatacattattgaactatcaattagcataaactgctactttcttgtttgacactggtcacagtatttgaaagtaaaaagaatgttactgcacattcagaaatcaggtscacataaaatttaaggtcaggatattaaaggatcacagccagtgctgttaggccttcrtttattctatctttttgtctgttcagacatgataacttttctacccatcattttttccattctagtagtggttacatttgttcttgggaattttgctaatggcttcatagtgttggtaaattscattgagtgggtcaagagacaaaagatctcctttgctgaccaaattctcactgctctggcrgtctccagagttggtttgctctgggtaatattattacattggtatgcaactgttttgaatccaggttcatatagtttaggagtaagaattactactattaatgcctgggctgtaaccaaccatttcagcatctgggttgctactagcctcagcatattttatttsctcaagattgccaatttctccaactttatttttcttcacttaaaaaggagaattaagagtgtcattccagtgatactattggggtctttgttatttttggtttgtcatcttgttgtggtaaacatggatgagagtatgtggacaaaagaatatgaaggaaacgtgagttgggagatcaaattgagtgatccgacgcacctttcagatatgactgtaaccacgcttgcaaacttaataccctttactctgtccctgttatcttttctgctcttaatctgttctttgtgtaaacatctcaagaagatgcagytccatggcaaaggatctccagattccaayaccaaggtccacataaaagctttgcaaacggtgacctccttcctcttgttatttgctgtttactttctgtccctaatsacatcgatttggaattttaggaggaggctgtagaacgaacctgtcctcatgctcrgccaaactactgcaattatatacccttcatttcattcattcatcctaatttggggaagcaagaagctgaaacagacctttcttttgattttgtgtcagattaagtgctgagtaaaagacctgaaactctcaaatttctagattcacaagtgggacatcgtgtgtctccaagagaaaacaaactgatgttgtctggaacattttatactttccactggtttttctgtattgtatgtttttgagtaatttccaaaagtatatctagaaaagtcttttacctaaagttagtctaaaaagtatctatatatgcatgtgtatgtgtatatgaaacacttaagagagagtggcaataacataatcattttttacaaactgccaaattatagaaaatattgtaagaaatttttcagaatcatgaagccatgtgtattcacaatacagttcatattatcatgtttcatttgaaaaatttatgatctctatttataattgttaagaacttacagcttatttcacaaaatcattgctcttttccactgttatttgtaccatacgtatgtaccatastgtgcttaaacgtgattatttgaacgtctagttttttggatggtatgmgcattctaatctaaatcaataatgaagttttatctttggggtagtttttgttkcataatgaattctaattttatgtttaatttaaagcaaacaattattgttagaaaactatgcacaaaataaaattcaaggatgaaaaatatatttggaatacattttgtatatgtctaccatcatcagtactgaggaatattagattttatacaaatatgtgaacaactgagaaaaaagtcatatctgtaatagggatgaagaaagaaacacaatgctgacctcttaastgctgtcataagtctccatatacaggtagaaaagtcatttcttccagtttttgaggtaaagaaaaccttttttgaaattgagatcggataccaaatatttccgtttctttcctaaactgcttcagagcccctaaattgccgattctctccactatcttccacatttaaaaatctttttaaamatcacataaatgaactcaaatctttattacttgaaaaaatactccatgtaaaaatagtatagaaattatgaaaatcatttgaattatactttctgcaaattctaaaatgacgtctatgacatctatgtattgatgataggaaatgacttaaatatatgttttattataatctagttgcaaataatgcagtgagagaaagtgtgttgacatattcagtgatagcaagttctattataggaaaaaatgtataacgtcattaaacaagtaaattctacagactgtatcaattctcggagttatgaaattttaacaatgttatctaaaccttgagataaatcatttgatttagttatttgtttgtttattatatatctttcctggtacaacgtaagcaccataaaagcagagaccctggtcggggtcggtggctcacgcctataatcccagcactttgagaggccgaggtgggcggatcacgaggtcaggagatcaagaccgtcctggctaacgctgtgaaacccggtctctgctaaaaatacaaaaaaattagcagggygtggtggcgggagcctgtagtcccagctactcgggaggctgaggcaggagaatggcatgaacccaggaggcggagcttgcagkgagcsgagatsgcgccactgcactccagcctgggcgacagagcgagactccgtctcaaaaaacaacaacaacaaaaaacagagatcctgcagaccttgcttattgttgactgccaggacctaaaagatcacataaaaaatagatagccaaaaatattttgaagaacaaatgagttagtgaatagagtaataaattacatgtcttggggtggtgaaccagtgaaaatgaarcatcacaaaatctacagttgcatgaatttgcctattctggtttctggttgagatgacagaattatctaagaagaagcatttttcagagtaaaagtgtggttattccatacttgcaggggaaatatcgctatatatagccttgatgcagctatatcagactaaaaacatggagataaggtggaacatcaaaatcacatggcacccactacaataccttcaaaacagcatataaaagacttttggatatttgtatatattttctcgattgtgaatgatatatttgtattctgatatttctagctggttattatgtaaaaaatgcatttcaattttaaaaattgagttagttatgaattaccttactaaaatgtgatttttatataatatttttaatatcctttctaaatgaacattttaattgccatattataaaatcacagaaaagtgagtgaaaaataaattataccactgaatgaatatcttagctttggaggtctagaactagagccagtgtctgatattaaagtgataacatttctttggaaggtaagtccagggcagcaatggcagggacgcgtggaaattgaggcaagagcacgtggaaagtgaggcaagagcagatgtgaaagaacgtgttgggatgtattgtaacaatgtgttgtgtgtatgtgactctgttgtggcaacttcattataaggtgagagagacagcatggtggtcatcagatgcatgcacytggaccccagtacttttccggaaaggctacaaggggaataccacagccagcattagtccatggaagcgagagaggagggagaatgtatctgttcagctgtcttctgtcttccattttccattggccagggtttccctgaggcggaactaccatctctgctgttctgctttccatcatccagtccgttggtggctgttatgaaagacagacctcaggcccacagtgtggtgttccattcaaggaaggatggtaggatgatctggatcaggcaaggtgctggcctagagaataagtgacagttaagggaatctgaggaagcacatgtttaagtccaatactgtctactccttgtaccactcaratttgctcatgtcttccaatcatggctggctttatgggcatatgatttccactgttgcacagggtcttgtgcttagaggcgctcatgcttagaggggcaatcattagtcttcctgttgcatgctgtattagcagcaatgaacctggtttatttgggggatgctgccatcttctgattttatcattgttcgctgggcacctcttctcaatctcctttgctggttctttctcttgtctctaatcttctgcaactgctgttttgtttttgagacagagggcactcctctgctgaagagggaatggtcttgcactaattccctaggagttttctctcccctctcctgtggatttgtcagagacttggacagagtcctgtaatgcccactatgcatgcctctagcatgtttgaattctgctggatcatctggcacaacgggcagagcagcttaggccagaccctatagctgttatggaacccttttttgttctggtttccacttgagaccaatggcctttggaaactccattagtgagtcagagcaatatcctcaaatgaggaatatgttgactccaaaatcccaataggcccaaaaaacactgtgcctcttttttagtgagaagaattatgtatcaggaaacatgccgtttactttaaaaaggatgttttgacacaaggaccaggagcatggacctgtaaaaacaccatctatgttataagttcctgaatctgctgaggtttatgtctctcttcttctgatattttacttctgttcaaagtaatactattttactatatttaaggaacttgccacttcctgcttatgaataccaattaaagtaatattattaatatattgagttagcatgatgttttgcaaaatgccaattaaactgaaaacagaagtgacacagctctgacataaaacagtgaagcagtgcttttgttcttaccccaacaaacaaattgttttgattttctctcacaaagggtgtagatttaaaaacattcgccaaatcaaaagccacatacaaagtaccagaaaccacgttctgctcagtgaaggtaccacatcctagagagcatctgcaagtgcgatttaagtttatgctaatgtgcattcatctgataatccatctggttttggcagaggccagataggttaactgaatagggatataaaatgtactaccacccccagtgttcattatcaagaggacttaagcttcctttcagtcgtttatctctgcttctgtgaattggctcagtcctgagaactggctgagggtctttgatttgtcatatcagtgcctgacctcaggactcagctttttcaactctgttttcctcttgatttatagttatttagcaaagtatgaagcctcttcaactattggcctatcagcccaatccaatgaggctgttgctgtcaccacttcattaaatctgacatttgttaagatcaccagtgagtgcgtgttgccaatggttagtcttcatgttgcatgctctattagcaacattggacatggtttactggggggatgctgccctcttctgattttattgttgttcactgggcacctcttctcaatctcctttgctagttctttctcttgcctctaaactgaaaatgtcacactgccgaaggtctcaattcttcaatctttaatcaatcagacttgttttgttggtgatctcatgcagtctccttactgataatgtagccaaatggttcaatagagaggaataaggctgattattcatctatatattcatatatatcattttaatatagcattgcagatattggcagattgatatgtggggaattttaattatatgatgatctatatataattagataatgatataagtgaagaaatacatagatagaattatggtttactaacccatttttgatttcttgcgttttgtacaatgtctcagtatctgttagtatcttatttcttaagtttttttctctatgatcaattacttatgagttaatttttgtgtacagtataaaataagggtctaaatttacgtttttttccttctcttttaactcccacttcttaggtaagttcatctactcatggccttacttattttctgtgtgctgatgatgccaacatttaatctttcagctgagatctcaacgctggtctccggaatcctttctctratagactatttgacatcttcatttggatgcctaacaggaacttgaactaacatgtccaaatcaaaatactgctcttcccccaattgtcagatttgtttcttctacagtctttccctcttctgctaatgaccacttcagactttcagatgcttagactaaaaaaaaatggagtcaatattttctctctttcagaacctatctttaaggcatcagcaaattttgttgactctaccctcaaaaacmtacagaatccaatcccttgtcatcactctgccatactagtctaaactgctgcatatcttgccaggatatttgccatgagtttctaattattctttctagttctgcacatccttttatcctgatgtaytctcaaggtggcagccagagagaacctgtaaaaacgcaaatttgatcatgccattcttctcctccagatttttcagtggctttcatctaattcagagtaaaggccaaatccttacraagtcttataatcatttgaatgatctgattttgtctgcctgtgtgccctaaaacacctggctcatcccatgctaacaacactggcctttgtgtcacttcttgaatatgccaagcattgcctcagggacttcatacttgtgtcccttcttcttggattgctctttctcagatatcaacactgaacgttatcactcctcagatatcattgaatcattgaggcctccaatactaccttatttaaagataaatctcatttcactttgcagtttttttttctttttttagcttttattttagattctggggtacatgtgcaggtttgttatgtaactaaattgcatgtctcaggcactttgtgtacagattattttgtcactcgggtgggaagcagagtacctgataggtatctcttttatcttcactctcctccttctctctgttcacatagaccgtggtgtctgtcgttcccttctttgtgtccatctgtactcaatgtttagcacccacttataagtgagaacatgtggtatttgttttctgtttccatgtttattggcttaggataatggcctccagctccacccatattgctacatcatcttgtttttttctaatgactgcatagtattccatggtgtgtatgtaccatattttctttatccagtctactatttatgggcagttaggtttattccatgtctttgctattatgaatagttctgtcatgaatattttcatgcatgtgtctttatggtagaacaatttatatttctctggatatatatccaataatggaattgctggtttgaatggtaattctgtgttaagttctttggaaaattgccatgctgatttccacaatggctggactaatttacctccccaccagcagtgtgaaagcattccctttcaccacaatcttgccagaatctgttgttttttgggggttttagtaatagctattctgactggtatgagatagtatctcattgtggttttgaatcacatttctttaatgattagttatattgagcattttttcatatgtttgttggctgagtgtatgtcttcacttgaaaattgttcatgtcctttatcaaatttttaatggtggtatttgttttttgcttgtaaatgtaaattccttatatgttccggatattacgcctttgtcatttgcatagtttacgaaatattttctcccattctgcaggttgtctgtttactctgttgatagtttcttttcttgtgcagaagctcttcagtttaatgaggttccacttttcaatttttgtttctgttgcaattgattttggtgtctttgccatgaaatctttgccaggtcctatgcaggaatggtgtttactaggttatttttccrttttttaaaaaaatagttttaggttttacattttattatttaacccagcttgcattgagttttgtgtatgtataagaaaggtgtccagtttccatcttctgcacatggctatccagttatcccagcaccatttatagagcagggagtctctcctcatggcttgtttttgttaactttgttgaagattagatggttgtaggtgggtggcattatttctcgggtctctattctgttcccttggtctacgtgcctgtttttgtaccactaccatgctgttttagtctctgtatccttgtagtatggttcagtcaggtaatgttatacttcctgctttgttctttttgtttggtattgccttggctatttgggctttttttttttcattcccagtgaattttaaaatagtttgtttctaattttgtgaagaatatcaatgataatttgacaggaatagcattgaatctataaattggtttgggcagtatgggcatttaaacaatattgattcttcccatccatgcacctggaacgttttcccgtttgtccatgtcttattggatttaattgaacagtctcttgtaatactctttgtagagatatttcacctccctggtcagctgtattcctatgtattttattttttgggactattgtgaaagggattgccttcttgatttgtctttgcttgaattttgttgctataggaatgctactaatttttgtacattgattttgtatcctgggaatttgctgagtttgtttatcagaccaaggagattttggccagaaactgtggggatttctaggtataaagtcacattatctgcgaacagggataatttgacttcttctcttctattgggatgccttttatttatttctcttcctgattgctttgaccaggacttccagtactgttgaataagagtggtgagagaggacacccttgtcttgttcctgttttcaaggggtaatgcttccagttttgcccatttagtatgatattggctgtgggtttgtcatgggtggctcttattattgtgaagtatatatcttcaatgtctagtttgttgagagtttttaatatgaagagacattgaattttattgaaagccttttctgcatctattgagatagtaatgtggtttttgttagtttcacttatgtgatgaatcacatatattgatttacatgtgtttaaccaaacttgtatcccagtgataaagcctgcttgattatggtggattagctttttgatgtgctgctggattcaacttgctggcattttgtggagtgttttttttaaatctatgtttattgaggttgttttcttttattgttgtgtctctgcctggttttggtatcagggtgatattarccttgtagaatgagttagcgtggagtttcttttcctcagttttttagagtaggtttagtgtgaatagtaccagttctttatacacatggtggaattctgctgagaatctatcaggtcctaggctttttttgtttgtttgtctggtaggctttttattactctttcaatttggaacttgttattggtttgctcagggattcaatttcttactgattcagtcttgaaaggttgtacatatccagcagtttatccatttcttctaggttttctagcttgtgggcatagaggtgttgacagtagtttgggaggattgtttgtatttcagtggggtcagtggtaatatccacttkgtcatttttgattgggtttatttggatcttctctcttttttttctttattagtckggttaggggtctatcatattaattttttaaaaacatcaaatcctggattcactgaccttttgtatgttttttttaatcacaatttccttcagttcagctctgattttggttatttattgtcttttgctagctttggcattggtttgctcttgtttgtttagtttctcttgtgaagttatgttattaatttgagatcattctaactttttgatgtgagtgtttattgctacgaactttcctcttaacactgccttatccatatcccagagattctggtatgttgtatctttgttctcattatgttcaaaaaatttcttgatttctgccttaatttcaatatgtacccaaaagtcattcaggagagggttgtttaatttctatgtaattatatggttttaaggtattttcttagtatttatttatatttttattgtgctgtggtccaagaatgtggttggtatggttttctttttttcatatttgctaggaattgttttatgttaggttgtgtggctgattttagattatatgccatgtgcagatgagaagaatgtgtattctgttgttttggggtgaactgttttgtggatgtctattaggttcatttggttaagtgtctatttcaggtcctgaataactttgttagttttctgccttgatgttctgtctagtgctgttggtggggtgttgaaatctcttgctattattgtgtgattttctaaatcttttaataggtctctgagaacttgctttctgaatctgggtgttcttttgtcaggtgcatatacatttagaatagtaatgtcttcctggtgaattgagcctttttcaattatgcaatgcccttctgtttcttcttgatctttgctggttaaagacagttttgtatgaaagtagattatcaaggtcaggtgccatggctcagacttgtaataccagcacttcaggaggctgaggtgggtggatcacttgaccccaggagtttgagaccagcctgagcaacatggcaaaatcctgtctctatcaagaaaaaaacaaatacaaaaattagccagtcatggtggtgcacacatgtggtcccaggtacttgcaaggctgagttgggaggatttcttgagaccaggaggtagaggttgtggtaggctgagattgcgccactgcactatggcctgggcaacagagtgagaccctgactcaaaacaaacaaacaaacaaaaagaagttagaatagcaaccctgcttctattttccatttgcttggtagatttttctccatcttttaaatttgagcttatgggtatcactgcatgtaagtgagtctcttgaagacactataccattgcgtcttgcttctttatccaaattgcctctatgtgccttttagttggggtgtttaacctgtttacattcgaggttagtattgatatgtgggaatttgatcctttcattatgttgttagctgcttatcatgcagactggtttctgtggttactttatagtatactggtctatggccttaagtgtgattttgttatggctgataatgatctttcttttctatgattagcaatccattcaggacctcttgtgaggtgggtctggtggtaatcaaatcccttagcatttgtttgtctgaaaaagatcctatttctccttcacttatgaagtttagtttggctggatatgaaattcttggtcggacattctttttcaaaaaatttctgaatatgagcccccatctcttcctggttgtagagtttctgctaacaggtccactgttagctcaatgctgttccctttgtaggtgacctgccctttctctctagatgcctatggcactttttctttcattttcgccttggagaatctgatgactatgtgtcttgggtatattcttcttgtgtagtatttcgtaggggttctctgcatttcctgaatttgaatgctggcctctctaacaaggttgaggaaatttttatggactatatcctgaaataggttttccaagttgtttgccttctattcctgtatttcatggatgccaatgagtcatatatttagtctgttaacaaaatattatatttcttggaggttttgtgcattcttcttcattatttttctttatttttgcctgactgagtaatttcagaggactactcttgagctctgagattctttccccagctttgttgattctgttgttaacacttgcattagtattccaaaattcgtgaagtgatgttttcagctctatcagatcagttggattttttcttaaaatgaccattttgtttgtgtcttctgtatcattttatggcgttcctcagaatctttggattgtgttttgactttctcctgaatttcattgatctttgttcctatccatggtctgaatcatatttctgccttttcagcatgggagggaactagcgtggtcatttggaggtaagaagatactctggctttttgagttgccacagttattgtgctgattctttctcatctctgtgggctgatattcttcagtcttcgaagttgccattctttggatttttttttttctgtttttatcttctttgacacactttggggtttcactgtggattccatcaaatgagtttgtttctggtagattttaggggggaaaagatttctaactctaagtctggggtctagttttggacaccggactttgttctctggcacctcaacattgggaatctgctgtgctggaagggacattgtgttcctgaattgctggccacaacactctgaaggatggtaccagccaaagctcttcattgaatagtgacagtgtaacgcaagcttgttaacacatgccagcagcagcagtgtggcagggtataggctcttggaccgggatggggtgcaggctggcccaaggctgccagcttccatgcgggcattggcagtagcctaaattcatctttatgcatgtggatatttaattttcccagaatcatttgttgagaaaaatgattaattcctattgaattgcaattgtatgattttaaaaatcagctgaccatgaatgtcattactaatttctggacagtcaattgtgtttcattgttctttttgtctctcatagtgcaattaccacagtgtcttgatttagtccagtaaacttgcagtaaactttgaaatgagaaactaatcctccaactttgtatttaaaaaaaaattattttattggcctaatcacttggcatttccaggcatatttttggagtagttttacattttctgcagaaaaagctttctgtgacgtgatgagggttgcattataaattgctcttcacacgtaaagactcgccttgtgctggatttcatttcaggtggtccttattgcttgcaagctctttgatgaatacaaacataattttggcccctttatttatcttatgctagttgttgcagaaggacatcttgctttcttgaacctattasatctattcaaaagtggaagttttcacaggtaacctctctgtatcaagtaacacaagatcaaataaaacacgagcaatccttgtttcgtgcctgaaccagacaggtgatattgaaatcagttatacaaatgtgtactaactcttcataaagactatccaaagagggtattattatcatctgcatttaatagatagctatcctaaggctgttgtaaaatagattctcggatcatacctatatgaagcagagaactggatttcctttcctggcagtctgactccaagatcctttcttagaaacaattatactgtaaaaactgagaatgaataaaacccaacattggagactgattttaacatctgttaatcttaaaccattaaataataaaaataagttaaaatgaaagaaaaatatccaaatattcatatacagagaagtcaatattcttcaatcgaaaacacattttttaagtgctcaaggaatatttacaaaaatgctgaatatttaattaaataattcatatttgtatatcaaattgacttaagagaatgacttccttaaaagcctaaggatgcgagatcagttcgataaatattgaaaatgggctgaaaattatgagtaggaaaatagggccatttcaacctgcatgtgacatccctaaaatttattttccattttggaaactgtaggacaaaaactattcccattcatgtggggtatatgtatatgtgtatgggtgtatatgtcttcccaagaaaatcttgaatgcttttgataggaaaaatttagattctgtttacatgtatctggtattgagaaaaataaattaacagcagtcatgatacaagttatgatcaagcttccttcagaaatttagacatccaatatatgatctatgtattgggtttaaaaatttccatagcaagtgatgttgctgaacacaaattatgactacacgaggaaaatattgcaaaacagtgaaagagaatatgtcttcatttgcatgcttgcaaatgagaaatcagcttttacttcmaaattattatgaaaaaagcctatagcaagaagagacgttgtttaaatagtaggtaatttgagccgttttgaaaattacattttttccataaaggcagcattgaactcatccattagtatgccctagcgctttcctatttgacattggtcccagaattgaatttagaagaaccaagaattttactgmacattcagaaatcaggatcgcagagagtttaagatcaagaccttaaaggggatcatgaccagtgatactgggcttgcccttttttaatgtgtgtttgttcagacatgggaagtttactaccaatcttttttttttccaaactagtaatgatagaatttgtattttcctatgatgcctatattaaatgtataatcattttaatattttaacacttttttaatgagttctttcaagggttgttaaacaatctaaacaatctaattttcccttacaatatgctgatagctaatcatattttctcaaagtcatttgacataatgtttgattgaagaaaatatctctggtatgactctacttgctgataacaaaagagaatttgaaacttcaagaaaaaagattagaaaagttaacaacataatacaaataagtatattaaatatataatttattcttaagaaatgtatatgaaatcagagtcgtagaatgaaaaaagagtaatatgtaatttttaaactacagttacatttcaaatgtgaatttaaaytgtaaaatgttaagtttaataatattttatataaatataaaagtgcaaaaattattctttgatgtttctaattttgaaaagggcatgaggcactgacaattttcagacacttctcctaggattatcaattgaaagaattcctttggctgagtatgacataatctgattatgatggaggatcacctcataagacccaatatttgtactcctactggaatacatatgaaaaaagtgtgtatcactgtgttttaatagctcaagttgagaagtctcccaaatgtccatcagtgataaaatgataaataaattatggcatacttatgcggtagagtactatacagcaattaaaaagcaaaccagagtgacatgtttacaaagaatttatataacaaagaaaatgaacaaatttgagctaaatagctaatacagatgtgagaggaattatcaatattgaaaaaatattcaatataattcaatttatatgaagtttgcaaaaatatattttaatacattgtaatttattacattggtggcaaaactctaaaacgaaacatataagtgattatcataacaactgggatatgtgggaggaagaaaactaaagagaaacaatatcaacaagaaggtatatatggggagtgtctggatttttggcaaattttattttttggccaagatgtagtaaacatgggagataaacttataattttttccctaactgtgtatttaagttttgttacttttcataactatgttatgttcgacaatagtaaaaatatttaaaaatcagaaaataaagtaaaataataaaaaattaagccaaaactacatatgtgcatagatacaatggtattataattatcatgtttttcttaacaaagaagcatagtgcattatggtagtaagaaatacaagttaaaattataagcttttctttaaattaatttttaaaagaaggtataatctagaaatgtaaatttaaattcttaatgctaatcttggacaaagcctccaggagcaactgaaaacctctctgccactggcctctgcagtagaactgcccttgccactcttggactaatgaaggagcaaagatcctaagtgccttatccatacctccaacaagatgcagtcaacccaaggagagaaacccagttagacttccatgggtcccacaaatgcacaaaccctccatcttgggctgactgcactgagtgtttgctgacctgcatctctctgggatggaacccccagaggttgactcttggccacaaccactactaagatctcttcagtgctacctctaaactgggaaaggaatataaacactgagattccaccagggctgcagttggcagctcaggaatgccaagttttgaactgtagccaggactgaagggcacaaggaacctacatcttcagaacactgagagggaacatggctgcaactgtgaggaaacataggggaaacatataattgagcaacagtctatcaactgaccaataagcataagtgtcacctgctggattacaccccaaaacttcaacaccaaaaatgcctcactaacataaccccctttgaagccagagacacaaagtcagcttcaaataaataccctacacaaaggctctccctggtgaaaacatccagaaaggaagtctatttactgtgcctaatatacactgcagttaaagaaacacccacatacagagatgagaaagaacaaatgcaataactcaaatggccagaatatcatatttcctccaaaagactacagcagttttccaacaagagttcttaacaaggttgaactggctagaatgacagaatacagtatatggcagaaacaaagattattgagatttgggaggaagacaaaacccaatccaaggaaaataagaatcacaataatgtgatacaggagctgaaggatgaaataaccagtattagaaagaatttaatgggtctgacagagctgaataacgcaatacaagaatctcacaatgcaatcacaaggattatcagcagaatatactagtctgagggaagagtttcagaacttgaagactggttttctgaaataatacagtcagacaaaaataaagaaaaagcataaaaagaaatgaacaaaacccctgagaagtatgggattataaaaagaggttaaatctgtaaatcactggaatccctgaaagggagagccagaaagcaaacaacttggaaagtatatttcagaatatcattcatgaactctttcccaaccttgctagagaggccaacagacatattcaggaaatacagagaactcatgcaagattctacacaagatcatctccaagatatataatcatcagatttcccaagattgaaataaaagaaagaatgttaaaggcagccagagagaaagggcaggtcacgtacaaagggatttctatcacggtaacagcagatctgtcagctgagttcttacaaattagaagagattggaggcctatattcaacattcttaaagaaaaaaatcttcagccaagaatttcatatccaaccaaattaagctttttaagtgaaggagaaggaagatttttttcaggtaagcaaatgttgagggaatttattatcaccagawctgccttacaagagatcttgaaagcggcacttagtatagaaaagaacaccactaccagctaataaaaaaaaccctgaaacacagagaccagtgtcactgtaaagcaacaacacaaacaagacaacataataacaagctaacagcacaatgacaggatcaaatccacacatatcaatattaatcttgaatgtaaatgggctaaatgacacaattaaatggcacagaatggcaagcaggataaaaaagcaagacccaatggtattctgtcttcaagagacccgtctcaaatttaatgacactcataggctcaaaataaataaatggagaaaaatctaccaagcaaatggaaaacagaaaaaaggggggttgcaatcctaatttcagacaaaacaagtttcaaacaaatgaaagttttttaaaaaaaagacaagcaaggatataacataatggtaaagtattcaatttaacaagaagacctaacaatcccaaatagatatgcacccaatacaggaatgtctggattcatgaggcaagttcttagagacctacaaatagacatacactcccacccaataatagtgagtgacatcaacactccactgacagtattagatcatacaggcagaaaattaatgaagatatttaggacctaaacttagcattggaccaaatggatctggtagacctttacagaagtgtccatccccaaataagagaatatacattcttttcatagccacayggcacatactctataatcaaccacataattggatataaaacaatcctcaacaaatgtaaaataaccaaaatcataccaaacacactctcaggccacagtgcaataaaaataaaagtcaacacaatgaaaattattaaagcatacaattacatggaaattaaacatcatgctcctggatgacttttagataaatttaagtctgaaatcaagaagttctataaaaataataagaacaaagatacaacaaaccagaatctctgagacacaactaaggcagtagtaagagggaaattcatagcactaaatgcccacatcaaaaagtttgtaaggcctcaaattaacaatctaaattcaaaattgaaagaattagagaaaaaagaacaaatcaaccccgaagctagcagaagataaggaataacacaaatcagagctgaactgaaggaaattaagacacaaaaaaccattcaaaagatcaatgaatttgggagttggaattaaaaataattataaaataggccactaggtagactaattaagaagaaaagagagaagatccaaataaacacaattagaaatgatttaaaggaatgttattacttaccctacagaaatggaaacagccatcagaaccactgtaaacacctctgtgcagacaaactagaaaacctagaagagatagataaattcctggacacatacaccctccctgctgctggaagtcagagaccccaaayggagggaccagctgaagccatggcagaagaacataaattgtgaagatttcatggacatttattagttccccaaattaatacttttataatttcttatgcctgtctttactgcaatctctgaacataaattgtgaagatttcatggacacttatcacttccccaatcaatacctttgtgatttcctatgcctgtctttacgttaatctcttaatcccatcatyttcataagctgaggaggatgtatgttgcctcaggaccctgtgatgattgcattaactgcacaaattgtagagcctgtgtgtttgaacaatatgaaatctgggcaccttgaaaaaagaacaggataacagcaatgtttagggaaaaagggagataaccttaacctctgactgctggttagctaggtggaacagagccatatttctcttctttcaaaagcaaatggagaaatatcactgaattctttttctcagcaaggaacatccctgagaaagagaatgtgtccctgaggggaggcctctgaaatggccgctttggggacggctgtcttttacagtcttagctgagggatgaaataagctctggtctcccgtagcactcccaggcttattaggatgaggaaattcctgcctaataaattttggtcaaaccggttgtctgctctcaaaccctgyctcctgataagatgttatccatgacaattcatgcccgaaacttcattagcaattttaattttgccccggtcttgtggtcctgtgatctcgccctgcctccatttgccttttgatattttattacctwgtgaagcatgtgatctctgtgacccacaccctatttgtacactccctccccttttgaaaatcactaataagaacttgctggttttatggcttagggggcatcactgaacctgccaacatgtgatgtctcccccagacaccagctttaaaatttctctcttttgtactctgtctttttatttctcagactggctgacacttagggaaaatagaaaagaacctaagtgaaatatcgggggtgaatttcacccgatactcccaagactgaaccaggaagaaatttgttccctgcacagaccaataatgaactccaaaattgaatcagtaataaatagcctatgaacccaaaaaagcccaagacctgctggattcacagccaaattctaccaggtgtacaaagaagagctgttaccatttttacagaaactaatccaaaaagtttaggaggacttctctttaattcattgtatgaggccagcatcatcttgataccaaaacctggcagagacacaacagcaacagaaaattacagaccaaaatccttgatggacatcgatgcaaaaatcctcaacaaaacctttgcaaactgaatccacaagcccatcaaaaagctaatccaccatgatcaaataggcctcatcctggcatgcaaagttagttcaacatacaaaaatcaataaatatgattcatcacataaacagaactaaagacaaaaaccacatgactgtctcaataaatgcagaaaaggcttttgataaaaattcaacatcccttcatgttaaactatttcaaaaaattagatattgaaggaacatactaaaaataataagagccatctatgataaacccacacccaacatcatactgaatgggcaaaagctggaagcattcctcttgaaaaccagcaacaggaaacgattccctctgtcaccatttcttttcaacatagtattggaagtcctggccagagcaatcaggtaagagaaagaaataaaggacgcccaaaaaaccatagagtatgtcaaactgtttgcagttgacatattctctatctacaaaaccccatagtcttggctcaaaagctccttcatctgataaacaacttcagaaaagttgcaggatacaaaatcaatgtacaaaaatcacttgtattcctataaaccaacaacaatcaaatcaggaaggcaatcccattcacaattgccacacacacaaaaaatacctaggaatacagcaaacgagggaagtgaaaaatttacacaataagaattataaaaaaacttcccaaaaagatcagagaagacacaaacaaatgggaaaacatcccatgttcatggatacaaagaatcaattattaaaatggctgtactgcccaaaggaatgtacagattcaatgttattcctatcaaactaccaatgagattcttcacagaactggaaaaatttattttacaatttatatggaaccaaaaaagagccctaatagttaaagtaatactaagtgaaaacaacagagctaacaaagctagaggaatcacattacccaacttcaaactatgttacagagctacagtgaccaatatagcatggtactggcataaaaacaggtacatacaccaatggaacagaatagagatcccagaaataaggccacacatttatgactatctaatctttgacaaaactgacaaaaacaagctatgggaacaagacttcgtatttaataaatagcactgggataactggctagctatctgcagaagatcaaatctgaaattcttccctgtaccatataaaaaaatcaagtcaaaatggattaaagacctaaatgtaaaaagaaacctgtaaaagccctggaagacaacctaggcaataccatcctggacctaggaatgagcaaagatttcatggcaaagacatcaaaagcaatcaaacaaaaacaaaaattgacaaatgggatcctattaaacttaagagcccctgcacaagaaaagaaaatatcaacagagtaaatcgacaacctacagaatgaaagaaaatatttgcaaacaatgcatctgacaaaggccttatatccaacatctataaggaacttgaatttacaagagaaaaacaaccacattaaaaagtgggcaaaagacctgaacagacacttctcaaaagaagacgtacatgtgaccaagaagcatgtgaataaaaacttaacatcactgatcattagagaaatccaaatcaaaaccacaatgaggtaccatctcacaccagtcagaatggctattactaaaatgtgaaaaacaatcagctccatcatggtggatgggaggcaggactaaattgcagttctgacttggaaagacagaggagcttgtgaaggcttgcatcatgaattttagctccagaaagactgcagaaaaaaatcaggaaatgcgagaggacccacaggttttctgaagaaagtgggctgctcctgcagaacctgggagacaccccaaatactgtgaaggcccaaattgcagaagtgggaaagggagatcctctgcccccaaacacaacctcccctgggaaaactgaaggtctattttatgggaaaagattacaaccttacctggagctgagtyaatttagagagctgagcaaaatacaggaatagagggagcagtagaaaaggccctgtgagctcgctgggtcctcaagcaggctattcctgtgtggcatcacaaagatcctttgggagggtgacaagagggaaatgccacagagagaaggaaatcaccagctgaattttggaacaatttgaagtcatcaagaagcctcctggccagaactgagggaagagttcaaatccattgtgcagactaaataggcaggggaagaactaaagtcctactttctttcacagctaggaggtgggtagcctgtggcaagttctcagccctgcttgccgactgtctggaaacagacagggtgccattggggaggcatggtgggagtgagaccagccctttggattgcatgggagctgggtcaggcctgtgactgccagcgttctctcacttccacgacaacctgcatgactcagcagaggcagcttccttctaggtgcataactccattaacctggaaacctcagccccatcccccctagcagccacagcaggagagagtgagtctgagctcagacatgcttagctctgccccacctgatggtacttccctacccaccctggtattctgagcacaaagggcataaactcttgagagttctagtgacttacccactgccggtgcctcttcatactatcacagctgatgctctctagaaagaactacctcctggtaggaggccaaccacacaaaaatagagcattaaacycccaaagctaagaaccctcacagagtccatttcacccccctgccacctccaccagaacaggtgctggtatccacagttgagagaccaacagatggtttacatcacaggactctgtgcagacaaccccaatatcagcctggagcctggtggactttcttggtgactagatccagaagagagataacaattactacagctcagctgtcaggaagccacatccataggaaaaaagggagaatactacatcaaagaaacaccctctggaacaaaaaagtctaaacaacagccttcagccctagatcttttctctgatagagccyacccaaatgaggaggagccagaaaaccaactctggtaatatgacaaaacaaggctctttaacactccccaaacatcacactagctcaccagcaatggatccaaaccaagaagaaatccctgatttacctgaaaaaaaattcaggaggttagttattaagctaatcagaaaggcaccagagaaaagtgaagcccaatgcaaggaaatccaaaaatatgatacaagaagtgaagggagaaatattcaaataaattttaataawawaataataaattttaataataaataaataataaattttaataataaataaattcaaacatttgatacagttagtacataaattttgatgcataaaaaagttaaaatgaaacacactaatctgttctgtatacacctaaatgtaactttgacactgaaatggattaagacactgctcttctctgaggaactgagtttttattctaatttctggatgtagtgtgtgggaattattatttttgctgctctttttctgaaaaagattgcctttccctaagagctgttgttccaatgaaaacctagtgttttcaacccagcatgaatgatgcaagtgctgaggtcctttgggcgagaccctctggggttattgtagctctcactggagacgtgagctctgctctcttttcaaagtatccatgaagtctcaacagaacccaccacacaaccccccacccaccatggtagtttgtctttctctttgtcytctttcccaacctcatctttattgcctggatatagcgaggccagggtaaccttcttgtctctatgtggatagtacgtttgtacttctagccttgggatttttccttaatatttgtccatgctagctgagtttgccttttcaatagctctcttgactaaatatacggtaatttccaagatattttggttttattttattttatttttgcttagctttgcttcaggggactgaaggtgagggatcagttcttcatagtggaacaccttacatctttctctgccatctttgacgtttatgaggcatatttttctactttgtttggtagctgttgctgaatttgtttcattggtgctttgctcactttacttacttttttagctattgaagaagaatgactgtatcatgctgctgatttccccgtcttggctagacagtatgtcatcctttatctacattggtccctgtagtgaggatcatggagtagatgttgctgggagagtgagtatatgtgaaaaaaatgtgaaggtatttggtgctgatgaarcaatatgccctactgggcaggggagaggcacagaataagaattcttgccatgtggatgaactcattcaaacacaatgactgctttrtgagacaatagatagatttctacctcttctcacatgtacagagaaaatatttccaaagtctccggaatatttacatgtattactatttaatataaacttgcaagtctttttaaatgtgtttaaaactatcacagtactaaacatgaactagatgcataataaatgctgaaagtaaaaagcctgaattatttaagtgaaaagagaaaaagatttagatcccaaataaatgtatgcgtttgtgtgtttgtgtgtgtgcgcgcatgtttgctgggcatgtacttgtaaaaagtaaaataatagaaaagtattattcttggtacccagcattctaggaataatgtcttccacaagattattagaaaactctgctactttgtaggaggagctttggataactatgaataagtccctttacagacttaactttaaaaaaccatctgatttttctttaytttctttatttttattgtaaattgacatattttacttgcatacatttatgaggtatcaggtgttgttatgatttatgamtactatgtggaataattaaatgaaactaattaacgtattcaaatgataataaatataacagataacaggtaacaaatatttttttatggtgagaatatttgaaagttactttttcagcaattttgtaatgtacaatacactattattaaccatattcacaatgctgttcaatagatctcagaaaagcagaacaaaacttattcctcttgtctaactgaggttctgtaaactttcaccatcatctccccatttttctccacccaaacacggaagtatgtaaaaattctcagtgcttacaaagtttcatataccaatttttgtaatgatacttccccagaactcaatttgacagactgaagtatgtagataagacaaaaaaaaaaaaaaaaaacacacaaaccaatgaaaataaatatgtccttatttgcatgtttacaaatgagaattcagtgtttcctttctcaccagctacaaaagacttcagcctactgtgtataaggcacacagcatctggatgaagctcagctgagctgtctggggaaatacagagatttttatgaagagagctttaaacccagccattagcaaatctggatggttgctggtttaacattccctttttaaagggaatatattattgaattttcaagaatcagatatacatagcattttagatgaatgcattaaraagtcttcagcagtgatattagacattggggcatgctcttacaggcaatgggtggtgtcataaagagcatatttacattcgttttaattgtggaatttataattggaaatttaggaaatagtttcatagcactggtgaactgtattgactgggtcaagggwagaaagatctcttcggttgatcggatcctcactgctttggcaatctctcgaattagcctggtttggttaatattcggaagctggtgtgtgtctgtgtttttcccagctttatttgccactgaaaaaatgttcagaatgcttactaatatctggacagtgatcaatcattttagtgtctggttagctacaggcctcggtactttttattttctcaagatagccaatttttctaactctrtttttctctacctaaagtggagrgttaaaaaggtggttttggtgctgcttcttgtgacttcggtcttcttgtttttaaatattgcactgataaacatccatataaatgccagtatcaatggatacagaagaaacaagacttgcagttctgattcaagtaactttacaygattttccagtcttattgtattaaccagcactgtgttcattttcataccctttactttgtccctggcaatgtttcttctcytcatcttctccatgtggaaacatcgcaagaagatgcagcacactgtcaaaatatccggagacgccagcaccaaagcccacagaggagttaaaagtgtgatcactttcttcctactctatgccattttctctctgtcttttttcatatcagtttggacctctgaaaggttggaggaaaatctaattattctttcccaggtgatgggaatggcttatccttcatgtcactcatgtgttctgattcttggaaacaagaagctgagacaggcctctctgtcagtgctactgtggctgaggtacatgttcaaagatggggagccctcaggtcacaaagaatttagagaatcatcttgaatatattagaaaaaaaatagctcctaagaaattcttgtatgttatataaatttatacttccttaagattctttcattgtgtataactttgtgaattttacaaagatrtgcttggaatcaacaccatccaaacatatcacaaattaggatatatgaaagtatgtatattaccatacagagaagaatgcgaatactataaagagttcttatacaaacagataatatagattttgtatcaatcattcaccttttttgagatttttaaatgagaaaacctataatgtataaaatacatgtgtgtatgtatgtatgtgacacagttactaaaaataggcttcttaaacttacatctcaatctggtagataaagtacataaaagaatatggaattttagtacctatattaagtgtttttawtttttgtataatatttagtacctgattagcgtgtatgcaaaaaastaatttgcttcgtttgttgaattagaagccagctgccttactaaactaccacatttgctttgctcattctcttggctttgcagatagaaaattatatcatctgcatatagtgacttataatgattattttacttctccattttactacttgtaattcttttttggtatcagttgtataatgaaatggtttgaacattcaaagtgttaagtaatcctgatcgtaactgctgtctttgcaaatggagtgttttctagtgttttaacaataaacgtaatactgactctagctttgagataaattcttttaaaaatattmttcagggagaatatttgtttcctatcttcctgtgtatagtattgtaataaaatctctgttaaaaactatcaaattttttgctgtttattaagatgatcatattttccctctcctctgaccaattaaaataatgatacttgttaatggtggtacataaaacaatgacatgtcttctagtctatgcattctagatttaataaaatacaatatacatattcatacacacgcacgcacacacacacacasagagagagagagagagagagagagaaataaaattgcaaccttagaggcaaatgggaattcagaaagcagctgcaaggtagtgagaggtaatctccaaaaggggaagataatcccagtttgaataacatgaaaaattgtgtcaaagaactgtatgccagaagacagttgattcattttttcaagggctaaggaatgtaaccgtaatcctgaattctttgctaaaaatttgttctggggtttgaattaaataataacattcccctctccccttaaaaaaagatgagggctgtttactaaacatacstccttactgaaaatgctaataaccaatctgcttcagaaagactgttatggactgacttgtttgtctccaaaatccatgtgttgaagcccacactctcaatgtgactgtatttggatataaggcttttaagtaggtagttaaggttaaattaggccatacagtgaggccgyagtacaataggactggtgtctttataaaaagaggaagaaacaggcatctgtgggcacagagaaaacacaatgatgtatgattccatttatataccattctagaatatggaaagtaatctatagtgactgaaagcagatccatggttgcctggtaactgggggtttgataaagaatgggcagtggtaagttggaggaataacacaggaacataaaggaaagttttgggggtactatatatgtttgttacctgattatagtgatggtttcacatgtgatgagtatcacatggtgagacactcatgaaattgtacactttatatctgtacaacttattgcatgtcaagtatacctcaagtggcatattagaaacaaytcaggaggaaaactgcacataagtatgcattcttagaaagcttctctttgcaactttggaagaatcaaatattattatttcctattcttattttttgatcttagcctgggccttatgtttactggaataaaatatgtaggaattcttgttgtcttatctaccttactggtttgtcttccccagtagtaagtttttaagggaagaaagctgcaggggtgtgtgtatgtgtgtgggggcggggtggtgggagggataggagagcaatagcagagagctcctctgaagtgagttctagctttcctggagcctaggttctgcttcatcatcgaatgccccatgaaaattcagtttcagagcctactccattaccccattttcattcttgtaggaattggtgtgttcctcagattcagctcaatatcctggaagatgccaagcctgtaatgtccatcctacctctgcctgggtcatgtgttggcgctcctatccttgaaagttttttcttaaaatttcccatttttgcctgcttaactcctcaatctggatccctccaaattcgaggatcatatagacaacattacagatctttgctgatgtagtttattgctctctattgatttaaaaattttcttgaagaaataagaatatattgggatttaactccaccgtgttgtttagcaaacctatacttacttactttggagtaagatttaacagccatagaacagatgttgctcagcagaggtgtggggaagctgaataaaacccaacctttgataactctaggggagtgggtattactgagtagaggagaagtacaaaatgaggacaattcatgctctgcagatgttcctctgcattctcaatattgtccctatctggctttaacaaagaggctgctgtgtgggattaatatagagttctatcagttttcataagccctgtaaatggttctcaaatgttcctggatattttcagttaagtattagagaatatcaagggtaattatgtttttaaaatattttgatatataatattttttaatgtcaggataagcttaataaatattaatgaaggaagcaagaattaattattagaaaatcgaagattttgaatccatgtgatttcctgagccctatattcttattgccaaaaagacagcagtcattcctggacaataatcctataaggttattctgcaaagtgtgtgtatacgggaacttgcaaacaattaattgataaataaatgtaaattatcagcactcagcattcaggagttatggctcctctggattcattcagtaaatttcaatgctttgaattataagagctttggataaactatgaaaatatcccctcagtcttccctcagcattcctcagtggagatgattttagtgctcaatatactccatctactaatttacatatttgctatatgttatacttctatccattgaattttaatgcaattgataacaattaaaattaataagcaaattgtgaagagattagataaagcaaacatgcacaatgatgcagagaattgtctttatttgtttattaacaatgagaattcagttttttctttcatcatgaagtatgagaaatttcactttatgttaagaacatacagtatctggatcagaatgcagatagctgtctggggcaaaataatctttttgtgaaaaaagctatgtgcccattcattagtacaccttagtgctttctactttcatattgagcctatagttttttttttaaaggaagaaattaactgcacatccaattaataagtatgtataacaggtacatgtgatagatgaagaaattgtcagcgttgcatttagacattggagctctctctttgcagccatgctaaatgccttgtatagtatcctcattataataataaatatataattcctaattggaattttggggaatggattcataacactggtgaacggaattgactgggtcaagatgtgaaagagatcttcgaatcctcacagctttgactatctccagaatttgtctgatttcggtaataatggtgagatggtttatagaggagctgtagttatctttacagatgagcagaaagaaagccagagctgcaaactcttgtggtgaagagaatacatcactagggggaacccatccctgggaaagaagctgttcttaaaatcagaagtggaaataacttagagtaaaataatcagatgcttgctatcacaatggcattaaaaattcgaagactaggccttttggttcctttgtgaataatcattttcttattatatttactagctggtcattgtgtaatcacaaagattctttagaagttgaattaataaacggctattgtattaaattttattttaattacaatggttttccttcctttccttttttacctgagtagaatctcttgttattttctggacagaaaaacagatctgcatgtggtggtaattttastccttccatttgaatatatgtatctctgttatgtgcttgtttatctaatattaaataaaattattcacttyctaattatccacaacattgacaagctttttctttgtgccttttyattagataatttttcagggtgttgcagatacacrtaaggttagcagctactttgaggtacaccattttaatcatggtcagaaggctaatcaaaaaagtattttacaagaattgttttttaaaaaatatattaaatattatcaaagacaacgttggcatcttttgagatggtcatatttttttttcctctgctgacttcattatccaaaacaaataatgracattccttaacattcctrgaatcaagtctgcttggtcatttaactcatatatcactttaatttgttttaaattatttaaagtgagatttatagttattactgttagagtagtcatatcaaaaaattttttttcaagaacttggggtatttctcttcttttcagcattttgtataaatcagcatactaaaggactgcctgttaatgaggaatcttccatgaaggtgcttttgggaggagtgaattctctattaaatttcatcatattttacttagatattaactactataatgagtttaatatatttttaaggtcattttgtatataagtcactccatattgtrtatctgtaaaaactgtgttcagtttttcatgtttgcttttcagaatgtaggaaaaactcatcttttaaaacacttgtttaagctttacctgattactctgaagattatctgtttcccttattcttccagaattttcacaatcttttgccaattttattggattttcaagaagttattactgttagttcaaaatttatgaatcatttcttctcattcatttaatcttttaaattttcattaattcttatttctgttctcccaagtgtattttgtctctcttttttaattatttgagctcattgcttacttttttttcaatactcctggttgcattataaagtcatcaatttctaaaatgttttctgactattgtgtaaatcaagtcacatcaattttcacacgcaattgcccttcaaattatgctgccgccttgatgaaatccattcaggttttcttaagaatggtaagaatcataggcagggacagaactgatcagtgataaaataggggaaaataggtctagtggcttctggggaatacaggcatagaaccatactcactttcctagaaaacaaaataagttactctcaaacttgttaaagtttctctcagcttctgggactttctttcattggtcctgttttgcttacattcataagctgactagactatcaggaaatgacctgaaaataattgtgcaatttaaattcgagctaagaagacagagaaggaaagaaacagtggaactccttccccaggcagatgacttaataaggataaggaggaaagaagcttgctggaaacatcaaggagaaggggtcctggatgttcttacaatgtgaacatgggtctcagattccagagtcccaaacactcagaaggagatgctataatcagaaattgcaagctgattattttattggtatattgaagttagagcatgatcacattatgtttcaaggcatttgaaacactgtcatcttcttattcacttcctgaaaaagacaaggaagattataggcaagacttgacatggcaggaaatgtstaatacctcattggtttactgcggtgaggaagatgcaaaaccatccttttgccctctatcccttctacagcccccctccttaatatcattttctttgttcacactttctatgccattgcacgtaatgtgctttaaactgttgcttagatgaggacgaaaaacgattattgttaggttgttcatgctttgtggctgttggatacgttaagggttattttcagaaagatggggactgcaacatatcctgtaatagggacagtgtgaaagcagccttaatgttcagtgacaaggattggttaagtaaattayggaaaaaccaaacaatagcatcatatataattgtaaaaaaaaaaactaaccaataaacactgaagagatctaaataaactcatgtgaaagctaagaaataaatttttccaataagtaagacacagaactgaatataaagtgtggtattagtggtgggaaaattatatatagttatgtagcaataaatatttcaaagaggagtttccaaacagtaaaaagtgggagttttggtaagggtagaggggaggagaaatgaattgctatttagcttggtacatgtctattcagtgagattagtttttgttagcttaagcatgtatgactttaaatgtgaaatgtgttttaaaaaatgagataccatttaacagctaaaagtccaaggaccatttagcaggaatactggacttgaaatgctagtgtgaggcaggactgagcctgtcctgaacaaggagtgttcaggtaaaactttaaataaatgggagtctttgagtttgaggaaaggaaacagagtgccaaagggagaacatgattctatgtcctcattcccaaccctatttaagagaggtaatttgaagatagtgattctcaaaattggaattgccttcaagagattgtttaaaaacaagatcttgctaccttatcccagaatatttgaacaaaactcatgagaaatgtgttccaggacacggaaatattaacagcttttcaatagattcactggcacaatgaagttggagaactgtagcagttggagcctttgatggataataaactggaatcatacctrtcattgaatcctagattactgaggagactgcccctgtggaggtccttgtgggcggcccccttggggaggtggtccctggggctttccaggaggaggtgggggaggaccttgctgatggcctccctgttggggtggtccttgtggccttcctcgaggaggacggggatggcctccctgttggggtggtccttgtggccttccttgaggaggagggggatggcctccctgttggggtggtccttgtggctttccctgaggaggtggtggaccttgttgctgctggcctccttgttggggtggtccctgctgagggccatcattctggttcccatcaccagcagagggttgagattgctgtcctcccaaaggtggtccctgacgctcctcatctatgaactgctcagagtctcctccatctgtgtgagttgaaacaagaagagctgagctcatgctggaaaaccctcctgtcttcatayctctctgtcttcaccacacggccggcccctctctscctgacctgcctctcaactcccaacctccccccttcccaaggcttcctaattagaactcctcttaatccacattagggtggtgaaaaatcaaatttctttactcatggtccccagaatcaaggttgggagaaaactgtttatatctctggggcactgatattagccaattcctgacaaggatgataagaagacactggagaactgatcaatttttcagggaaaaatggagacagagtttactgagaatttattgggatttacctgatattaccaagggaacgtcttcttggctgacatctagaaaagaagtacaggatgatgggaaaagttactgcatgaatcattcagagctcatagtgttctacgaggataaaggacctctgatcacaccctgtgcatcccctttgagatctcatcagccactctctgatgctaccggaagtggaagaagatgtaagggaaagcaggattgttactacactgagygtcaaccaggaactcaacatagaagggcccctgtttgtcctctcatgattccttaagccttagtgcttatttagttaaagggctcttgagtatttcaatgaaatatttggggatccttctgccctctttcatctgtaaatatgttgtttatgtttgcaagctttctcaacaggagccaccagacatagccacttagatacaatcttacaaatgcccgtcccagcacattaaaatactacatgcaggagagaaaaaaatgacaatatttcactctggtgattctctaactctatgtagacagaggcaagtgtttacccaattctctgcctnagcaatagctctgacatgtgtttatctmcttcatggatrctcatccactgtccagcaaggccaccatcatccctgtctactgggatcagtatagkatcttcacagctgcacttccctgaatctgtcttgcattctccayatccttcccagcagtcccatgtctctataaatgcaaatctcactctctcactcccccggtacaaattctttattgggttctatttgtgcaatcaataaattatgaggtcttgatgaggaatgaaggcacaacaggtcttctgatccttggcatgagaactcttcagtcctatctgttttctcatcctcctctcttccctccactttccccctctatagcattcgcccgtaaaccccaatcagagtcacaatatcttcccccaattcggcttaccttcatctaagtcctgagctgagctgaaggccagcagggccactgacagsagaatyagaagcatcttgcagaaggctctggtgtcactcccaactttatgctgggagaaacgtgtcagctccctttataaagacaagcaggacaatggcgcatttgagctccctaccaggtgggcctcctcgcctcagagactgggttctgctttgcttacttcaggtcaagtgtatccctcatttcttytgggactctagcctagcaggaagggttggggaggatrttgtttgtggctaatttctaaaaggtacaactatgacttggacaaatgttttgacggaactgtgtccaagcaatcagcacagtgtcaggattgaactttagacatcatttgtttttcaatctgtttggaaagactgctattctgctttccactgtgcttttcatttstgtgtatgtgagtttgtgtgggtgtgtcagggggttgggcagcaatcctacagctaacagtgaagacggtcaatatgtctgactcttttgatagcctatttccatctctcatgatgtgtgtgcatggatatttgtatatttagctaaatttttcatgtaatagagatgctttctgcttatccgtgagttgtgtgaggacagcacactgctgggtacacatagrtgacagaaggctgccccgcagcctcctcatgctacaggaaatttccaaactctgtgaatctcactacactcaggcaagcgttggtgctgtacaatacaggaaagctaaaaaatttgtattttaaaaaatatctttagggattattaaagcaaaactgaacacagaaaccaccaaggaatttctagacctaaacaaactgaaacatggttcccaaagtgagccacacgatgtcatgtagctaagacctccactttctccagaatattctatagaattcatcatctactttatttcttctaacaaataccgtagtcttcaccactaataactaagtggccatacttatatattcaacttgatgatttgtaatgcctgttcaagcctcaaatgccttgattggtcttctgttttttactcagtatttatgtcaccagtttcatcagagttttctttcacaaagatgattttttctatgatattctaatactaattctttctcattctctttcttacattcatttgttgatattttatatgctgagactaccttgtcgtttgtaattttcttcctatatagtttttttctccccacatgacttgtgggagatgacatttatttaatcttctaagcaatggtgtatggtactcctcactatctttattttcatttttgtctctacaattggacaataaactattaagtttctgaaaaatcyttccagggtcctggattggtactcctcttctcagctgctgattgctctgtgatacctagaaattccctgttcctcaattcataaaatatactactcggtatcaccagctgcactttccatttcagaccttgtgtaggccttgtgtaatttttcactttttgtgcacggctagtgtttatttgaggatagcttggttggaggcatggctgagaggccatgtgacagaaaatcataaagacaaggccctagacagatgtgcatgggtggatcctgtactgtgcatacgagggtctggtctggcccttctgaagagttgcagataacaaaacaagaaggcttcctaatagattagatttttctacagacaacaatgttctcataagggacccaggcagactgatattttccctgaaataaatatagacatatttgaagtgggaatgcattcttaattggcaattcttctctggccctgtggaaactggatcagttttagctgggcttgatgggttgtatcttaggcacagggtaggtgcttaagccaagcagctcccartgggttactggrattattttctttggtttcaccagatactgttttccattagacctggagatgagcagtcctgccttggtgatttcaggtcaaccatcatgtcaaaaaggaaggccagagaaagggaacaaagaggggtgccagacagatattgcctgatgatgtgggtaacggagaaagctgcaagcctggtgaaagacagatttctccttggcagcagagtacaggaaragaacaggaaatgctcctaaaggtygctcagctcaggtcccttccatgaccttctccaatgtcaacaatcagcaaaagagactagcatatcaagaaagtataaataccagctatgctctcaccagccaaatcaaaagaaggggtgatggaagagctgaaagggacactgtctgggagtgagtgtgggtgaaagggagaagtaggactgctgcaggagcttgggcacctagagtgggtggcagccgtcaacaacacaattcccttctactatggatgttcacattctgaggtcctgaagcatcagtcttcaacatatgaaattttaggattcatctttcataacacatcccaactttttctctgttactcacaggtgtttacctagtggttcaaaaatcctcactccctccaggcactacccattagcttatctaatttcttccaccttcaaaatacatctcaaatgtgtccacttgcatgatctttactagaagcttgttgttcrgcccacartgctctctcctggaggtctttaacagcctcgacctggtcctggtaacattcttcccccagtacatcccatatcagttccctcacgacaatcagagtgatcatttaaaagtagaaattagatcatatcacccttgtgcttcaaaccccttgtttttccttctggacttayaataaggtccaaatttcatgactcagctctttcacacccacatgactaaatcttttttgaagacccggaagctctctgaatggaatataaagtaggatcttcttcaacttcaccttgctctagtttgcctggaatactgaaggatggtttgccaggaaagatgaacattggcagaggggataaacttctccgagagtgagtgaattgcattgagttgcttgtctggcagtttatgtacattggaagaattattgtattcactgtatcaactaagcagtctgataatacagttagcaaataaacacaatggtctctgagacttcaactttgctttgacttgtctaaaaactttggtttcactatcatggtaatcatctatattttttaatttgatgttgatgacctattaatatatattatacatttcacaattaattatcatatttctattctttccacctatcctagccaaattggttataatagaaaacatttttaaacatttactatgttccacttaatcatcaaaaccattatattagggacatatgattgttatcattaccttagttttatagatgacatgacttaggtacataacaatgttcttataaaggtattaagtggaatagaaggcagtcagtactcagagtttagtgtgcaccactactcacttgctattcatttattcatttcattattacaatatgagaaggaatgaggttcagaaaagaaacataagttctgttattaggagattatcaaggttaagctttcctaagactttaacaggtgaggtgaaaaatatatttttcctgaggaaataagtttgttttaaatcataagcacatttacgtaggcttccattcacctgttttcctccttgccttcatataaagatactcatacaaatttattcgttttttgtgattatgaaaacccagtcaatgtagatcctttatgtgctttcttaatacaagccacatgcatttttctgctgagccatattagcattggcaaaacttgagcctgtcctttgaaatgaaccaaaaatgttgattctcatcacaatgaatgtaaaattttagaagtccaagagagagactggcctgagatttgtgtatgaagggataaatttgtataccacttgcacagatttcagtcttctgcctgagagtgcccctgtgtcctggccccagagctggtgttaccaaaacaggtccgggtcattgatattattactaaggtgttatctgagctcatggtctcatgaccaagaaaattaaggagtgtggacacaaaagggtgaggttggagcaaaagtttaataagtgaaagaagaaagctctctgcagtggagaggggagtcagagtggattgccacttttacagttgaatccacaagcttttatgagaaactgctctccaacacattcaaaagctagcagacagcaagaaacaactaagatcagagcagaattgaaggagatagagacacaaaacacccttcaagaaatccatgaatccaggagttggtttttttgaaaagatcaacaaaattgatagaccagtagcaagactaataaagaagaaaagagagaaaaatcaaatagaccccccaaaaaatgataaaggggatatcaccactgattccacagaaatacaaactaccatcagagaaaactataaacacctctatgcaaataaactagaaaatctagaagaaatggatacattcctcgacacatacaccctcccaagactaaaccaggaagaatttgaatccctgagtataccactaacaggctctgaaattgaggcaataattaatagcctaccaaccaaaaaaagtccaggaccagacggaatcacagccgaattctaccagagttacaaggaggagctggtaccattccttctgaaactattccaatcagtagaaaaagagggaatcctccctatgtcagccattgagttggatcattgtagatgttcatcccatttgagccttcagatgactgtggtcccatcccttatctgatggcaactacatgaaataccacaatgagagactatccactaagtccaggcaattcacagaatcgtgaggaaaaaagtaataaactgctgttttaagcctgcaatttggggaatgatttgttatataaaaatagaaacttagaatagatggagaaatgaggctgggctccgtgtctcacgcctgtaatcccagcactttgggaggccgaggcgggtggatcatgaggtcaggagatggagaccatcctggctaacacggtgaaaccccgtctctattaaaaatacaaaaaattagctgggcgtggtggcaggcgcctgtagtcccagctactcgggaggctgaggcaggagaatggcgtgaacccaggaggcggagcttgccgtgagctgagatcgcactccagcctgggcgacagagcgagactccgtctcaaaaaaaaaaaaaaaaaaaaaaacagatggagaaatgaataaaaagaacttatcactttaatctcaaagcaaaaaaagagtgaaaagagagtgataactagcaaaattttaataagacagtaaaagcaagttcaatgttatcagaaatgttcatgaatttaaataaatttgcttgatctatcaaaagacagagaataaataagaaaacaaaacacgactatgttctgctttcaagaggcatacctaaagcagaaaaccacagtgacagaaaataaatgggtagaatctaccactaactaatgagcacagtaactgctacttatgcctaatgtctattatcctatcatttgttggtgatagaatcacactattcccttggacaatttgtgccacaaaaactttcctatgtattttttagttatgtgaaagatagatgctcttccacatgcatatattcaattgcttgtttatatttgtcatatttaactgaattataactaataatcacataacatttaaagtaaacaacagtaacagttaaagacaggtgattacagagtagtaagaataaaacaattcatcgaaggctgggcatgttggctcacgcctgtaattccagcactttgggaggccaaggcgggcagatcacctgaggtcaggagttcaagaccagcctggccaatgtggtgaaacccccatctctactaaaaatacaaaaaaattagctgtgcatggtggcgtgtgcctgtaatcccagctactcaggagactgaggaaggagaattacttgaacctgggaggcagaggtggcactgagccaagatcacaccattgaactccagcctgggcaacaagagcaaaactctgtctcaaaaaaaaaaaaaagggccgggcgcrgtggctcacgcctgtaatcccagcactttgggaggccgaggcgggtggatcatgaggtcaggagatcgagaccatcctggctaacaaggtgaaaccccgtttctactaaaaatacaaaaaattagccgggcgcggtggcgggcgcctgtagtcccagctactcgggaggctgaggcaggagaatggcgtgaacccgggaagcggagcttgcagtgagccgagatygcgccactgcagtccgcagtccggcctgggcgacagagcgagactccgtctcaaaaaaaaraaaaagaaaaaattcatggaaaagatgcaataatcatgaatttggacatacctaacaatgcattacgtaaatagataaagcagaagcctcacaaacagaaactgaagaatccacaaataataagaatgtaagacacacttaataaactgccatatcaagcagaagaaagaatgatatggaatattttaagaatgcaattagcaaaaattaattcaatacttttatgtagaaatctgtacttgacagaaatctggacacaaacattcaaatacacatgaaacatttacacacctaaaccatgtacactataacaaagaacagattccatggaataagtattacgtagaatgtaaagtagtaaaatgttaaatcaatcaaaaaagtttgaaaattgaactattctctataactgagaaaaagatgaacatttctacataaaagataaatgtttagaactcagcaacgaaaaagcttttcacaatcaaaatgaaaaaaccrgctaaagctaagaatcsatatccattagtacatgytttataaaaamgttttccagatgaatgaggcacatattcaccttcagttaagaaaaatgaacaacagaaaaatttaaagaagggtgaataagttaagaaggagctaatatgtaccttgcgcttacttagtacatggtactgttctaggtggtttaggtgtgctatttattttatatttattcctaaaaacagtctcattccctttggtttttaaagaatcagaggcatgacagggtgctgtggcacctgcctgtaatccccgaacattgggaggtcaagacaggtggatgcttgagttcaggagttcgagacaagcctgggcaatatggtgagaccccactgccctctacaaacaatacaaaaattagccgggtatggtggtgcacctttgtagtcccagctactagggaggctgaggtggaaggatcacttgagcctgcgaggtcaaaactacagtgagccaagatcgcaccactgcactccagccccgggtgacagcgtgagaccttgtctcaaaaactaaacaaacaaaaatccaagggatagcaaggttaagtaaatttcccaagtcatagactcagcaaaaggaaaagttagaatttgtctgaagggcagtaattatgcttttggatgtcaaccaaaatcaaagtagtaaataaataaatgaatgaataaataaatagaaaatcaaaatataatagacaatggtagtacaaccaaaatcttttaaagattaggaaattcaaaagtctgatggtactgatcaagaaatacgagaagcagaaaaattgatgaaatgtagaaaatactaaatagcagagctttatataatcaaagttctaaataattttattccaaaatttaaaaactcagttgaaattgccaagtttttaaaaagcataggttaacaaaaatttatattagtagtaaaaaactttaataaatcaacaatttcaaagattttgaatggactatcaaaatatacacaagatatcaaattcagatggatttataaaaaacttttactaagtttaaaaatgtcataatttttaccttctccaaactacttcagtgaacctaaatgttttattctcatttattttaagaagttaaaaaattattctcaaartgagtaaaaacagtagaggacagcaaataatgagaaggtaggcaattagatacaggcacaaaactgctaaaaaaaagtgtaaaagtaaattagtctcataatatatacttaaaatatattacaaatgaaaagattcattctaagaatttgaagataatttaaaactagaaagtaaataattttaatttacataaaattatctcaacagatgttgcaaaaatgtttaatctaatttaactcctaatcaagataaatacccaaaccaagtttaaatagaagcaacatttaataacttgtatgtctactaaacaaatacagaagcatagttattagtgtaacatagagcttttcatttaatcaagattaagacaaagatacttgtttattgacaatttcgttaggtcatttaactaatacactttgacaaaaatattgttacatagaaatttggatggaaatttaaagaaattatatactaatagtagtaattccacctagataatttaaaaatcaacaggaaaacttttgaaataacacaaatttgataagcttgctgagtacaatatcaatatatatgggctaaaattacacctattcaccagcactggtccattaaaatgtggaattaaaaaaattccctttcttattacaaataagaactatattttgattatgactaagtctcagaaaagtgtttcatgatgttatatattgtgaaattacataactataatactttagtgaaggatttgaactatatagatatgcaaaaattaattttcaaagacattgattatkctcaaattaattcacatattcaatataattctaaccagaatcttaaagaaatttattttcaarttgacaaaacagtcctaaattacacatgaattaagtattcaaaaataattcagacaattcttgaaaaagaaaattaaggtaggggtatccagtagatagcaagacttatttaaattatttatttagtggctcatacttgtaatcccagcatgttgggaggctgagatgggaagatcacttgagttaaggcattcaagacccacttgagcaacacagtgagaccttgtctctaaaagcatcaaaaaagtagctgggtatagtggcaactgtagtcttagctacacagagaatsaaacaggaggattgtttgagcccaggaggtcaaggctgaagtgagccttaattgagccactccagcctgggctacagagcaagactctgtcaggaaaaaaaaaaaaaagattaaaaaawtttttttaatattttttgagacagagcaagaccgtgtctcaaaaaaattattaaaaaaatcaaaacaatgaaggttgtgacacagaaataaaatgtatataataagtaataggtcagcagatcaaactaaagacaggtctggtgagaccagattgtttattcttatcacataggaacctccgtacgtgatagayttggcattagaaatcaacaaaaaaaaaacgtagactgttcaactaatgatattgagacctctgtcatttaatattgggacaaaattgtatttctaactcacaacaaacagaaaaactacattagatgtactatcactttagatttgaaaacaattctttaaaacttttacaagaaaatcaaaataagactctactgcctttaatttgaggaagcacatgtcattaaggaaaagactgatgagttcacatttgctgataaaaataatataatctgtccatcctaagttaggtgtccaacaaatagttacatgtctatcytctcacctttcatgtcctccaacacttctctttaaagagtggcatagaataacatcatgaaagaatgaggaaactccagtgcaacaaaaaaattatagagtttataaatatctttttttgtttacaaatatattgtgtgagatagatttttccatcttaaatatgtgaagaaaaattaaccctgcaataattagtattgtaacaacaatattgcaatttgaaataagacaaatgtgtaacatacttcttcttccaaagtaaataagaggattaaatatagaattgaaaaagtaaacaatcaaacagagaaaataccaagaattgttttgtaatcttgaaagttgggaagacatgtttaaacatgatattaaaggcagagtacatttaaaatgaatgcatttaatagcatgactggaagaatttctgaatgcctcaagaaaataaatataraaaggtaaataatagattaaaaactttaaagtctatttgcaatataaacagtagaaaaaaatttaatacttttactgttttataaaaaagataaaaataattttaaaaaccagattatcatatataaaaaattcagcctcacatttaaacaaaaacgtaagtttagtatagtactatggtaaaatgaataacaagtgctctattttgcatttcaaattggccacattttgcttttgtaaattgttacatagaattataatgtgtgcaaagttacgagcagtctcgtttaatgctagtgagagcttacattggtgcatgcattttgtaggggactttgtcaatattaataaaagtcttaaatgtttatatagattataacctgctttttggacttcacccatttctacgacttcatcttacaaataattggagatttcaccacagagttttgtcttagtccattttatgttgctataaaagaatacctgaagttggataatttatttttttttgcatttttgatcatgtggatcttttaaaaatgtattatttatttatttattaagttctggggtacatgtgcaggatatgcaggtttgttacataggttaatgtgtgccatggtggtttgctgcacctatcaacctatcacctagatattaagcccagcatgcatcaactcttttctctaatgctctcccacccccgtcctgccccaacatgcccgctaagtgttgttcccctccctgtgtccatgtgatctcattgttcacctcccaattataagcgagaacacgtggtgtttggttttctgttcctgcattagtttgctgaggataatggcttccagcttcrtccatgtccctgcaaaggacatgatcttgttcctttttaaggctgcataatattgaagctggacaatctataaagacctaatgtttctgcaggctgggaagttccaaaagcaggcactgatatctgctcagcttctggtgagggctttccagctgtatcttgacatggcagaaggtcaaaggggaaatggacatgtgtgaagaggcaaaacctgaggagccttctgacactgtgaccactcagtcttgcagaaacatttccatgaacacgaattcagtcagaagagaacaagaactgactcagtactgctggttttgagttcattcctgctactgaattcagaaatgtcctgccaatgccattcttcaacatcctgttagtctcctaattggggactgtaatgtgtacataaattgaagtttagggtgaagcaacaagtgaaaacagtgaaaggaaaactgtccgtaactgcatctgagaacactagacttcactgggtattcttttgaatatggaaagttatcacctgtggctcttataaaaaactaaaatatttgttagtatgaaaattgccagctgaatcatttgaaaaatgattgctctgatttcataaagatcaatatgacatgatcctacagaagaactgattttaatgtaattaacaacaaattaacaatgagcaatggaattaatggacatagcaagagagaagtactgaaacaataaatattaaatattaatcccttaattattgtattaatcccttagttgaaaataaaaaaaattataaaattaggaatttttctctctgaagagaagccaggtatagaggaggacattttcatggtggtattaactatggaattcatcactgacttaattggcaaggaacaggatatctgcttcaatgacctcattctcaccagcttatctcatacgtacaaatatatacatatctgtatataygagtctcacccatgtatacatatatttaaatgtatacatatatatgagtctcactgtcacccaggctgactggcagtggcataagcatggctcactgcagcctgggccttccgggctcaagcaatccttccatctcagccttctaagtagctgggactacagatgtgcaccaccatgcccagctattttwtttattttattttattttattttattttatcttattttatagagaggtggtctttttatgttgttcaggctggtctcaaactcctgggctcaagatatcttcccattttggcctcccaaaatgctgggattagaggtgtgagccactgtgcccggctcaaatatatttgttgatgataacactaatccatttctgtggcactttttttcaggtatttatagcaccagtaaaatggggagaatgatagtttgcttgggtttctgaatggtccttttgcatatttgtttaccacctacctctatttttcactgtcttggtgagagcccattccttccaccaactcttttcatagctaacatgacagtttatgtggttgttactgttattttctatggttctctatctgtggcaggtctcccttaaagacaaggaaatgttctgagttgggggaagaatataagtctcattaaaaaagatgtaattttagaactaggaaaaaaagtgtaatcttcaagagattctcatattgtctgtgagctcccatttgtctcataatatgttaaactgcatctctggaacagggtttgatatggtttttctgtgtccccatccaaatctcatcttgaattgtggctcccgtaattcccatgtgtcatggggaggaactcagtgggaggcaactgaatcgtgggcgggtctttcccatgttgttcttatgataatgaataagtaattctcatgagatctgatggttttataaaggggagttgccttgcaaactctctcttgtctgctgccacgtaagatgtccctttcctctttctttgtcttccaccatgattgtgaggcctcctcagccatgtagaactgtgagttcattaaacctctttcctttataaattacttagtcttgtgtatgtctttattagcaacatgagaacagactaatacagggttttagctcaacatgtgttaataaggtcaactaaggcacactaaagttttttaaaagtttatttgcaaatgatggttcataaattggaaagctccaaactgaggtggttccggagctctaccgagggaacgcgatggggatgcttttataggacagacaaagaagaaaagcaaagacaggacagatgaaataaggtaactttatagctaaccaatcaaatgtttggctatcctgttggctgtctttgattggttgagtttaagtttagcaaacaagtcacagtttttgtctagtctgctgcttcttatatttgctgggttttgttgctttttcacccctctgcttttctctctggatttaatatcagatactttgagcattgtaaggcttcattcaggaaaccagatatttaatcactctgccttgatattaccttgtcaaactgaaagagcagtaactgtcagttgaacctttttctgtaaatataatctagtcagaatttttaacatggatgtaacaaccatacccttgagataatcctagtcttaaggctgagtttttttgtttgtttgttttttgtttttttgagacggagtctcactctgtggcccaggctggagtgcagtggcatgatcttggctcactgcaagctctgcctcctgggttcacaccattctcctgcctcagcctcccagtagctgggactacaggtgcccgccaccatgccaggctaattgtttgtattaatagtagagatggggtttcaccgtgttagccagggtggtctygatctcctgaccttgtgatgcacctgccttagcctcccaaagtgctgggattacaggcgtgagccaccgtgcccagccatggctgagttttaaccaggcttagaaactcaaatactattcagtgttgagaagcagttgcctcttccagctctgcaaaatctcaagtttctagactcttctttctgatatatttttttcctgcttgcaaagtagtataaaattgtcagaatcaaaatgaagtcacttgtgttaaaactctgacaaatggagctggagaaggccatgaggggagagttcttaatgtaaatacgacttataacaagagctaccagaaaagactctacaaaacaacaacattgcacaaaggccactgcaaccctacacaaaaagatacttctgcaaggacatctgctcanaacctccttgtctaaccttagacaggtgtcacccttgttcctgatccttggatccaaggttaattatctcaaaacaattatgtaatcttcctcttttagaaatccttgtcttttctaatgtccctgaatanacacataatttactatggcacawgtattctcattgcaatattactcccaaataaatatcattttcttttagagcatctccctctgtttgctatttagctagacagtaggcaattattttctaaagtcaatttttttaattgtcaaatgaaccattaatatattcaattatattttttttctagagttacaaaactttcaaatatgtgatttacctcccacataaccacaggtgactgctatcgaatgttttgccactccctatcttgttttacagtaaacagtaatgttttttcttgccactcactgccaatgaatcaagtattaagccagtgtcacataagttaggtgttttgttttagtaacataccagttcaagaggccagtctcatacttgccaagatagcttagtctatgctgtactaacaagatccccaaakctcagggactccacgtaggagaagtttttgttgtttgtttttgtttttgatttctgttacatgtcctgtgctcatagtggtcacaaaagaatccaggctgatagatggtttattgacccttgtttgagtgtcaaggcaagaagatgagaaatttgcagtcttatagtggtgagtaaatgctctcactctgaagcaacatgtcatttccacaatattttattgaccaaaaatttacataatatacaacttcaagggggagaggggactcctacaagactacatttcttatcctacaaggaataaaatgttagcatatagctctaggtcccattttacgacctctatgctatgtacaagatatatatctaaatcctaataacaaagagaagttaaaagtaaaatttagaaaaatcacaccataaaacactaacawaaataagctaatgtaatcattttaatatatactaaatagattttttttttttgagacggagtctcgctttgtcacccacactggagtgcagtggtgtgatcttggctcactgcaagctccacctcccaggttcctgccattctcttgcctctgcctcccgagtagctgggactacaggtgcctgccaccatgcccggctaattttttgtagttttagtagagacttggtttcaccatgtgttagccatgctggtctcgatctcctgacctcatgatccrcccgcctcggcctcccaaagtgctgggatttcaggcgtgaggctaaatagattttaaggaaaaagacattagaatagataatgtcacctcatgtgagtagaggttatatttgccatgaagatactacaattctaacgctctatgcactcatcagcatggcatcaaaatatgtaaagtaaaagttgacaggacttctaaaagacatagataaacctatactcatagcaggatrgtttaacattaaatctcaagaaataatagaataaaaagacaaaactcagaaaaggtaaataggatttaaataacatgattacaaatagatctagtggatgtatgaaacactgcaccccaaagctacaggatacacattattttcagcaaacacaaaacatttatcaaaattgaccatatatgcataacataaattttagcagagaaaattttatgtaaatggaaactygaacatatattttaaaaatagtctatggtggaagaaaaatcacaataaatttagaaaatatttaaaattaagtataataaaatatagtaaaaccttgtgagaaatgctgaaaaattctaagaggaaaacgtatgccaggaatataacagcaaacatactcaacggaagtaaaaataattaaataacaatataagagatgaaattaatgaaaaataatacatctgaaaagatcgaccaagacagacttgaatagactaacaaaataggcaaacttctggtaagataaatcatgaaaagaaaagcaaataatatgaagaatttaaaggatatattctgttggtattaaaaatttaataagatgatattataatcaaaattacatgaaaacataaataattgaaactgacaaatatctagaaagtcgtaactgccaaaacaagaccagaagaaataggcaacggaatggttccagatcaagatcatagaaatgtatgctcatgtactcaataataagttacatgttaaagaatgttcgtagcatcatcatcatcatagtctccaaactcaaaataaaccaactttgtgtttccactagactagataaattttgaattgtcattccattaatactatacagcaattgaataaatgatctatctctatatgcaacatgattaattttagaaacataatattgatcaaaaatagttaaattcaaaaatattgtgtacagtattattccattcatgtgcaatccaaaaccaggcaaaaccaagctagtgcttagggatacatattcaaattaaaatatacaaagttaaacaataacgtgatttgaattgcagatagttgttacttctggaatgaagataggggttgtgattagaaaggagcaaataaggtgttatggggtttacaaagttctctttcttgccatgggaggcttttaaattagtgtgcactttatactatagcatttaaacttcattaaatgttctatatttgttatatgtaacaataataggcagcaaaaatgaaaaagagaaaagaaatatttctaaacaaatgatatgaggttagctaaatcttaataccaaattctcataggcacaatatgagaaatgaaaattaaatgtcaatattccttaaaaacatagctgcaaatatcctaacacaacgttggcaaactgcatccatcagtgacttaaaaaatactttacatactcaaacctttcattgtttcctcttcctgccctttgcctcattttccttttcagttcagactgctgaaaaagtttttctgtgatgctccctagcatctattctctttctcttatagaagtgagagactacatctctttgattaaattyatatttttaaatgttttctcttatggaaacacaccaggaaaatgcagctcagaaccgcaagcctgttatccattctctatgtctttgtcatgtgttatatcacaagttctaaaaactgtggtattttttcatataccagcaagtacagtaccattcctcaggcctatttgtacagatttgggrtattatcaagttgtgaccggcatccccaaacccttttctctagataggtaggaagaacaccctaaaatgaaaaagtataaaagatctcttcagccctgggtcaagaatgcaaatggaagaccacatgccacatagctacatatttaaaggtcataaatatacaaacctaacaaactgttaaaggagayattttctattctatcttgacaaatataccattataacaacaaaatagaaaatatctacctattttaagttataattgaaacttgcaaatcattaaagatgatgcaattattttgtaaattttttagtactctgtagatcacccaataaagattgcatgagtaataaaatacaaacattcataattcacaaattatatctttattaaataaaaatagctttgtattcatctagctaaatggctacttattatcttataatyaagataaagtgttttatttatattaattttgaattagacaatctttcttgagtctccacgttttcagaattttggtaatccactttttttcggtagtttttgaaagagtggggcggggtgaggaaccttgactcttcacaatgaacacattagtcccygcttatctgcagtttcagtgacccaaggtcaaccacagtccaaaaataggtgtgtacagtacagtaaggtatcttgagagagtgagagacaccacactatatattttaacacatttttttactttttatttttttaatttttatttattttagatacagggtctccctatgttgcccaggccggtctcaaacttttgggctcgagcggtcytcccgcctcaatctcccaaattgctaggattacarggatgagccacaacccctggcaacttttattatagtatattgttttaattgttctattttattattagttatttttgtaatcttttactgtgcttgatttacaaattaaactttatcataggtaggtgaatacaggaaaaaaatatattgtatatagagtttggtactatctgctgttttaggcatccactgggggtcttgggacataggcctcatggataaggggaactagtgtatctatttctttgcttggttttcagttttgcaagttatgatgtaatatagtactgctttctttggtagctgttgctgattttgtaaaatttgtttttttatcacttttaagtttaaaaaagaaatatgaggggaaaagcggataaaatgtgaaggcatttggtgcctatggagggatggtggtgagcactgctaagtagtgatgaggcagggaatgagaaagatggatgctttgtaaaygagtttctctttagtcacagtattgaccagatccagctttagctccacaagaaattgagcactcttttgaaatagcataggtaagtctttgcatattttataaagcttcattggctatgctattagccataaaagcttcatttagctacatattctatgaatcagatttttataatatttgtacctcagaactcaagctggttgaatctaattttctatgctcagacaaggcaaaaaagtacaaaacaatgaaagagaatatatctttatttgcatggttgcaaatgtgagtttaactttgctgcataatcatctatgaaatatttctgcccatggtgaagacataaatatcttagctagggctcagcagagaaattgaagaaaaataaagatatcaccagaacagttatgtgaagatcgatcagcaaactttagagatttctgctttgacgttgagccaacaatgaaagaaggagcagaaaaaggagaaggaagaagaactccactggacactcaaggatgtgaatagcattttagatcagtgaataaccagcagtgacattagacattgaactttctctgttctgacatggaaagtgccctgccgagtatcttcactcttgtaataattgcagaattcataattgggaatttgagcaatggatttatagtactgatcaactgcattgactgggtcagtaaaagagagctgtcctcagtcgataaactcctcattatcttggcaatctccagaattgggctgatctgggaaatattagtaagttggtttttagctctgcattatctagccatatttgtgtctggaacaggattaagaattatgatttttagctggatagtttctaatcrcttcaatctctggcttgctacaatcttcagcatcttttatttgctcaaaatagcgagtttctctagccctgcttttctctatttgaagtggagagtaaacaaagtgattctgatgatactgctaggaaccttggtcttcttatttttaaatctgatacaaataaacatgcatataaaagactggctggaccgatatgaaagaaacacaacttggaatttcagtatgagtgactttgaaacattttcagtgtcggtcaaattcactatgactatgttcagtctaacaccatttactgtggccttcatctcttttctcctgttaattttctccctgcagaaacatctccagaaaatgcaactcaattacaaaggacacagagaccccaggaccaaggtccatacaaatgccttgaaaattgtgatctcattccttttattctatgctagtttctttctatgtgttctcatatcatggatttctgagctgtatcagarcacagtgatctacatgctttgtgagacgattggagtcttctctccttcaagccactcctttcttctgattctaggaaacgctaagttaagacaggcctttcttttggtggcagctaaggtatgggctaaacgatgagaaactcacaatttcataagccattcagaccacagattattgaatattgcagacagaaacaggagtctacaaggagtttaaaagatattttatgcttcccctggtttcttttattgtgaaggtcactgtaaatgttttaaattcttctctataatagcatcttacctaagaatattatgtatttatgacatgtatttctacattattaggaatttgaaacttatttgaggaaattattggcagattctattgtaaattaaaaacatatactacagcatacttagatgttarttgtaaatctacaatcttttgtttggcaatggctcttcaattctaaatcattcattgagatgggtgatttaggtaattattttattatctcaagtactcctatttaaatggtgagctacagataattagaacagttatttggaatagaattagggaagtttggacttgccactattactatactgatgtgttgagagaattgagagggttaaaaagtttaatatgagtaactgccacataaaaagataacggttttttagtaattatattgtatgtatgtgtacatacatattttacattatgccttttaaagtaaatattattgaggtataatttacatataataaaatgcaacatgttagtccacatttcagttagagttttgacaatgtatacacttgtgtgaccacaatgtcagtgccctttgcagtttaccctctcccctccagccctttttcccaagcaactacttatctgcttttggtaacaataagagagtttttgatttctagaattttatgcatctatatatctatagatatagatatatagatgccatatatacacacacacacacacatacagttatagagtgtgtattgttatatgtgaggcttctttaactcagcataatgtttttgaagttcttctgttttgttgtattaatcagtagtttgttcctgagcagtgttcctgagtagtgttggatataccacattaaaaaatttctctttcctgttaatgaacattcaaatggttttcaattattggccattataaataaaactgatatcaacattcatgtatttctcttcttctggatatacaatttcctcactcttgagtaaatacctatgagtaaaaatgtcaaatcatatgataagtgtatgtttaacttaagaaaaaactgccagagttctatagagtggttgcaccatttcatactattgccagcaatatacgagtgtttcagttatttcacattctggccaacagttggtaggtactctgttttgttttctattttggccattctagtcagaatgtaatggcatctcatcatagttttaattcacattttcctaatggctagtgaggctgatgattttttcatatgctttgggtcattcatacaacctctttttatgaaatgtttgtttaaaccttttgccaactacttagcttgattcattgctttctgtttttattactgagttgtaaatgttctttatatagtctctgtattagtccattttcatgctgctgataaagacatactcaagactgggtaacttataaagaaaaagaggtttaattgactgacagttccacatggctggaaaggcctcacaataatggcagagacaaaagtcacgtcttacatggtggcagtgaagasagaatgacagccaagcgaaaggggaaaccccttataaaaacatcaagtttcatgagacttattcactaccatgagaacagtatgggggaaaccacccccatcwttcaattatctcccactgagtccctcccataacacatgggaattatgggagctacaattcaagatgagatttgggtggggacacagcmagaccatatcattctgaatataagttctttatcagacatatgttttataaatattttctgccagccagaggcttgtcatttcattttctttacagtgtctttcaaagagaggacattaaaaacttttaatgaagttcaataatcaactattttcctgtaagaaaattatttttaactttttttgctttcaaaaytcaaagatattttatggawcagttggaataaatatttgcaataaggcacagttatccttgagtataaggacagaaagcctaatttcattttctctgctgtcagaacaggttctttggtgataccacatgcatttttagtaacctgtttcaatagtactatctacttgagcattstcattttctctcttttattttctttttagaaaggacctcccaaatgggtttgcttaaaagttaggtaagtgagaggagtagtatgatcatttttatcattaatttctctgaactctcttgtagtttatttacccaatagcatctttcaatatctgtcagtattttcacctctgcactcatatggtccscacaaaaaacactataatagttaaggactgagtctggagtcagaggtacaattctcaattctatcacttagtagtgttagttaaaattgtatagttcctatttataagtgaaacatgcagtatttggttttctgtttctgcattaattcactcaggacaatggcctttagctgcatccgtgctgctgcaaaggacatgatttcatttttttttaatggctacatagtattctatggtctatatataccacacttttttggtctaatccatttttttttctttgagacagaatcttactctgtttctcaggctgaagtgcagtgacatgatctcagctcactgctgcctccacctcccaggttcaagcgattcttctgcctcagcctcccaagtagctgggattacaggcaggtgccaggacgcccggctratttttgtatttttagtagagacagagtttcaccatgttggccaggctggtcttgaactgctgaccacaggtatctgcccaccttgacctcccaaagtgctgggattacaggcatgagccactgtgcctggcctgtaatccattgttgatgggcacgtaggttgattcccatgcctttgctattgtgaatagtgttccaatgaaattgtgagagtacatgtgtctttctggtagaatgatttattttcttgtgaacagagtgagaggacaacagagtgaaactctgtctcaaaaaaaaaaaaatggattagaccaaaaaagtgtggcgtgcatacaccatactgagtaatgggatgactaggttgaatggtagtttattttaagttctttgagaaatctccaaactgctttctacagtggctgacgtaatttgcatgcycaccaacagggtacaagcgttcccattgctccacagcttcactagcatctgttttttttttttttaactttttgatagtagctattctgactggtgtgagatggtatctctttgtggttttgatttgcgtgtctctaatgattagtgatgttgagccttttaaaatatttgttggctgctcgtatgtcttcttttgaaaagtgcctgttcatgtcttttgctcgtttttaaaggggttatttgttttctgcttgttcaattgtttccattccttatagatttgggatattagacscttgttgcatgcatagtttgcaaatcttacattctataggttgtctgtttactctgttgatagtttatacaatgtgtgcagaaattctttagtttaattaggtcccacttgtcaatttttgttttttgttgcaattgcttttggggacttagtcataaattctttcccaaggccaatgtttagaatggtgtttcctaagttttcttccaggattattgtagtataaagtcttacatttaaatttttgacccatcctgagttaatttttgtatatggtgaaaggtaaaggttcagtttaattattttgcttatggctagccagatatcccagcaccatttactgaatacrgagtcctttccccattgtttatttttgtcarttttgtcaaacatcagatggctgtagttgtgtgtctttatttctgggttctctattctgttccattggtctatgtgtctgtttttataatattaccatgctgttttggttactgtagctttatagtatagtttgaagtcaggtaatgtgattcctctggcttttttctttttgcttagggttgcttttgctatttgggctctttttttggttttatatgaattttaaaatagttttttttttctagttctgtgcaaaatgacattggtagcttgataggaatagagttgaatctgtaaattgctttgggccgtacaaccattttaacaatattcattcttcctatccatgagcatggaatacttttccatttgtttgtgtcatctatgatttctttcagcagtgtttcacagttctctttcacctccttggttagctgtagtcctagttgttttttttttttttttttttttttttttttttttttttttgaggctattgtaaatgggaytgcattcttgatttggctctcagcttgaagatttttattgtatagaaatgctactgatttttgtgaattgatttgtatcctgaaactttacagaagtcctttatctgtgccaggagccttttggcagagtctttagggttttgtatgtatggattcacatcagcaaagagatatagtttgactatggcttttatttttctatttggatgcctttttttttcttgcctgattgtcctggctaggactttcaatactatgttgaataggagtgatgggagtggggacccttttcttgttccagttctcaaggggaatgctttcagtttttgcatgttcagtgtaatgttagctgtagttttgtcataratggctcttattattttgaggtatgttccttcaatgcctaattatttgagcgttttttcaagagtccagaatttccttgttarttttctgcctcaatgatctgtccaatcttctcagtggggtgttgaagtcccccaatattattgagtgggtatctaaatctttttataggtttggaggtacttgtttcatgaatctkggtgctccaatgctgagtgcatgtatatttggggcagttaagtcttcttgttgaattgaacmctttattattatgtagtgcctttctgtgtcatttttttactgttgttggtttaaaatctgttttatcttatataggaatagtgattctttctttttttcttttctatttgtgttacagatccttctacaaccctttactttgagcctaacagtaacattacatgtgagatgggtctcttgaagacagcagaccgatgacttttgttttttattgaatttgtcactctgtgacttttaagtgagggtatttagaccatttacattcaaggctaatattgctatgtgaggttttgattctattttgaagttgttagctgggtgctttgtagtttctattgtgtggtttctttatagggtcttgggctatgtgcttaggtgtgctattttggtagcagattttcatgtttagaactcccttaaggatctcttgtaagactggtccagtggtaataaattcctttaccctttgcttgtctataaaagattttatttctccttcagttataaaggttagtttgatggaatatacaattattggttggaaaattttctttcctttaagaatgctkwaagtaggcctccaatctctcctggcttgtaaggtttctgctgagctatatacttggccttatggggttccctttgtatgtgatctgatctttttctctagctgcctttaagatttttttctttagtgtagaccttggatagtctggcgactatatgctttggtgatgttcatttcctatagcatcagtcaggtgtcctcttgatttcttgtatctgtatgtctacctctctagcaagattagggaaattttcttaaattatttcctcaaatatgttttccaggttattaactatttctccttctttctcaggaatgccagcagtttatgagtttggttgcttcacataatcccatattgctctaagactgtattcatatttttaaattatttttaatttttttttctgggttagttcaaaagaccagttttcaaggtctgaaactcttctgcttggtccagtctatgagagattgtactttatatgaattcaattgtactttataattccttaagtaagtttctcaattccagaagctctgattgatttctttgtaagatgtttatgtcttccttcatttcctggattgctttagaaatctctctgtattcattttcagccttgtcttgcatctcattgagcttccttgcaatctatactttgaattttttatctgtcatatctgagcttttgttttggttagggaccattgctggagaggtactgtgctcctttgatggtgttgatttcattacattcactttttttatggtggtagaattcttgttctctttcctcctcctctggcaatactggcacttctaatttttgtaattatttccataaggtaggatttttttctttatttccctataatattattgttctttttttctttccctttccattccccctccctccttaggaggtatgactttagagaattctgggtaggtcttttgcccagcttctatagccttatgcacttacagrttgcaggttttatattagactgtgcggttcaacctacaagccagtagatggcacttataggtaagagccagttktggacaatgtgatggttatatatttgatccttgtttactggaagaaactctctgttgctgcagataatggtctgactcatggagtacacagtggtgtgaactccctgctcagccttgggggttgtggggagcaaggtgggtggggccagacaaggcaggtccacctataggtcttccaatggcagacacaagcaccaacactgagggagaatctactgagtggctaccaagtgaccagagttctgtctaggggtggagctaggtaaccccctcggctccaagttctttgcacagggatattggagagattggcctaaactcttaatccaggagagtgggggctctgaatacctggaaatctgcctgcttgtggagcagaacccacccccaccaaccaagatttctgcacagggtaaatggggtgactcaggcttcttaactaggcaggcaggtgctcttaawgcttggatatttgcctgggcataaaacagagaggatcagcccwgtacatggatctgtgaacgggaagggtgaggcagcacaggttgccagtctgtgtgagcaggtgctttgaatgctagggtatgcagcagagaggacctccctgcatcaaaatctctgcacaggaagggtaggggaggataggctgctgagccaggtgaatgggtgcttcagatatctagagttctgcctggctgtggagcagagagggccccattgcaccatgacctacgtcaaggaaggttaggtggttcagggtgctgaaccttgctagcaggtgctccaaaatcctgggatctgcctaggcatgaagcagagagggcctccctattctaggatctctgcacaagaagggtggagcagatgaagctgctgaaccaggtgaatgagtgatccaaatgcccagatttctgcctaraggtagagtggaggagagtctgctgcaccacaatcacaggggaacagggtggggtacccagcaatgacacacacagactagttccaagtagctaagctgcctggttgcaagtctcatcacataggataaactggctgtagcagctcccctcctgccccaggcctgtgatgggggatagcacagtttcagtgtttgctgctaaggttttttttccccacaattctggccatggaggtccccaccctgctctaaagcaggtgctccaatatctggcccaagactaaaatgcctgcacagctacgctgctkagttaccaaagaatgattgactttgtggcatctgaattaaaaatggtatcctgctctcagtcctgggtctgagaaaaggcctgaaccttttcccagtgtctttcccttacaatgtctctaagcctttctccaagttatctccagggctttggagaaacaaggtactcttccctctgagcactgggttgctcagatccccagtggaaaggtgagtcacagagggaggctctctgcctctctcacctactggagcttcattcacttttttaactgggtgccatcatgggkgctgtttgcccatgttcccctccctgggatctgtgtgtccttatgattctggtagattcccactttccttcttgaaataaagctcacagagttaacctttatgagactttgttgaaaaatttrtgtaggttggtatttttttcttcttaaatatgtgatgaaaataaacattcaggtcatcccttgctttgtgtgaaagttttaaattaagaattcaatttttaaaaatagacactaagattttctattyctttgtgtgcctgattcagtaatttctttcagggaatttgtccattttatctaatttaattcactgaaataattttataaatattattcctcaatttcttggtctgtttgtgttgstataaaggaatacctgaagctgagtaatttataaataaaagaggtttatttagttcatggttccgcaggctgtacaagaagcatggcattagcatctgcttagtttctgctgagagcttttgtgctgggtcaaaccatggtggagaaggtcaaagcagaagcgggcacatgtgaagagagaataaaccaaaggggcatcctggctttataacaattcactctcatgaaaaacaactcattcccctagaacaaattcagtcttgtgagagtgagaactcactcactacaytgaaaatggtaccaaggcattcatgagggaaccaaccctatgactcaaacacttctcactaagctcaacctcccaacaccactactttggggatcaaatcccaatatgagttctgatggggacaaacaaaccgtgtacaaaccatagcattctgacttggtcccctgaaaactcgtgtccttctcacataaaaaaaaatgtaatctttccatcccaacaatagtcccccaattcttaacacgttgctgcatcaattcaaatgtctgaagtccaaagtctcatttgagactggaagtcaagttccttccagctatgagcctgtgaaatamaaaacaatttatttccttccaagatacagttgttgtacaggcattggatagacattctcattccaaaagggagaaatcagccacaagagaggrgcagtaggcaccacgmaagtacaaaacacagcagggcaggcgttaaatattaacgttctaaaataatctcttttgactgtatgtgctgccttctgggcacatgcctcttctttctgagacttcactcttagtggtctcactctctcatctccgcaacagtcacactgctttccttgttcttcctcagacacactaggtacatccaatgttagcacactgataatgctgttccgtgtgtctggaatgtactttacccagacaaaacatggataatttctttacctactttaggtctttgttcagacatcaccttctcaatgagtccttccctaagcaccttatttaaaatttcaacccctcttctgacatgctttctattgaccctctctacttatatttgcaacttcttataaactatattttatatctgtatgatatatattttattagttatatgtttagagttcatcttttcagaatgtcaacttattaagggcatttaaaaatagttgtatttaatgcttcatcccacctcctagagggctggaacaaagaagatattcaataagacaaataaaataaccctttttcagcatataatattttcctgaatttccctttgtttatttcagtttcagttttgtttgcatttcatgtttgcctatcacaattagcctttcttttagtcatggagttttctttgtgaatttacctagggtgtatcttttggtgggctgtccaactcattcatttctttgactcctcttaggcctatattatatctccattggttttgaatgtcactaaattttggactagctactttgggagggaaatgcagcagttgcattacacaaagaacatgactaattggcctttcctggtttgacctcatcagaattaagattaagttcagctcaacgtatgaaaaaattatagaaaatttatacaagttccccttacactgaggaaaataaagatgctatggatacctttatttgggatagaagagaaaaacagacatggaaattagaaatracaaaatattgataccattcatatgctaaataattctattctgatgctctattgctgcataataaaatcacccagaaacttcatggtgtaaaataacagccattttattgtgcttgttgatatggtttgaatttctgtcctcgcccaaatctcatattgaattgtaacccctaatgttggaggtggggcctggtgggaggtgattggattatggggggcagtttcccccttggtggtggtgtggcaatagtgagtgagtgagttatcacaagatttggttgtttgaaagtgtaaggcacctcccccatctttctcttcctcctgctccaaccatgtgaagatgtatctgatttccccattgccttccrccatctttatacatttcctgaggcctccccagaaacagatgccgccatgcttcctgtacagcctgtgaagccatgagccaattaaacctcttacagaaacccagtttcaggtgtttctttatagcaatgcaagaatagactaattcacttaaagattctgtaggttagggttttgttcaagacatagcagggatggcttctttttgttccagaatgtctaagcctttagccagaaagttatgaacaactgggggcaattcaagtgaccaggggctgaacttatctaaggcggagctgagaaatacatagaaatgtcaatgataggcaatgatagaaatatcccctatgtatgttggctataaaatagtcacacgtggctagtgagcatttgaaatatggttagtaatactgaggctctgtacttttaatcttatttaatttttattaatgtgaatttaaaaagccacgtgtgacatgtggctagtatctaccgtatcagacaggtcaaatatcgctttcttggctcataggtttagtacctggggtaaaaggacgtaaaagctgggctcacgtgggataatgagccagagggcctgcayatggcctctgcatgtgggtttggacattgtgacctcagagtagttggactacttacatgtggcttaggactccaagagtaaatattgcagtgattaagaaaaaactgcatggcttttcatgatttagctttagaattattatagcatttttattagttgaattagtcacaaaccattctagatttaaggacagagtacacagactcctaagatatcaatagaagaagtgccaaagtatgtatcgtatgttttaaaacttgcatactctctctctcttttttttttttttttgagacggatctcactctgtcacccaggctggagtgcagtagtgtgatctcggctcactgcaacatctgcctcctgggttcaagcgattctcctgcctcagcctcccgagtaactgggattacaggagcatgccaccaagcccagctaatttttgtatttttagtagagacagggtttcaccatgttggccaggctggtctcgaactcctgacctcaggtgatccacctgccttggccttccaaagtgctgggattacaggcgtgagccacygtgcctggccaaaaacttccatactctctaaaagatttggtattatatcagagagcagttttctccattttcttaaactttgcatattttataaataatctgcattagtgaggttgataatgaagaaatatgctgatcataaactctaaatatatactgcatttttctatatgggggcttagaatttctagcccagggtggtagatgaatcaaagggatacatcatacaaatgaataacytttaagcaaaagatggcattgtaaaactataaaggagaatctacttcaattttgcatgttaacaaatgagggttcaaatttgaatgcagaactttccatgtaaaatacaaccagagtcaatagtagcagggaatataatatttgccttgaaaatcactagctgataccctcaagggaaaaaaacttgtatattttacaatttagttgaaatctaattttagaacacaccttggatctctccagactacaccaatggccatcaataaaacagaaagaagtcactcctttggatatataaatctataacagtgcagctaggatcaatcagccaatggtgtattgaaggcagagattcactatgtagaggcatgtcaagcatttgggagacactgtttataagaattcttgtagtgtaattcataatggggactgtgggaaattgattcattgtattggttaatatcattgaytgaatcaggaactgaaaggtctccctgattgattttattctcaactgcttggccatctccaggatatgtttcctgtagataacaattttagctacctctttcaatataggctatgagaaaatgcctgattctaagaatcttgcagtaagttttgacattctctggacaggatccagctatttctgcctgtcctgtaccacttgcctcagtgtcttctatttcctcaaggtagccaacttctccaatcccattttcctctggatgaaatggaaaattcacaaggtgcttctctttattgtactagaggcaacgatctctttctgcacaacttccattctgaaggaaataataattaatagtttaatctaagaacgggtaacaataaaaggcaacttgacatttaattatatggataccatgcatgatttcacttctctgtttctccttcagatgatgttcatccttccttttgtggaaacactggcttccattcttctcttaatcctctccttatggagccacaccaggcagatgaagctacatggtatttattccagggatcccagcacagaagcccatgtaaaacctataaaagctataatttcatttctactcctctttattgtgcattatttcatcagtatcatactaacattggcctgtcctcttctagacttcgttgcggcaaggacttttagtagtgtgctggtatttttccatccatctggccattcatttcttctaattttacgggacwgcaaactgaagcaagcttctctctgtgtcctgaagaagatgaagtatgccaaaaaggacataatctctcatttttataaacatgcctgatatgagtgatgatattctcagaaagaaaaaaaggaagaagaacaggagggctacacatttgtttctttcacctacctcttattttctcattatgttctatgatatattgagcattattgaaaatacttgctgatttaaattaagcagaacagattgctaccttgtttgcaccatatatggagattatgtatttartagtaaaattctaatatattgaaaatgcatttttcattaggcactgtgatcaatataatagattactctatctttaaattttattawtatgttgcataagcattagaatagaatagaaatacatcaagaattataatatctatgtatgtgtatagagtgtatataaaatcagatttatatgtacaaacacatagggatttagttcctatcctaaaaatgatgatcaattgataatttaaaactagaaaggaaaactcaaatgaaaatagttagtagagtctacagcttagtgaaaactttgaggatatgaaacaaagtcaattgaaatgtacatcactaagagttatttccaaatataagccctattctgttaatattttcagtcattttcagttaaaaacactaagcaactttgaccatcaaaaatgttacaatcttgaccatctacaacagacttgtactgtagaatctgaatctttggactaacaataaaattttactcaattggttaactgtgtaaggaaggcaaggacacgtattaaaaaatcagtaagattttaagtaagcaaaattggaggactgctgctggcatctagtgtagagttaccaggtttagtaaataaaaatatagaagrccaagacgatagtaacaaatacaggatctcatttgatgaaagtcactgtgtaaagaaagaaaaataaataaagttttgaaaagaaaaacaaatcagggataaccaatcagtttacagaattgaatttaataagaacgtctcctcttaaaaatgtaatgagaaagcatgtaaaaatagcaggttaaataaaagaacacaatcgcaagtttaaggtaacartaataaatatttaaaatgaaataattggaagcagattttgaagaacaattacgttctctctaagaaaaaaaagaacatattgcaagcaaataatataattttcagcagtaaagacaaaagacaaattttcaacattgcagaaagtattttaaaaagttaattatatggtaatcgatagaacaaaaagtaaaccctagaaaaataacctggacattgcaggcctaaaacgaaattttaaatgtgtgaataaaattaaaatatccagagaatagaccacgagatttccatgtgcaaaggatgaaatccctttaggacagtggttctccacacagggcaattttgcccccctaggggacatttaataatgcctggagacatttcagttaaaattggacggatgctgctggcatctattgtaatgttaacagattaagcaaataaaaatataggaggcctagttaaatttacatttcagacaaaagaaaaaacaacaagaataaatttataaataagtattacttgtgataaccataatatgagtttacatcataatgtaagtgtgctatggaggaccaattacagacctgcagcattgataattggatacacagacaatgacaattatttgttgcttatttgaaattcaaattgaactgacacactctgtattttacctgataactgtacgaggacaaggatgctgctcaatatctcacaatgcacatgacagtccctcacaacagaattatccagcataaaatgtaaattgttctaaagttaaaaatcatgctttgtgaagatgtaataatgaaaagcacaaattccataatagcaattaggactgaaaaaataaaatcagttattgatataagatttcacacacaccagctgccttccttatctctgaaatgtccagcttaccatacttaggctctgatttctgcacatacatccccagttcacacttgcttmcaagcaggccttactttgagacaggaatgatttgggctgctttagtccttcaccaattgctgattaatgagctgtgatggcttccagttaaaataatttgtgggtgaaaaattcacaaaatatacttcatttttaaaaattagagtatagaaattctcaaagctgtgttcttgtttatagggtactgtgaattcctaagccccataattctgtagatagcttgtttatggcagtcttctatttacctccataacaattttagattttacttctttttcttcctcctatcatgatatgggatattctgataatgattttagcaattttgctaagtgataatcacagacttaatttgaatcataaaatgacataccccttatgaaataagattattcactttcctttcaatcctttctaactgctccagtgctctcaaagggtagtgtcatccctgatgtcacagttctcctgtcccccttacctctggactcatctcttaatctaaaataaaaacaaattgtatgcaaaagaaagaaacattttttwaaaaagttacttctgatggatttagttctgtccaggaagaaaatagatgatatattcagaatactctacaatctttggcaactgtgtaaccttgatcttgggratggatgttgggaaaaaaattctccatgaatgtattgcacttctgcatggtctagctcttatcttgtgagcaaacagtatgtttgatgagcaaacagaagggcctcaactaggatcaggtgagcaaggcatgcagggtgcaaagtttgaggagccacttggttttagggccctgcaacctattgaatgcctttttacgttttgtgccctaggagtctcgttcactttgcccaagaccaggtcatggcaaagagccttgggatttagaaatagggtatccctcttggtcaraaggcagatttgtttaaagataaagactcttctcttcttcttcttctctccagagatatttgcttacattccagtgtaaagcttcttcttcagaaggcaagatggacaggttactcacagtgatcaaagtttttaagactggagtttcctaattttgagatttctcttttgatagacaccactacttgcacatgtaacatcagtttctcatcttatccctgtgaggggaytgaagcttgaagaaatagtacgatgatattcctctgactactgctagtacttcagtgaataataaaccatcttttgccttctgcaagtacaagtgacaagctaagttgttagcttataataattttggcaacgaggatggaacacagcccaaagacctggccttctgaggagaaagtgaaggatcctacaagctgattaataggatttgctgaaagtccatgggaactggtagctaacatgttgactaaaatgtttgtaattggtaaataaatattcttctattatgttgctcattaatgaggaggattgggaagtggttgaaaattgagtaccactggtagaactgaaacagacttccaaatgacacttttagatttwgctgtcttctccagataacattaggtagacagaytaaagatctcccaaagttgttacaggcctttggtggaaaggtgaaaagattaaggatctcccaaagttgttacattcagatgcttattcagttaaccaccgagtagtggcaataatgcttatttgaaagtaaatgtgtcttgcatactggcctgaagacactttctctatatttccctgataacttctttacctctattctgatgtcaattgctttagggattcgggctgggcctgagatcttcctgacccaagggacaccaaagaccctacagaaccatcccaacatattgcaaagcttcaaggagagtagggactcaaattagtatagccctgttggatatatgtgcacaaatcaccattctacttggttctgggggttgggggaaggggtgctgagggatggaggacaatagcatgtgaggaaatacaaaagagaccctactgggaggtgcactagaaagaagggcaagaagccaagaggaaaaaaaaaaagccaaccctcccctcccctcccatcccctcctctttccttcccttcttttcctcccacctcagccacccaaatgactaggacaacaggcacacaccatcatgcctggataattttttagtgttttgtaaagacagaggagtctcactatgtcacccaggctggtctagaactcctggccttaagcagtcctcccacctctgcctctccaagtactgatattacaggcatgagccactgcaccggggaggcctacagtcgttctttatagtttaccctcttttttcctgcattctataaatactcaaatagaagatagcagggccttctggctactgtgacagcctctaacaagcaggtttagaaagaaaaaggaaaaagaagtgcctgagttcaactgatgaggaytgaacaaacagtgcacacacacacacacaaacacacacacacacacaccaaagttaggaagactttgtggatagggccctttggacccattcgatgcactgctttttattgtctttatatctgtatgtakggtgtgatattaaatacttaaaatattatctcataagtgccagagagattgacccagggaaaaccaccaaaaatgttagtgggacaaactccctggccatttgagccagttggtggagcataatttaccatgagtgccttcaccctccaatgtccgaacctacccttattgggctttttgtgtattgcaaaaagagaaaatccctctgtgcaagataaaacagaaaattactcaatgtactcaaaacaactcacaaaaaatcgaccatttctcaaggaatgaaacaatcaagaaattacaaccttgaaattacttagatattaaaatgaccaaagactttacaggagctgttgtacccatccttcatgaggtcaaggtagacactcwaaatgaatggaaaggaaaaacttgtcagcagaaaaataggaattataaattataaattaagaaaacagatattttagaaatgaaaaatataatgtcttaaaaaacctttattgggcatgataaatagcataaagaaaatgatggaggaaagacagtgttcttgaggttggatcaatagaaattatatactctaaacaatacagggtaaaataattgaaaaaattatacatcatatcatgaatatgaaaggctataacaaatgrtgtactattcatgcattctgagtttcagaaaagcagaagaggttgatgttgaaaaaggactcagagaaataatgatcaaaaattttccaaacacagcaaagagcataaacctacrgattcaagaagctgagcaaatcccaaccagaatacaaccaatgaaatccattccaggaaaattcattgtccaatwtctgaaaattaaagacaaaatattgaaagcagaaagaaggaaatgacatcatagttatagggaaaatgcaatataaataatagtggttattatcaccagaaaccagaaataacagtagaaaggagcacaaatatttaaagtgctcaaaagtagaaatggtctaccagatgtttatgttcaataaaaatatccttcattaatgtaaaggaaatccaggcattctaagaaaaaaagaaaagctagaaacctaggagaatttctttccaacaaacctatctttaaataatagccaaatgaagttctctaaacataaaggaaagaatagaagagaaatttgtggaacatcaagaatgaagtaaaaataasagaaagggggaaagtgggcaaacacaatatatcttcctttttcacttgagttttcttcatatgttttaaccagccattgctagcattgaagatggaagagagacaggaaatgtggaaaaatgacattcttctctagagcctctaggaggaaactcagccttgacacatggatttaactcagtgaacctcagttcagatttctgacctacaaaactgaaaaataataaattcattttgacctaaaaattataaagggatgtaaggtttccatacttcactaaaactggtaaaaagtgtacaccactagattataagctatgtacatgtaaagtaaaacatagaagaatcactaaaaacactgttcagagagatacactcaaaaattatacggatcaactaaaatagaattataaaacactttcagtggccccataggagatcaggaaaaagaaaacaatcaaaagtagtataaataaaaaacaaaaaatatgacagctctaaaatatcaaaaaatgcattaagtgtcaatggttattgaaagtaaatttttgccatctcagtttgtgatttacgcttttgcatagatatatactttaagtcacaaatatttgtataacaactaattatacataaactcattcatattctcatgcaaatatctggaagaagcctgggtgagtctctccaactctcactgagccaaaccaggtctagatgggtaaggtgtccatcctgtgtgttctatgaagattaacagtctcccaaagtcacacacttcctaattctcagacaagtgaatatattaacttacatgacaaagggaaattacatttgcgaatcaattgacctgaatttagaaaggttatcctggattatctaggtggactcaatgtaaccataaggtcattaactgcagaagagggaggcagaagagtcagtgcaagggcgacgtgatgctatgtgatgggaggctcaagtggctattgctggcattgaagatggaagaaggccaaggaatgtggacaaaaaatgggtgcttctctagagactccagaaagggactcagccttgacaggtggatctaactgagtaagacctattatacatactatgcttctctagtttgccacaattacttaatttcctgtaatttagtgttagccttgttctaaagataagcgccttcttagaaagtggtggatagcagagtgatactcatggctaatgaacaatttgctatattttctaaattgaaaacaacatcgacaacatcyggttaaactggaattacaaagagaagagaaaatcaacttaatttttcctcatttactacagtgaccytagccatgtgacttaatttctttagatataattttttttttgtatttttagtagagatgggaaaaaattagtcagtcatggtggcgagggrcctgtaatcccagctacttgggaggctgaggcaggagaattgcttgaacccgggaggtggaagttgcagtgagctgagatcatgccactgcaccccaacctgggtgacagagcaagacaccatctcaaaaaaaaaaaaaaagaaatatgctaaattaattgtgaaatatatatatttatggaccactaacatcaaatttaaaaatatagaagatatttttaatagttaattggccataatagtgtcaccaaactttttagacaagtcaaagcaagttgaagtctcagagactattgtgtttatttgctaactgtattatcagaatgcttagttggtgcaattaatagaataattctgccaattcataacactgccagaccacagcgacccaatgaaactcactgactctcagagaagtttattccctctgycaatgttcatctttcctggcaaaccatctttagtgttccaggcaaactagagcatggtgaagtcgaagaagattctactttctgttccattcagagagcttcctggttttcaaaaaagagtgaggcatgtgggtgtgaaagagctgaggcatgaaatttggatcttatcacaagtgcagaagaaaaaacaggagatttgaagcacaaatgtgatataacctaatttctacttttaaatgatcactctgattgttgtgagggaactgatatgggatgagctgggggaagaacattaccaagaccagctggaggctggtaaagtcctccaggagagagcatcatggctgaacaatcaccttctagtaaagatcaggcaagtggtcatatttgggacgtattttgaaagtggaggcaattagatcggctaatgcataagttcctggagggagcgaggatttttgaaccactaggtaaacacctgtcagtgaccgagaaaatgttgggatgtgttatgagagatgaatcctaaaatttcatatgttgaagactggcccttcagggcctcagaatatgaacatctatagtagaaggcaagtgtggtgctgagggctgccacccacctctaggtacccaagctcctgcagcagtcctgcgtctccctttcacccaccytcactcacagacagtgtccctttcagctcttccattacctctgtttttgatgtgtctagtgagagcatagctgatatttatgctttcctgatacactagtctctcgctgattgctgacattggagcaggttagggagcaggcctgagctgagtgacctttaggaggatttcctgttcttttcctgtactctgctgccaaggagaaacctgtcttgcaccaggcctgcagcttcctcagtcccccacatcatcaggcaatatctgcctggcactcctctttgttccttttctctgacmttcctttttgacatgatggttgacctgaagtcaccgaggcaggactgctcatctccaggtcctatgggaaacagtacctggtgaaaccagagacaataatctccataacgcattgggagctgctgggctcaagcaactactctgtgcctgagatacaactcatacggcccagctagagctgatctacttcccacagggccagagaagaattgccaattaagaatgcattcccccctgaaataggtctatatttattccagggaaaataccaatctgcctgggtcccttacaagaacaatgtcgtctgtagcaaaatctaatctactaggaagccttcttgtattattatctgcaacttttcagaagagccataccagaccctcatatgcccagcacaggatccactcatgcacacctgtctagggccttgtctttatgattttctgtcacctggcttctcagccatgcctccaaccaagctatcctcaaataaagactaaccatgcacaaaaagtgaaaaattacacaagacctactcaaggtctgaaatggaaagtgcagctggtgattctgagtagtatattttatgaattgatgarcagggaatttctaggtatcacagagcaatcagcagctgaggagagagcgacaaaaccaggactctgacagggctttttggaaacttaatttttggagcaatcagcagctgaggagagagctaccaaaccaggaccctgacagggctttttggaaacttaattttttattgtcaaattatacagacaaaaatgaaagtaaaggtagtgaggagtaccacacacctttacttagaaggataaataaaggacacctttgtagggagaaaaaaaaagatataggacgaaaagtaaacatggcaaggtagactcagaatacaaaatttcaacaaataagtgcgagaaaaagaatgagaaagaatgagtattggaatattacagataaaaatccttggtgagaaagaacactctgatgaaacaggtgacataattactgagtaaaagcagaagaccaatcaaggcaattgaggcttggacaggtattacaaattatcttagatgaatgtataattgtggccatttaattatcagtgatgacaattacaatatttattagaagaaataaagtagaggatgaattctatggaatattctggagaaagtggaggtcttagctatatgacatcgtgtggctcacttagggaaccatatattcagtttgttcaggtctagaaattccttggtggtttctgagttcagttttgctttaataaaccctaaagatatttttaaaatacaaatattttagcttgcctgtgttgtatagcaccaaggcttgcctgagtgtagtgagattcacagaagtttggacaattcttgtagcctgagcaggctgccagcmccyttctytcatatatgtgtgcctgggagtgtgctgtcctcacacatctcacagataagcaagaccatctctgttacatgaaaaatttagctaaatgtgaaaatatccacgcacacacatcatgagagatggaaagaggctatcaaaacagtcagagatattgaccatcttcactgttagctgtaggatcagtgtccaccccccgacacacccacacaaactcacatacacasaaatgaaaagcacagtgaaaagcagaatagcagtctttccaaacagattgaaaaccaaaagatgtctaaagttcaatcctgacactgtgccgactgcttggacacagttccgtcaaaacatttgtccaagtcatagttgtgccttttaggaattagacacaaacaatatcctacccaacccttcctgctgagctagagtcccaaaagaaatgagggatacacttgacctgaagtaagcaaagcagaagccagtctctgaggcgaggaggcccacctggtagggagctcaaatgcaccattgtcctgcttgtctttataaagggagctgacacgtttctcccagcacaaagttgggagtgacaccagagcctcctgcaagatgcttctgattctgctgtcagtggccctgctggccttcagctcagctcaggatttaaatgaaggtaagatgaattgggggaagatattgtgactctgattggggtttacaggcaaatgctatagaggaggaaagtggagggaagagaggaggatgagaaaacagatgggactgcagagttctcatgctgaggatcagaagatctattgtacctccattcctcatcaaggcctcatagtttatttgttgcacaaatagaatccaataaagaattcgtactaggggtgtgagagagtgagatttgcattatatagagacatgggactgctgtgaaggatgtggagaatgcaagacagattcagggaagtacagctgtgaagatcctgtactgatcccagtagacagggatgatggtggccttgctgtacagtggatgagcattaatgaaggagataaacacatgtcagagctactgccgaggcagagaattgggtaaacacttgtctctgtctacatagagttagagaataaccagagtgaaacattgtcatttttctgtctcctgaatgtagtatttcaatgtgctgggaatggcatgcgtaagattatatccaagtggctatgtctggtggctcctgttgagaaggcttgcaaacataaacaacatatttacagatgaaagagggcagaagaatccccaaatatgtcattgaaatactcagagcagtttaactaaataagcgctaagggtttacaggcaaatgctatagaggagraaagtggagggaagagaggaggatgagaaaacagatgggactgcagaattttcatgcygaggatcagaagacctattgtatcttcattcctcatcaaggcttggggaatcaaaagaggacaaacaggggcccttctatgttgagttcctggttgacgctcagtgtagtaacaatactgctttcccttacatcttcttccacttccagtagcatcagagagtggctgatgagatcacaaaggggatgcacagggtgtgatcagaggtcctttatcctcgtagaacactatgagccttgaatgattcaggaagtaacttttcccatcatcctgtacttcttttctagatgtcagccaggaagatgttcccctcgtaatatcaggtaaatcccaataaattctcagtaaactctgtctccatttttccctgaaaaattgatgagttctccagtgtcttcttatcaccattttcttgtcaggaattggctaataccaatgccccaaagatayaaacagttttctcccaaccttgattctggrgaccatgagtaaagaaattcgatttttcatcacccttatgtggattaagaggagttctaattaggaagccttgggaaggggggaggttgggagttgagaggcaggtcaggcagagaggggccggccgtgtggtgcagacagagaggtatgaagacaggagggttttccagcatgagctcagctcttcttgtttcaactcacacagatggaggagactctgagcagttcatagatgaggagcgtcagggaccacctttgggaggacagcaatctcaaccctctgctggtgatgggaaccaggatgatggccctcagcagggaccaccccaacaaggaggccagcagcaacaaggtccaccacctcctcagggaaagccacaaggaccaccccaacagggaggccatccccctcctcctcaaggaaggccacaaggaccaccccaacagggaggccatccccgtcctcctcgaggaaggccacaaggaccaccccaacagggaggccatcagcaaggtcctcccccacctcctcctggaaagccccagggaccacctccccaagggggccgcccacaaggacctccacaggggcagtctcctcagtaatctaggattcaatgacaggtacgattccagtttattatccatcaaaggctccaactgctacagttctccaacttcattgtgccaatgaatcctctgaaaacctgttaatattgccctgtcctggaacacatttctaaaaattgttattcagatattcttgtatagagtatcaagaccctgtgaccctgtgttttacagaagctcttgaaggcaattctgattttgagaatcactrtcttcaaattacatgtcttaagtagggttgacaatgaggacatagaaccatgttccccctttggctctctctattttctttcctcaaactcagactcccatttaaagttttcacctgaacatgctttgctcagtcctgcctcacatcaggctttcaggtccagtattcctgctaagtggtccttgaactttcagttgtaaaatggtatctcatttttagtatacttacatttaaagtcatacatgcttaagctaacaaaaactaatctcactgaaccgaaatgtacagagctaaatagtaagagcctaactcatctttcctcccttctatccttctcaaaacccccaccttttactctttggaatctactttttgaaatatatattgctacataaatatatataatgcttttattacaagcacttataccatactgtatattcagatttgtgtcttactcactggaaaaatttattgtttagaaaactttctcmtgagttcatttagatctcttcagtgtttaytggttagtttgtttttacaattgtatactattctattgtttggttgttccgtaatctatttaaccaatccctgtcactggatattaaggckggattcacattctcactattatatgatatgttgcagtgcccatctttgtaaaaatagcccttacataaccaacagcagcaaagcatgaacacataacaataattgtttctctttctcatctaagcaacactttaaatcacattatgtgcaatggcttaaagagtgaacaaagaaaatattactaaggagaagggggctgtagaagggatagagggcaagagtaggggcttgcatctccatcactgcagtaacccccagtgagggattagacatttcctgccatgtcaagtgttgtctgtaatcttccttgtttgcttgtctttttcaggaagtgaataagaagataacagtgtttcaaatgccktgaaacatggcatcatgctctaacttcartataccaataaaayaatcagcttgcaatttctgctggtggtgtctctttctgagtgtttgggactctagaatctgagacccatgttcacattgtaagaatatccaggaccccttctccttgatgtttccagcaagcttctctcctccttatccttattaagtcatccacctggggaaggagttccactgtttctttccttctctgtcttctatagctcgaatttaagttgtacaattattttcaggtcatttcttgatattctagtcagcttatgaatgtaagcaaaacaataccaatgaaagaaaatcccagaagctgagagaaattttaacaagttcaaaagtaaccgattttgttttctagggaaatgagtatggttctatgcctctattccccagaagccactagacctattttcccatattttatcactgatcagttctgtccctgcctatgagtcttactattcttaagaaaacctaaatggatttcatcagaggcagcctgacttgaatgggcaaagaatttggaatctctcagattgcagtttaagaactatgtcttgctaactctggactcataggaagctacttaagtctcagagcctaagtttcctcttctaaatttttgaataatcaaaatggctcccctaaaggatgaagactaagcagatcacatacatgaaamactagtggatatagtcatgtctgcttcacaataatgattttaggaaagaacagcagacatgaaattgtgaggaattaaatgytcccgagttaaaaatcttaagatttctttgtccaaaaaatctaagtagaatagtctctgatattgtttttttctaggctttcaaacaaaataggaacacaytgagtatycatatttttttttagcattttctttcttatcagacccgtaaaattctaattaggttttttttaaaaaaaatagtatctgcttatggaaatttaattatgacaattagaaatgcaggctctttcttcctcctcctcctcctcttccttcttttttatttctcctactccatctccctctttttcttttttgaaaaaatatgyttaaakttgccttcaattatatttatttatttatttatttatttatttatttatttatttatttattttgagatggagtctcattctgtcacccaggctggyctgcagtggcaagatatcggctcactgcaacctccgcctcccaggttcaagcgattctcctgcctcagcctcctgagtagctgggattacaagcatgcaccaccatgcctggctaatttttgtatttttagttaagacggggtttcaccatgttggtcaggctggtatcgaactcctgacctcgtgttccatccgcctcggcatcccaaagtgctgtgattacaggcgtgagccaccgcacccggtcaccctcaatttatttttaaactttatttttataaatatatgtggttcaaagataattttgttacatgtatacattgcataatggttaaatcatggccttagggtttccataacaagaataacaaayattgcatttactaattaatgtctaactcttaattccctcccacccactcactcttccaaggcttcagtgtctatagttctcccctctatatctatgtaaacacattttagcacctacttattagtgacaacatgttatacttgactttctgtatctggcctttgtcacatagcatattatctgtcacatccagttccattcgtattgctacaaaaggagtgatttcgttccttctttttttttttttttttttttgcagagtagtattgcattgtgtatatatcacgatttctttacctacaaacccattagtatccattgatggttacttaggttgatgccatatctttgctrttgtgtatggtgtttcaataaacatagaagtgcagatttatttttcatatactgatttcatttcctctgcatagatacagtagtaagattgctagattgaatagtaatcgagttttagttctttgagaaatcrtactgttttccatagagtttatactatttactttccaatcagggtgtataagagctctcctttctccacatccatcccaacatctgttttgtttgtttgtttgttttaatcatagccattctgaatagggtaaggtgatagtgwggttttgatttttatttctctgatgattagtgatatagagtatttttcacatactgttgattatttgtatgtcttatttgaaaagatgtccatttctatctcttgttcactttttaatggactattttgttgtttttgagttgtttgtttgtatattctggttattattctctgccagtcctatgctcagtagggttatcattgggagctgtgtagacattgccactagtccaaactcagaagtgaggcataggggagcataacatgcctggcaggggctctcgaagcttgggcagatcagtcctgggctccagcccaacgtctagtgtgcttctctagcagacagccctgtgcccccctcctcccacctctcagattgcggggtcaggattgttacagggaaacacagacacctttagtctctatgccagcttatatgagcaatctccaagcaacaggctgaaggacttacatggaaatgtgatctaaacctagagtctagcttgctttataatgtgtgattattaagagttggagtatgttagccactaattgtcttcttgcactsagccctgaaaatgttaaatttgggcttttggataatcattgggccctttcgatatggagaattaacctttagttctgggaaatgtattgtttcattgatgtgtttctcaatatattctggtttcttggtctgaaattaatgattgttgatattaaagagaacaggttatagraggtggaaatcaagattctacttggtacacggtatgtttacattcattttaaatgacaggtggattgctgaggtccttgactcctgtacagatgcctaagcgcctgctgcagtcctgctcctggctttgactccattctaagtcagtcacagtgtctccttcagctctttggtaatctctgttttggttgtctggtaggttgatacccaatatttattcttgcctgaaacacaaatctctctcactcatttctgacattagagagggtcaggaatagggtgtgagttgagtgatatatggaagcatcacctgttctcttcctggactcaggagacaaggagaagcctgcctcccaccaggactggaacttcctcagctacccactcaaagaggcacatctgactggcattcacctctgctcattctctctgaccttccttacctacttgaaggtctactgtaagctacctaggcaaaactgctcatgtccagtaactcttttgaagtaatgtttggtgaaaccagagacaatcatcctgttaacatcagggtacctgctaggcccaagcagctactctatgactcccttaaagcatgtgacacttagttgcaactgtttgactttccacatagctgcagaatatttgaccactggtattatattccttctcaacccacatcactatttatgtcagcagaaaaacagaaakttaatctgcctaatcaactagaaaattcaatgttacctgtagcaattcttatattattgaaaggccttcctgtaatgtagtaggtctttaaaaagttcatgaaaatgtatgttatattaagaaataccataaaaggattccacattttttggcatcaaaatgaacctaaactgatatgctgtaagatgtctgaataggagctatttcaaggaataatgaaaaataagacaggagtttcaaaacatcccctataagagcaaaatacatttttctaaaattaaagtgaaaacaaagagaaaatttatggttaagcttgcatgaaagaaggtraaaccactgatgctttctgaaaagttcatrtggataatggctgaagaaatcagcagttcacaagtagatatgttatttcaagaagggatgaaatggtgctgaacctcaagtctacrgtgacagagtattcatatcaaatgtatcttgttgataccatgatagaagaggaatgaagattaagagtacaaacaatagccaacccttcatgttttttaattggttcatcttacatgattctaactgaaaaattaatgttgagcaaatttttcactctgtggatgccaaaactatggcaaccagagcagctacagacaagagaagaagcttccctgaaaatttaaataaggggataaagatcctgaagcatttcatcaaagaattgtgacagcagatataacatggctttatcagtacaatcatgaaacaaagcacaatcaaagcaatggctaccaagaggtggaagtggtccagtcaaagaagagtggatgaggaaagtgcaaaggtaattgtaagagtttattgggaagctcaaggcattttgcttattgactttctgaagggccagagaaggacaatatatgcttattctgagaatattttgagaaagccaraactctagtagagaaatgcctgggggagcttcagcagagtccttcaccacgacagagctcctgctcatttctctcatcaracagggcaattggtgagagttctgatagaaaaccattaggcatccacattacaccctaatttakatcctttggatgctttttgttttgtaatctcgtaacatctgtaaagactatttattattcttcagttaatgtaaaaaggacacaccaatagctggtatgttgaccaaaatgtatgaaaatttcccttatgctgttcattaatgagtaggatagggaaatggttgaaaactgagtatctgatggtagaattgaaacaaacttaccaaatgacacctttacatttgcttttttccatagagaacaagaggtagaagaattaaagatactccatcactgttgtagacctttggggagacctaaaattcaaatgtttattcaattggttttgagcaatgtctgcactgcttgaatttgaaattaaatgtgtcytgtttacttgcatgaagacactttatacatatctcccttatcacttctattcctctactctgatctcagttcctttaaggatttgagctgggcctgagatatccctgactcaaatgagacaaaagcttaacagatccatcccaaaattttgtaaagcatcaaggagggtagggattaaaattgcttatatgtgttcaaatcactattctacttggctctgtgggaaatggggaaggagtgctgaaggatataggatggagccacttgtgataccgaggcaagaaaggaagagactccaagtctgtagactccctagacactgggaggtgcactttaaaaaggtaaaccctggagcaagaagtcaagtgaaaaagaaagcctttttggtggccctagtcttttttgttttttgggtggttttcattgttgttttttcagactttgacttgctctctctcttaggctggagtgcagtggcgtaatcatggctcacagtagccttgctctcccaggctcaatctatactcccagctcaccctcccaaatagctgagtctacaggtgcaaaccaccgagccaggatccttttgtaatttttttataaagactgggtcttactatgttgcccaagcatatctcaaattccttgtgtcaaggaattctcccacttctgcccttgaaagtagttggattacaggcatgagccatttcgccaggcctgtagtcgttgattttacctcagccgtattatccactttctataaatccccagtcagaagacagcaggcctacccgggtactgtaatagactctaattaagcaggtgttaaactgtgttgttactgtagggaagaaaggaaaatgaagtcctcaaattcaattgagatttgagcaaatgatgcacaaaagaaaactaaaaaagactttgtgaataggaattttttgggaccccttcagtgcacactatgtatgctatgatgttaaatatacttatagttttatctcgtaagagccataaaggatcatccaggcagaagctccaagtagaaaaatgttagtgggacaaaatcccctgctatctgaaccagtgagtggatctcaattaagcaagaaggcctctaccctccaatgtccaaaactt

SEQ ID NO: 9932 - DNA, 12900 bp, Homo sapiens
tgagaacacgtggagtttggttttctgtccttgcgatagtttgctcagaatgatggtttctagcttcatccacgtccctacaagggacgtgaactcatcattttttatggctgcatagtattccatggtgtatatgtgccacattttctttatccagtctatcattgatgggcatttgggttggttccaagtctttgctattgtgaatagtgctgcaataaacatatatgtgcatgtgtctttatagcagcatgatttataatctttcgggtatatatccagtaatgggatggctgggtcaaatggcatttctagttctatatccctgaggaatcgccacactgtcttccacaatgtttgaactagtttatagtctcaccagtagtgtaaatttttcctatttctccacatcctctccagcacctgttgtttcctgactttttaatgattgccattctaactggtgtgagatagtatctcattgtggttttgatttgcatttctctgatggccagcgatgatgagcattttttcgtgtgtcttttagctgcataaatgtcttcttttgagaagtgtctgttcatatccttcacccacttgttgatggggttgtttgatttttttcttgtaaatttgtttaagttctttgtagattctggatattagccctttgtcagatgggtagattgtaaaaattttctccttctgtaggttgcctgttcactgtgacrgtagtttcttttgctgtgcagaagctctttaktttaattagatcccatttgtcaattttggcttttgttgccattgcttttggtgttttagccatgaagtccttgcccatgcctgtgtcctgaatggtattgcctaggtttacttctagggtttttatggttttaggtccaacatttaagtctttaatccatcctgaattaatttttgtataaggtgtaaggaatggatccagtttcagctttctacatatggctagccagttttccagcaccatttattaaatagggaatcctttccccatttcttgttttkgtcaggtttgccaaagatcagatggttgtagatgtgtcatattatttgtgagggctctgttctgttccattggtctatatctctgtttwggtaccagcaccatgctgttttggttactatagccttgtagtatagtttgaagtcaggtagcgtgatgcctccacctttgttcttttggcttaggattgtcttggcaatgcaggctcttttttggttccatatgaactttaaagtagtttttttccaattctgtgaagaaagtcattgktagcttgatggggatggcattgaatctataaattaccttgggaagtatggccattttcatgatattgattcttcctatccatgagcatggaatgttcttccatttgtttgtatcctcttttatttcattgagcagtggtttgtagttctccttgaagatttccttcacatcccttgtaagttggattcttaggtattttattctctttgaagcaattgtgaatgggagttcactcatgatttggctctctgtttgtctgttattggtgtataagaatgcttgtgatttttgcacattgattttgtatcctgagactttgctgaagttgcttatcagcttaaggagattttgggcagagaagattaggttttctaaatatacaatggcaaattctattttcttaccaaggtatggtaacatcaattttaaccttataattttttatcttactstttattagttgttattactctgtatmtgtatgttttgctccacaataaaaaatgttaaaaaagcagaaacctaaagtacatttctaagtgtaaaattagrgtgatgcagcatattcttatagatatcattgtaattagagtttttgctgaataaagaatagaggattatggtactaagaaatccaagttaaaatttaaaacttttctatttttattttgagacaggatctgactctgttgtccaggctggagtgcacaagaacaatcttggctcaatgcagcctctgtcaccttggctcaagtgattctcccatcttagcctccagagtagctaggacaacaggcgtgcaccactacgccctgctaattttttctatttttttgtagagacatggttttkccatgttgcccaggcaggtcttgaactcctgtgcttaggcaatccacctgcctcagcctcccaaatgatgggattacaggtgtgagccaccacacctggcccaaaacattacttaaattaattcacacaaaagaagagataggcaagaattgttaatccactttcttagtgctaatatgaatttgaaacatcaaaatttgaatatccatgattgatagacaccttttttcttatttccaatttaattatttwtgatacacatttgaaagtgtaagaaattcaggaatttacaataaattatagtacgatggatattaaatatattaaattaaatgtattaaaaatgtgtctctaaatgaaatatttatattcacattgttagcattctaatttcactatactattcctgtgtacaccagtgtgttgggtaaaattttttgttactataaattttttggctgtccattagagaaaaaaatcatagaaaggcaaattttttaaggtataaaaaataatttagcctgatctttgagyatgtttgtgcacatataatgctactttgactgctgtagtaaaataatccagatttagtcaccatagctaagaatgagaaaaagcatttgtgatagtttgctgagaatgccgtcattttttgataaagttttaagtactgttttactatttgatsttttaaagattgttaaaaactaagaagtgttgatttctgctaataaaaacagcttaaaatttawatcatggaatagaatggtggagctgtggyggagatactttgtcttattaattgaaatgacattttgagatccagtgctgctcactgaatttccctgtgaggagagtttgtggtgatgaccccacaacagacaagctactatccaaaaaaactcctcacatcaaatcaatttccagtttcttccaagttgcaggaggatgcctagaccttggttttattctcttctttgaccaaagtattacaaaaggaagaaaatcattaccattttcatgtcaggagggtggcatggagatggacttagcctattttcrgtgttccatctcttgccctttataagggttagttgactgtttatgatrcattccggtatttcccatttttgttttggttcatttctaagtgtgcattataattttaatattaaagkttttgattaggagaaatgtctcatagaaattattattactcatctgattatatactgaagggaaaaatcaattagttgtatatacattcttatacaactctaagatagttgaaataggaactttcttatttagttgcatcatgaggaaatttgagatgatgttatctgccaagcgcagatctctccaaaggatttcttctagccttaattatccacctcacaggacaaacctttgccattccccatctaytttttctttcggctcctcaattcctgacacaacaaagttgtacatatttcccacactcttggtttagcagagttcttttatcagttatgtttttmtgcaagagaagaccctctaaaacattagacatatatatctcacatgtctttggatttcatttktgtgtgtgtgtgttttctgttttttgagatggagtctcactctgttgcccaggctggagtgcagtggcactatcttggctcactgcaacctccacctccagggttcaagcgattctcctgcctcacccttctgagtagatgggactacaggcacactccactgagcccacctaatttttgtatttttagtagagatggggtttcaccatgttggccaggatggtctcaatctcttgacttcgtgatctgccctcctcagcctcctccacacctggcctggatttcatttttctaagctgggtttgatggatggctctggtgatttgagatgggccaaattcggsatcttggagatagagtttggccaatttagtctggatcaggtgggggcaatctgactwcattactttctcattctccttctgggaacagtgtacttgcgaggcgatattctcatggtaaatggaaagaggaagaatccccagtatggaagccatctcaaatctctatgcaaagtgtagtaattttctgtttatcaaagtaagtkaaatgattgaactccaagttcaggggaaaggtagtcagtcttcctgtgataggaggatactgcaagatkatataccaaagggtcgggtactcaggaattcttataaaatggctaaatattttatataataataaatatttaaacattagacttgagagaaactttaccaaaggcctaagaattagagatatgtttgataaataaatattattcwtgggctgaaaactcttgagtgggaaaatagggctaatttcatctggacaacttcttggaaactcattttttattttggaaattwtgagaaaataatttgttccattcataagtggtgtgcacatgcgtgtatttgtgttcatatttatgagcttgtgaataatgaagttatacaaaagtattagcagcaaccaaatcttatggagtattggcctgcctgtggttctcaagaaaatcttagatgcttttgataaaagcagtttggattctgtgtatacaaatctggcattttaaaaagtccatattggtaatgatcttagttgtgaccaagctccctttaagactttagacatttgctatatgatctatgtattgggttataaaacttcccaaacaactgaagttgctaaacacaaatgatggagaggttacacaaagaaaaattgcaaactctgaaagagagtacrttcttatttgtgtactagcaaatgaggattcaggtttccagtcaatttcagtatgaataattcyagcctgtaacaagaacaaacagtgaatgaatgagttaatttgagttgtttgaaaataagaatgttttccataaagagatcattgaactcatyagttaacacgccatggtgatttctggcttgacactggtcacaacgtttaaaagtaaaaagaatgacccagcagatttacaaattaggtgcatatagaatttaaggtcaggatattcaagcaatcacaaccagtgatattacattgagaggtgaagccagctggacttcctgggtggagtggagatttggagaactattctgaagctagcaaggggattgtaaaatgcaccaatcagtgctctgtaaaaggcaccaatcagcactctttaggtagcatggggattataaaatgcaccaatcagcactctttaggtagcrtgggaattataaaatgcaccagtcaacactctgtaaaaatgcaccaatcagcactctagctagccagaggattgtaaaatgcaccaatcagctctctgtaaaaggcaccaatcagcgctccataaaacgcaccaatcatcaggatcctaaaagtagccaatcacagggaggattgaaaaaagggcactctgataggacaaaaatggaacatgggaggggacaaataagggaataaaagctggccattccagcccacggggcagcccacggggcaacccactcaggcccccttccaccctgtggaasctttgtccttttgctcttaacaataaaccttgctaccactcagtctttgggtccacacmgtctttaagagctgaaaccttgctactgctcagccctgggkccatgccatctttaagagctgtaacatcaytgcaaaggtccgtgcctccattcttgaagtcagcgagaccacgaacccacctgcaggaaccaactccggatacaacaccagcattttaaaaatttctttttgtctgttcagacatgataacttttctgcccatcatattttccattctagtagtggttacatttgttattggaaattttgctaatggcttcatagcgttggtaaattccaccgagtgggtgaagagacaaaagatctcctttgctgaccaaattgtcactgctctggcggtctccagagttggtttgctctgggtgttattattaaattggtattcaactgtgttgaatccagctttttrtagtgtagaattaagaactactgcttataatatctgggcagtaaccggccatttcagcaactggcctgctactagcctcagcatattttatttgctcaagattgccaatttctccaaccttatttttcttcgcttaaagaggagagttaagagtgtcattctggtgrtgctgttggggcctttgctatttttggcttgtcatctttttgtggtaaacatgaatcagattgtatggacaaaagaatatgaaggaaacatgacttggaagatcaaattgaggcgtgcaatgtacctttcagatacgactgtaaccatgctagcaaacttagtaccctttactgtaaccctgatatcttttctgctgttagtctgttctctgtgtaaacatctcaagaagatgcagctccatggcaaaggatctcaagatcccagtaccaaggtccacataaaagttttgcaaactgtgatctccttcytcttgttaygtgccatttactttgtgtctgtaataatatcagtttggagttttaagaatctggaaaacaaacctgtcttcatgttctgccaagctattggattcagctgttcttcagcccacccgttcatcctgatttggggaaacaagaagctaaagcagacttatctttcagttttgtggcaaatgasgtactgrgtgaaaggagagaagccttcatctccatagattcagaagaggggcrttgtgtgtcttctagcagaaaacaaactggtggtgtatgaaacattttatatttcttacwgtgttttctgtaatgtatgtgtatgaataatttccaaacatatacctagataaatctttaacctagtctaaaaaatgtatgtatgtgtgtgtrtatgtgtgtgtgaaaaacttaagaacattgacaataacatactcttytttgtttttttcatatgaactgccagattatacaaaatatgacaaaaattcctcagaattatgaagccatgtgtatttcattcatgtattttatctttcatttgtagaatttacaatgtctatttataattattaagaactaacagcttatctcaggaaagatattgctgttttctattgttatttgaaccacacaaatataccacagtgtgcttagaaatcattgtttgaacctctatcttattggatggtaaggtcattcaattctaaaccaataatgtggatgtatctttggggttttattccattatgaattcctattttatggttagtaaaaagcaaacagaattattgtaaacaatgcacactatagaattcgagtgacaagtataggtagaataaatttcatatatgtctaccataaacagtactgaagaatactagatttaaagcaagtatgtgaatagcttagaaaaaaatctctttgataataaagggaggaaatatgatcatggtcttgattgctattatcggtttccatacgcagttagaaacrtcatttcttccagcttttgaattaaagaaaagctgtttttgaagttgagatctgatgtaaattattttagtatttttttctaagrcacttctaagcccctgaattgctaattatatcctcatcttccatttacaaaattccttctaaacttcagataagagaactcaaatcttctcttttctaaaaaaaaaaactatcaatgtaaaaatagtatagaaattatggaaaataattcagtgaaactttttgtaaatgttaaaatagtatctatgaaatctatgtattaattatgggatgtgccttaccattgtaattttgttgtcagtgatgaaagtgttttgacatattcattaayaggaagttctattataagaaagaaatgtacagtcttgttcacagctaaattctatatgactayattaattcttggtgttatgaagttttaacaatgttatttaatgttatttaaaccttaagataaatcatccccacacctgatttatgtaatttttkaatcatatatcttcctcagtacaatgtaagaactgtaaagaaagagatcatgtctgwcttgctttctgttgaytcccaggacctagaacccagcaccaagaatagatggccaaaaatgatactttaatgaacaaataaatgggtggctaaaatggataagttgatgtggtaaatcaatgaaaaggaaactcatcacaaaatctgcagttgcatgaattcccctgttctggtctcaggttgaggttkcaggcttatccaagcagaatccttcctcagaggaaaagtttggctattccacaattttaggggaaatatcacactagtgatatatatagtgatatatagtcacactatatatatatatwgtgatatatagtcttgatgcagctgtgtcaggtgtctgaattggagacaaggtaaaacatcaaaattagatggcaccttggaaggctgaggcgggcgratcacgaggtcaggatatcgagaccatcccggctactatggtgaaaccccgtctccactaaaaatacaaaaaaattagctgggagtggtggtgggcacctgtattcccagctactcggaaggctgtggccrgagaatggcgtgaacgtgggtggcagagcttgcagtgagccgagaccgcgccactgcattccagcctgggcgacaracaaaaaaaaaaaaagaaaagaaaaaattaggtggcacctatgacaatactttaaaaagcatataaaagactttggtctatttgcataagtatttttttattgtgaattatatatttgtgttatgatattttctagttgattattaggtaaacaaaatggcatttcatttcaaaaaattgagttagtaaccagctacttgaccaaaatgtttttaattaatacctgttaatgaaagtgatgacatttatttagaagtaaagttcaagacaaaaatggcagggacatgtggaaattgagacaggaagaaatgtgaaacaatgctctagtcgctttgaattctgctggatcatctggcacagtggccatagcagcttggaccagagcctgtatctgctgtagagccctcttttgttctgggttccacttgagaccagtagcctttggaaactttattaatgagtcagagcaatattttcaaacgtggaatatgttggctccaaaatctcaataggtccccaaaacattgtatctcttttgtagtgataggaagtacayagagagagcaacatgccatttactttaaaaaagattgttttgacatgtgccctagggacactgcacaccttaaaacatcacctatgctgtaggtccctgaatcttctcaggtttatttcttttcttctggtattttacttccatccaacattagggtattttactatatttaataaacttgcaacttcctgattattgtaccaactaatactttattattattgttattattttgaacagggtctcattctatccctgaggctggagttcagtggcaggatcacacctcattacagcctcaaccttctgggctcaagtgattctcccacttccgcatttctagcagctgggactgcaggggtacaacaccttgcctggctaattttgktatttcctgtagggctaggatttcaccatgttacccaggctggtctcaaactcctgggctgaagtgatctgtytgtgtcggcctccaaaagtgctgggattacagtcatgtgccacagggcccggtttgtaatattactaatatattaaattagcacgatgttttaaaaaatgtaaattaaactgagaacagaagtgacatagccctgacataaaacagtgaagcagtgctattattcttacaatacaagccaaattgttttgattttcctgcataatgggtgtagattaacaaacattcaccaaatcatgagccccgtaaaaagtatcaaaagctctgctctgctcagtgaagatagcacatcctggaaagcatttgtgagtgttgattgaagtttatggtagtctgcattcastataacctgtctgtctttggtagaggccagataggttaagtgaatcgggttatagaaaggactaccatcccctgtaactttcaagtgttttgtcatgacagtgaccagttccattccttggggaatgcagttattatattttatacattgtgttgccaatggaggagaatttcagaggcttccccttggtcctgctataataatgttccttactctacagttcaggaagaatgtgatagttctgccagctgccatacgtatccatttcaattacacattcaggaagaggtaataactacaaactggttagatccaccttgggatagacatgagcygaagctctgggcagcatctgaccttcaagaactcccactgcaggctggatgtgatggcgcatgcctgtagtcctagtactttgggaggccaaggtgggaggatcttttgagagcaggagttcccttcgcaacatatggaaactctgtctctacaaaaaatttaaaaaattagctggcggggtggtgcatgcctatagttccaaatacttgggaagctgaggcaggaggattgcttgagcccaggagttccaggctgcagtgggctatgatcctgccactgtactccagcttgggtaacaaacggagactgtctcggaggaagaaaaaaaaaagaagtgcaagttctcactggtatcttaaatatcaagtaaaaagggatcaaatcaataattaacaatctttggttcctgcctatagcaaacaggtaaaatggaaagtagttatacaaagggtatattatattaacycctaacaaaattaaacaaagccagttttttttcatctcctttcattttttttttttttgaaacagggtgttgctctgtctccccgttggagtgcagtggtgtgatctcgaccaattacaacctccgtctcctgggttcaaatgattctcctgccgcagscaaccaagtacctaggatcataggcatgcacaaccacaactggcaaatttttgtatttttagtggagacagggtttcaccatgttggccatgctgttttctaactcctgacctcaggtgatccacctgcctcggcctcccaaagtgctggaattacaggcctgagccaccgtgcccagcctattatctgctttttataggtaattatactgaggcaggcagtagttgtaaaatggagtctcacatatctrtatgaaacagggaatctggtttcctgtctttgtagtctgactcgaagatcccctcttagaaaccattatagtgtaaaaactgaaaagatataaaatccaagattggagactgattttaatatctattcatcttaaaccatttagtaatcaaaaataaatagggaaaaataaagctggatattcatacatagagaagtgtagattcttcaatggaaaacatgttttttaagtgtccaaggaatagttataaaatttctgagtattttaattaaataactaagatttaagtgttagactcatgagaataacttagtcaaaggcctaagcatgagagattaagtttgataaacattgaaaatgggctgaaaagcctgagtaagaaaattaattactttttcattttagaaattataggacaacaatttttcccaaccgtcaggggtgtatatatgtgcatgtgaaagtgcttatgttaatgagcttgttaataataagttatacaaaattattagttggcagcaaccagattttaaggaatattggccttcttgggcttccgaagaaaaccttggacgcttttggtaggaaaagttgggattcactctccataaatccggcgttgaaaaaatgaatcaacagkggtcatgattctagttttgaccaagctacatataacagtgtaggcatctgatktatgatctatgtattaggttggaaaatttcccttacaactgacattgctgaatacaaattatatagaggttaaacaaggaaaaaaattacaaaatgatgaataagaatatgacttratttgcatgctagcaaatgagaattcagctttcacatcaacatcagtatgaaaatttttatcttataacaaggacatagtatttgaataggagttaatttgagctgttttggaaattatcatgttttccattaagatagccttgaactcattcaatagcatgctccggtggtttcctgcttggcattagtcagagaacttaaaaggaacaggaacattactgcacaaccagaaatcaggtgcacatagaaattaaggtcaggaccttaaagggaatcttgcccattgatattagtcctgccytaaaaaaagtcggacatggtatgtttactactaatcattttttttccataacgttaatggtaktttgtattttcccatgggcacctacattacacttatagactattttgatatttcaacctattattttctttgaatccttttaaggagttgttaaacaatgctgaaatttgccttacagtatgctgttaactaatcatatttctcaaagtcatttgacataatgtttggttaaaggaaatatgtctagcatagttatacccgttcataacaaaagagtatttaaatctttaagaaaaaatattagaaaagctaataatatgaataaataaat

SEQ ID NO: 9933 - DNA, 308631 bp, Homo sapiens
  misc_feature (102314)..(103097): n is a, c, g, or t
cattagggatgactgaatttttactttctccctctctccctcttttccttctttctcttttttccagcattcattgcaaagatttgacgtggtggaaaagggaaaaagaacaaaggagttggaaggtaatattgcttagtggtcaagctaagatttgtgaaaaaccaaattactgctcagttctcagctctgtatcaaagtaaactgctgacattcaatacctagagtgcttgtttcctgggtggagactgaagaaatatgttgcattattgttattgatatttgggaagtctcatataatgaggaagatcctctggtaacgctgtatgtgccccagaacctaggaagcattgcacgactgggcctccagaagcccagcagcctgggcagagccggccattataaagacttcagttggaaggcctttctgaatcctaggcatccctagaagcttctggagtcctgggtcttcacatcagtgctctgtatttgtgagactaaactattttttttttttttttgagacagagtctaactctgttgcccaggctggagtgcagtggtgcaatttcagctcactgcaatctctgcctcccaggttcaagcgattctcatgcctcagcctcccgagtagctgtgattacaggtgcctgccaccagacctggctaatttttgtatttttagtagagacagcgttttaccatgtttgccaggctggtcttgaactcctgatctcaggttatctgtccacctcagcctcccaaagtgctgggattacacgtgtgagccaccgtgcctggccaagactaaactaatttttaagggcttgctttatgctagtctcccttttaactggcttgtatttcactattacaaagctgctcacagtttttttttcttctttttttctttttccttttttttccaaaaaaaatatttggactttaaaaaatgataatttctatcatgtttaactaactatacattcttttttaaaaagtctttctcaagctatcttaataactatacattctttaacagctttacttatttatttagagacagggtcttgctctgttgcccaggctggagagcaggggcgcatttatagctcayggtggcctccaagtcctgggttcaagtgatcttcccacgtcagcttccagaataaataggactatatgtgcataccactatgcctagctaatacttttaacggtgttattaatatgtaatttacatgtcataaagttcatccatttgaagtgtacatttcaataaatttcagcatacttatagcattgtgcaaccatcacaatctaattttaggcatttttatcactcctccaaaagaaactatgtaccaattagaagttaagaaactatgtaacaattagaagttactctacatctcacctcctcctaccctctccaagcctaatcttcttttgttttccatggacttgcctattctgaacatttcaaccgccttttgtgtctggcttctttcacttggcataatgtctttgaggttcatccatattgtagtatatatcagtactttcttcctttttattccccattaatattccattttctggatatattacattttgtttttccattcatcaattaatgaacatttgaattgtttttcatactattataagtggaattgctctcctcatttcatttttggcttgttaattgccagtgtatagaaatacagtttttgtgtgtgtgtgtgtgatggagtctcactctccctccggggctggagtgcagtgacgcgatctccgctcactgcaacctccgcccgccatgttcaagcgattttcctgcctcagccttctgagtagctgggattacaggtgcccaccaccacgcctggctaattcttgtatttttagtagaggcggggtttcactatgttggccaggctggtctcaaactcctgacctcaggtgatctgcccgacttggcctcccaaagtgctgagattacaggtgtgagccacagcgcccggctacaattgatttttatatgttgatcttgtatcctgcaaacttgctgagtttttttattagttctaattagttttgcagtggattctgtaagatttttctatttgtaagatcatgttatcttcgaatagaggtagttttacttcttcctttccagtctggatgccttttatttttcttgcagtttcttattccacctatctttagtttgccatgattcttcatggtacagactcagtgttataacttctcttcttgctatctttttgtatgctctgaattttcaagtttaaatttgagaaagtgaatacagagatacagaaaacggagaaaaacatggagaatctgagtagctgaagtattagctattatttttcttagggcaaagctttgcattctagctcataggtgtctggctagtaaatgctgcctttggattagatgactattaataagctgtagccagaaagaaagggaggccacaagttctgggtagctcaagaagggattgtataggcatgactggcctrgaaattgacatggatagaacagtattgttagagaaggcattttgttttaaagaatacattgaattttttttaaactcagaaggcatctttktaatgttggttaaaatgcattaggatgtctaaaacatttttggattgtctgtttgattagaccacttatatgtgtttgaatcataaaacatgaaggcactccactaccttctcatgcttggcattcatcatctttaatatatttggttgaaagaactctacttaatattctaactggagatatatatatatatatttaagacaactagtggtttcttcatctctctattctctccaaggaacgctttctttgtacttggttattttcgtaagtgcttgttgagcatgtgtgttatatagaacctccgatatgccctatatattggggtaataagtgagagtgtgtttgtggaggggagggtccccaaaaaatgaaagtcataattccttggagctttagttcccagtagaagaaagagttaggctgggcatggtggctcatgcctgtaatcccagcactttgggaggctaaggcagaaaggttgcttgagctcaggagtttgagaccagcctgggcagcatagtgagaccacagctaggtgtggtggcacacacctgtagtcacagctactggggaggctgaactgggagggattgcttgaacctgggaggttggggctgcagtgagtcgtgattgggccactgcattctagcctaggcaacaaagcaagaccctctctctctcaaaaaaaaaaaaaraaaaaaagaaggaaacttgagaacaagtacaaagtagcacgtagtctcataactgcaaagtaacatagtacaattttaaaagaatataatgatgagatgtaatcaacactctgctactgaccagggatatagagattaaaaagacatagtwtctgctctaaagattcatacagtaaggttgggagcggtggctcacgcctataatcccagcactttgggaggctgaggtgggaggatcatgaggtcaggagatggagaccatcctggccaacatggtgaaaccccatctctactaaaaatacaaaaaaattagctgggtgtgktgacacgcacctgtagtcccagctactccggaggctgaggcaggagaattgcttgaacctgggaggyggaggttgcagtgagccaagattgcgccactgaactccagcctggcgacagagcgagactctgtctcagaaaaataaaagatacatacagtaatagatcagcacataattggattcatacagtaatagatcagcacataattgaagctcaaaaatgcractgcattgtagatgcctttggcataagagaatgccatggtgtgttgtggcctgctgcttttaatgttgagagggattaattgaagaatagtaccatcattaacctaatttctattgagaatcatctgcctctgtaaaactaaggtcatatggctaaacttatgtgtaacagtgtgtttagcaaaaaagaaatatgtagatgaataacctaataactatgtactggtctcgtagaggtgaaatgttgaactattaataggaactttccacaatagatcatctcaacttttctgatgtagttttaattcctccactaatttatgccatctttggcaatcacttaacttttctctgcctaaccctattatggcctaacttatgtaactgaactagtagtagaaggagacacaaaagtggaaagtaaattctctacatacttggtgcaaataatttattctatgaagaaatgtattttctcatagacaggtttgaaaaccatagtacttaaaattttactttacaaaaagaaaaaaatacagatactagttcatgagacaagagacatggaccaaacacacgtttacgttttttatttttttattttatggctactactaaaatgccaccattcatgtactgcataacagtgtttcagtcaaagaagaacctcatttctggcagtggaatcataagattataatggagctggaaaattcctgtctcctagtatttactatactatgctttttatctttaggttaaagtgcattctttctacctatataaaaaagttaactgtaaaacagcctcaggcaggtccttcaggaggtgttacagaaggtgctgttatcataggagatagctccatacgtgttattgcctctgaagacctttcagtgggacaagatgtgaaggtggaagacagtgatattgatgatcctgaccccgtgtaggtctaggctaatgtgtgtgtgtttgtcttaatttttaacaaaaatgtttaaaaagtaaaaagtaaataatttcaaaaatagaaaaagcttatagactaagtatataaagaaagaaatatttttgtacagctatatagtgtgtttgtgttttaagctaagtgttattaaagagtcaaaaagtcacaaaaaaagaagtttataagtttaaaaagttacagtaagctaaggtcaatttattcttgaagaatgaaaatatatgaaaataaatttagtgttgcctaagtgcacagtgttgataaaaggtacagtactgcatagttgcgtcccaggccttcacattcaactccccactcactcactgactcactcagggcaacttccagtcctgtaagctccattcatggtaagtgccctatagaagcataccattttttatctttgattttttttttaatggaatgcttcagaaattcatgtgtcaaccttgctcaggggctgtgctaatctctgtattgttcaaatkgtcctagatgtgttgccaaagcaatcacttttacactgtttttgctgtagmttttctatgtttacatatatttgtacacacaaataccactgtgttacaattgcctacagtatttagtacagtgacatgctgtacatctttgcagcctgggagcaataggttacaccaagtagcccaggtgtgtagtaggctacaccatctgggtttgtgtaagtacactctatgatgtttgcacaaccacagatatcacagggtcacctaacgaggcatttctcagaagtagtcttcattaagctaccctacgactgtaatgaaacgctaagttttgagccaggaatttgtgtatagaacactaggaatggcttcattagkatcatgcatctttttcattaaactgtgagtccctttgagagaaagattgtgtctctgaacttagtggcctaaatttctagaattatgtcttcaaaaagttgcccagttaggcgtctctggggagtcaaaaccacaactcccagaatgccgtgctcccttagcgcgctcaggcgcggggagagaatgtcccatcacccaccgcgccagatcgagaccacagttcccactacacccagggactccgcggaaagctatcaaacaccacctgttgccatagcatccgggtcgggtgaaccaatccgggcgccctcgccgaacagaggcgggcagttcgcatcgccgaccaacctgaggcgtttttgttgtggcgcgtgaccggargaggcgggagctcaggaccggcgccttctccttgcttctgggggtcgtggccttgctcccgctgtgcgggaaaagaatccaggcccttccacgcgcgtgtgggtgcgggggccccgaagtgctcgtggttccccgctaggtctccgctggggcaggaaccggaatcatgggtgggaccaccagcacccgccgggtcaccttcgaggcggacgagaatgagaacatcaccgtggtgaagggcatccgggtgagtgcccgtggacgggcggagggccagtgsttggactcggaccccaaggccccatcttctccggacccgctcagcctgggtttctcccgtcctggaccctagcgtattaaggccagaagcccaggtgtctgggaagaagcctagagtttcaagacgtgggacattcattcagagatagttcctggttgtgccaagtgctaggcactgctggggcgggcggggaatgccaggttgaattataccctgcaagggctcacagtctactcgtaactgtactgctcccttgttgcaggaccgtatttgaaacccatacctcggtgtacttgtctgtgaaatggttttcctgggttcaggacccaaaccctgcttttccactgtgcacaccctgtctcccagggtgaattggcattttaaggattgcctttgctttgtgtcatttagtgctctccctctgataacaccccctcctcccacccactccccacaccctgtcatcctccctcccagccccacagtcttttctgacctgcctggggcggcttctggcttctccctgcttcactttcacttgatatctcctctttcccaggcgcctcctctgtgacctgctgcgccgaagttttggattaggcccagttgcttcaggactagtgtctgccagtctgataggggctgagatgggtttgcagtttttcataccagtagaagtaatgtagtcatttctgaccaacgttgtagagcactttttttttaatgccctttgcatgcacctgatacataaactgaaaacctggtttttctctagggtgtcagtataccagcactaacttcattaacacactctccgctgcgcctgaatttggagcctcacatttttggacgtatgatgcctgaacctagtaaataaagcaattttgacttcagaaagttttataataatttatatatttttttctgttatcaaccagcgtaaataaattacatttgtaaattatttttaacagttgttaccaggaaataaaacttcttaaatatttaaaatgtttaaaaactttttcttctgaaactgttaccttgagaataatttattaaacttttcttcatagaaactcagactgtcgaactcagtttttggtmtgtgaccagtatttctttatatcatgctaattaatggtagtactacattttgtaataaaatatctgaggctgtattctttgagttattgtgtttcagttagtactctttggagtaaaaaattactgtaaactttaagttttatgcagagattttaagactcttgccattaggctttcagtacgcaactcagagtgaaaaataattaaaagacaaagcaaaataagttttgagtgagaagacattggttagaaaaaaatgtataaatccatattctcgtgctttagtacagacacagtgctaacagcaamcaaaatcgaaagagaatgtggccacagcacagagattcatatcaagtattagataaggttggatggaataactgtgacagcagggataggtattctattaaaatggaaaaattgtctaaaaaacctttttaagatttttgttttttaaaaagaaatgtcctttggtcatataacttgacagcattcctcatttttttcctttcttatatagtacattttacctgtattgctaacagttcaagcatgatcatttttacctctatgcttttcttcagaatatacccttcacctggaatgcccttgcgctggtctccattgcttcaaatcctccttttacatgaatgttttgcaatctctctgagcttcagttttcccatctgcaaaataatgcaactgagtacatccctcagatctctaatattttccagtcctgaaatcctgtgagtctggtggcactgtaagtttcttgtagccatacttagcccattgcagtttcctctagaagtgacatccattgaagtattgagtacacagaggtcattctgatttctttgagctcatgatcaaaagagtatcaacttgaaattaaacagacctcagtttaaatctcaggttagatatttattacttaacctgattgcctgtgtgatttttgtctgggtcttttgtagatgtttttcagttgatcttagtatttttcttggcttgaattaagcagacatcagtttaaatcgcaggttagttatttattagcctgtggcctttgacaattgacttcttttatttccttatccataaacggtaataccatcacttcccttgattggttattgtaagaagatgaggtaaggtatgtaaagcacctggcacattgtagattttcattaaaaaggcagccattattatgatagggttcctttcacatgcaaagttttaagattctttgaaagtgctgtgctgtgtagtggaaagagcatgtgccttggaaccaagcagacctgggttggattctatctctgcctctcactagcggtgtcgctctggacaagtcacttttcattgtgtttccgtatttagtatttctggacaaagcctactttgagaatttgacataatgtatatctagcacagtgtcttgtactttgacagtgtttgcacttgtgaataatagctgttattagagctgttcaaaagaatggatatgtgaacttaagtgaacttcaaattttaataaaaataagagcatgttgtgccccaacaggtgtacctaaaagggtatggactgggaaatgggagtcttacattctgccctaattgagggtgtttttttgtctaggtctgttgtagatggtttttatttctttatatttttcttggctttaaatagtcactttgttcccttctgagacatggggaaggataagaaaccgcattctcagtatgtccataagccattgtttttagcttagtttgttagaacatggtgccgatgaggcaccaaacttcagttttgaactgcagttaggttagttcagcttggctgaagaaaacgttccaactttgaccagttgtctagcatttatgtcattggttgtaagaaatgaaagtttaccaagcttactaattcaacagaggcagtcactgctggaaagctaattctgtgttctgttacactgttaaagatagtacagacggtctcctgttaggatggttcgacttaggattttttgacagtggtgtggaagtgacaagcgttcagtaaactcagcttctggcattaccttcagcaaaatccgttgtaaammaaggagcwtctataatttsakcttcctttatttttttcatataatgacttgggttcattcccttaatataaatatgttggcaattatgaggtttttttgagttggagtctccctgtgttgcccaagctggtctcaactcctgggctcaagctatcctcctgccccagcctctgggactacgggcatgtgccgctccaccaggctcagtcatcatttatcttaatgtataaagaataacatttagtgaacaacataaggcttttggtaactatgctgaatatttatttatttatttgagacgagtcttgctctgtcacccaggctggagggcagtggcatgatctcagcttgctgcaacctctgcctcccaggttcaagtgattctcctgcttcagcctcctgagtagccaggattataggcctgtgccaccatgccctgctaacttttttgtatgtttagtagaggggggtttcaccatgttggccaggctggtctcaaactcctgacctcaagtgatctacccacctcagcctcccaaagtgctgggattacaggtgtgagcctccacacctggctgaatttattaatagattgtgtttctctatattgttgaggtccttaatagcaatgaaaggacctacttcaaattttaagtttaaaatttcttctcacctaccaggtgttatttttcatggtatttgtagggtcttgttttttccctttatccttagcaactgatagcttttcttccctcttctgtaaaagtaacctatatttttacacctgattccaactttgaatctgaaactactcttatggattggatgagaggtcactcttttgccttgccctcttctcaaggctaaaataaattcctagagaggaaagaccaagcattttcattactcatattacatgtggttgataggatttttgtgagcacctgctgtgcctgcttggaaagtgtgcttacaactctatctttcgcaagtttatctgaaacatcaaagctgtgagtgaactcttctggagcaaatgtcaacttcaatgagtatcattttcaaagatatatttatcatgctttccagacataaacgaatgtccgcagctgggctttaaagttgcaagctgaaattcacaggagccagttatggcagtatggatacttaatatggaacgtaactcatgctttgggaagtgttggcagttgagagaccgtaaatgaagagattacttaatatgcggtattactgaggattctgaagagagtatgttatcagagactacaaattcggtcagcccttgggagtgttgaggaatgttgtgcaaatttagttaagtagtggatgattagtttctttcagctttagattctatgaagtttttggctaccatcttaagttatctaggattttataaaggtagggataatggtttctactaatgacaaatgtaaagaaacacagacataagctaagcattacatatttcatatatatctatcaacatatatatgggttccctctccccctttctcttaactaactatttgggagtaatttctcccaaataataatggcagtttttggagcctatgtcttaaaaaggtaattgtgaagcaaactaatactcacacagaaaatgacctatgctaagtggaaggaggatcaagagagaaaaaatgggtctgagttcttgaatcaatttgctaggacacatctggaagaagataagataaactaatggaggcaggaggctgatttatttgtctcatgtggctcataactttacctcttagaagggccactgaagaattcctctttttttactctgttacctgggagtagaaatactttctctttgtccaactcacccagtctcctgtttctgagaaaattctttcttttggattggtgggtagtgtttctggcacggattttggataagaccaaacaaggtgggtaggaagagatgagtgggaagactgtaggagatgacacatggcctttccccctctgtggagcacattggtgtggtgagtaccacaaatttaaacttggcaagctctgtttgcttaaatttgtctttaggagcaatagagaatagggtggacagtcaagttcagtgggctgaatatcggcagacctgcttcttttgattgccccttatattagaatggtggctcttttagttcatagagcactgtggatctgtaagctgtggattctggccagaaccatgcaataagcagacagttttgcatacagttgagtaattgacccacggactactcagtctgtggacctcagggtgtaattcccagtatcaatgtgtgtggggattatttcactattctttgctacaaataatttctgtaaattgcccttggtatttgccttgatgcagattccagagatgtctggaaagcaagtataataggtataggtcattgtacaggaaaaggctttgcttaaacaagtgcccggttcaggaaaagatatgtttcctgaagaagatactttttttttttttttttttttttttgagatagaatctcrttctcttgcccatgctggagtgcagtggtgcgatctcggctcattgcaacctccaccttctgggttcaagcgattttcctacttcagcttcccaagtagctgggactacaggcacccaccaccatacctggctaattttttatatttttagtagagatggggtttcaccgtgttagccaggatggccttgatcttctgacctcatgatctgcctgccttggcctcccaaagtgctgggattataggcgtgagccaccacacctgaccgcaagatacttcttacacagaggctgccatcgcagaagcttgtgttgtactatcgacccccattttgggtcattttttatcagaaagatgagttgttctgcagctacagattgcgtgtataatcctggccagcatctctaaagcttgtcagctgcttcacgagtgagtacccctgttcacagaggagatcaggtgagtgtgcaggtctgaacttactactgcaatgggaaggtcagctcagagagcattaactttggatacagatgataacacaacaaaactattacctcatatctacgtcgctatgagcagactgggaatagggtaatagtgcttggagttggcagaggtgcaacagtagatggccatgggtgctgctttggaagggcctaaggatacagttgttgaatgattktaagaacaagagaaaggtggagtctcaataaggcagccgtacaatatgtttatcaagccttcaataggtttagtatatactcctttggygcatgcttacaagtttactgaactataaccaaacatcccactgggaaatgttttgaattgatgtgagaatttgacattaagtagcaacttgggacatcagagaggcctcaaaaagaaaaaaaagttaacaagaaattagtgattaggttgaaagagacattctactcctactacctagagagcatagatagagaaaaataagcaccttctatacccataccaggacttaggcagctgctgcttgcaatagctgyaggcctggtcctcatgcaccttacagagaacgagtcagtacaagctcagacccagttgataaaaatgaaccaaaatgaattaaaaaagtccctgtggttggagctatatgggtaatagctttaccaaatatttgtgtagccaattgtagtttatggtgcaaaacactaaaatccctccacagaatctctggggtaaacattattttcatttttttcagatgaaaatagtaacttttcagatgaaagcttatagctaacacttgatttttgagatttatatatattatatatcagttaaaatagctttaagattctaaaaatgtaagcttattttttcctctttaagaggaagtgatatttttattacatgcatgggattgaaggggtgtgttattaaaagtagagcattggactagagattggggaattactgcttctggtcttgatgctgccagtaactgaatattactcagggtctcttttttttctcaagtataaattgagtcagtcttacggggatttttctaggatgtgtctcagtttctcagtttctcagatgggtttcagcaacattcccagtggctgtcagttgttagaaggatgcagctggctctggcattttcaaatagaaagtcttcttgtcttccaagaagggagtcgtagttttttccttcaaagagcacacacagcatttgatctgtagcctttcccttttccatcttatttccattctggtttgggccctgagatacaagtaacagttgaggtatagactatttagttcactgatgtatcacagggccttgattagtgcctggcctgggagacatttgttgaatgaatgacttaatatataggagcttgcaatctagtggaaaggcagaaaggtgaatgtggaaaggctaattcctgttctttcattgagactgtattggaagtttgagaaaggaacagcaggcacaaggaatggtagctttaggtaggcagggttggaatggagtggacaactgttttggtcagtgaaggcttggatgtttagactgcgtcttgaaaggtgactccctcccaatggtacaggagagagggcaatgtaggcgtgtgtaaaggcaaggagatggrcgtagaacaggatatgtaatattaaggaaraaaactgtagaatttgaggttggagagttaggccatcaccaaatgatgaagtcttgaatgctgtacaaagaatttgaatttttctgtaaacagacagtagctattgaagaatttgaagtagggagttaccattatcacatttgcattttaagcggatggtacaggaattagggcaggagaaatgggatgagagaagagaggaattcattaaatatttagggattgatgaagtcagagctaagaatgagagagaaagaagagttaagaacaagccctatgtttgaatttaggaagctgggtgttggtggtgtcattaatgaggtaaggaaggcaggagaaagaggagatatgcggcaaacgtgagatcaattttggacactttgggtgtgaggtgcttctggtttgccagaaggaaggtgttcattaggcamttcagtgtggagaccgggcttctgagagataggtcttaagctcgagtgaatgcatttattaatggaatttattagtttatcaacaacagttagaaatcaagagattggatgagagtgccagtacaagggcacatagaatgagaagggcccttcagcattgaagtgcaggcaggagaggggaagctgcaaaagagataaaatgtggccagagtcctaggagaaccaggacagcaggatgtcagaaaagccaagggagggctttccagaagacgggagtggccagaggtgttagatgctaaagggaagccrtataaataaggcattttataaatataaaatatttatttacataaatatcaaaagttatttatttggtcattggtgacttctaccagagaatgttcactgttgcactgagggtaaaagccagagagtggtgagttcaggaagtggaaatgggaaggagacccttgatacaggaggaggatcactcagttacttgaaatggaaatcctggggtcttccttgatgacttctgctttactcccacatctactcagatactgggtagtgatgctgagggatgtttgagtgggatcttttttttttttttttgagacggagtctcactctgttgcccaggctgtggcgcgatctcactgcaagctctgcctcccgggttcacgccattctcctgcctcagcctcctgagtagctgggactacaggcgcccgccaccacgcccagctaattttttgtatttttagtagagatggggtttcaccatgttagccaggatggtctcgatctcctgacctcgtgatccgcccacctcggcctcctaaagtgcagggattacagatgcgagccaccatgcctggccttgagtgggatcttgagactcagactttttgggtttgaatccttcctctgctactgataaagtatctgatccagggccagttatttaatccggctatgcttcagttttttcacctataaaatagagatacaaaagtatctatctcataggcctgtgaaggagtaaataagtgaagtgcctagcttagtgtagcgcctggcacataataagcactcagtgaatgttagtattttaaatcctaaataccttttaagtgtgttctcccctggattaccataatagctttttttttttaaagtttattaaagtaaattgttgtagagtaatttacatgccatgaaattcatccattttaagtttacattccaacactttttttttttttttctagatagggtcttgctctgttgcccaagctggagcacagtggcatgatcatggctcattgcagccttgacctcctgggctcaagygatcctccctcctcagcctcccgagtagcaattcaacacttgatgaatttactgagttgtgcaaacatcactacaatgcaattttagaatatttttatcaccccaataagatctcttgtgcctgtttacagttaatccctattcccaccccagctctaggcaactacttaatctactctatagggatgcyttttctgggtgtttcatataaatagaatcattcaatatgtggcccttgtgtttgcttctttcacttagcttaatgatttttaggtctatctgtacggtagcacatgtcataacttcactgctctttattgctgagttgtatagtgttgtatggatatgtaagattttgtttatccattcaccgtagatagacatgtgtttgtttccacccttgctcttatgaataatgctgctatgaacattcctgtgcaagtctttgtgtggacatatgcttaatagcttcttaattggtcctttagcctccttcagggatcctgcttctgttcttgtccccctccaatctgttctctacattgtagccagagtgattttcctaaagtgtaaatctgatcgtgccattcccctgcttaaaatccttcagtagtgctcaggtaccctcagggtcaagttcaaactgtttcaattgaagagttcactaagaatcttcaaaatttggaatctctaccttccctccccaccttctctttcactatgccctctctctattttcttgcttcagccatttattcatgttgtttcattcattcatttaacattcattcattgaattaactaggcttagtgaggctctgggagtatagcgataggacagccaaatccttgctttcagggagctttctttctagtgaaaggcagatggtaaacaagcaagtctcaggtagtggttaagtgctgtaaagaaaataaaaaaggatgacgcgatagtaactgtgggaatgatgactctcaaatccgcaaggctgtgtgttcctcagagcctctgctctattgccagctgcctacttgatatctccacttggatgtctaacggtggcaaattctggttttcatctgtactttaatgtgatttttctcacccaggagcactttcatcctactgcatctcttcctakcttttactcctccttaccttgtaaatcttccctaatcctctgttccagccctgccttcaaagcctggctacatgtgctgcccattgtgttttctgtatacttgcattacatgctgactcactcaggtagcactcttcatgttgtatttaaatgcctgatggttgtttattctgttatgctttaagcacttgataattttgaatactcagagtctagcctagtttctggcacatagttgatccatcatgaaatctgttgaaagagcgattgtatgtggttagctttgaacaggagggagggagggaggggagagggaaggaacactttccttcgggactagagggagggaaggagctaaggcccattaatgcatgaataagtgtgtaggattaggggaggaaagttgaagtttatatagcatacatttccccagagattacaattttgtgcatagtataaaatgaagagtgtagttatttataatgaacaattagcagtgcattagaaaaaataaaggagtagtgctgtggggtgcatctcgaaatcttaaaattattcttccttctggttttatggctgttagatttaacctaatttctttagggcattcgtcatatgtatggatatggatgactaaattacttggatgttattgcactggtttttgatcttgctgttttataattgattttattttgatgttgcttttccagctttcggaaaatgtgattgatcgaatgaaggaatcctctccatctggttcgaagtctcagcggtattctggtgcttatggtgcctcaggtattgctgaattttaattttagggtttttaggagataaattataagtggaaaaagttgactcaatagtcaagttctctagcattctgtctttcgttatttagatgtttagcttttaataaggaatattagaaatcagtattggggtttcttttaaaatgttttgtactaagaatgaaactattttcaaacagtctttgaaaattttgttttctcttcccactcttgaatcctctactaggctttggaaagttacttcatatctttttgtgtaaaatggattgcttatagggatattagagatttaggaataaatatttatttaaaaaatcgaacttagaaaatattgatttgctattttcaaattgtgaagtattccaaatgattttattttctaataaatttcttctaagtttataaaaggtttagtttgtcacagtcagtcttagttattgatggaaatgtggtggtaaataaaatccataaagaattattaagcctaattttatctgtaggtcctgctggataagagacttaatgctgtttcttctcccttttctctctcctgccacactcatctgtttatccagtattttactaagcaccagctatgtgtccagcactgttcttgatactgcccagttgatggatagatacgctatttattgtgaaatggcaacaagaaaataattgggatgattaattttggactaagtgagattttcctgtacttattagaaagggggaaatctggctatagactgtgaaattgagaaagacgagatcctgcccaaatgccattcacttgggccaattgtgaccccccccgccccgccccttactaatcattaagtcagtaaacatgaattgagcttctgatacgtttagaggaaagggtaccaagatgaataagaatgacttcttgcccctttgaagcttcttgtttagtaggagagttgaggattcacagttaattaacgctagatagaaagtgagcatgccttccttgttagaaacccttgttttggcttctggaccacactcttggttttcctttcaccctacttgcaaccctcagtccagggttctttgttgatttctactaagtaatcttgtcccaatatacggttttgaaatcgttatctagatgcctgtgactcccaaaattatatctctagccctgacctttccctgaaattccagacattataatagacaactgcctacttaaaatctccccttacagattcctcaacttgacatatcccaaatcaacctttattttcacccccagacttgcttttcttctctgtctttcccactaaatggcacaggtagtcaggtccccaaytggggattcatccttgttttcttttttccttacaccttacatcagactgttagctagtcttgtcaactccatctctaaaacatgtctaaatatgttccttttgcatctgtctcctctgctatatctccaatccagatagataactgtcgtcttctgtggaagtctcttaactggctccctgcttcactctttccccctgtgctgtgcacacagaagtcctcacaatcttttgaagaaaagcaaatcaggtcaagtcatgtcccagtggtggctctccatggtacacagaatatagtctgagctgcttccctgggcttccatcatatatcatgactggtccctctctgccttccaacatcatcacattattcatcatctcctatcacctttcctctacttattcactgtgactgctatcttcactagaagagaagctccagggaccttattcctcatttgtttgttcacagctgaattcttagctcctaggatagtgtaacctgcttcttagtaagtgcttattatcgtttgttgaattaatttaagggcattatccattttaaaagtagctacttttgttcattctggagagttctatacatttaattcaggtgacatatattgaatgtttctattatgtaaataaataagccacgtttttatttttttttttcttttgagatggagtctcgctgtctcccaggctggagtgcagtggcgtgatcttggctcactgcaagctccgcctcctgggttcatgccattctcctgcctcagtctcctgagtagctgggactacaggctcccaccaccacgcccggctaattttttatatttttagtagagacggggtttcaccgtgttagccaggatggtctaaatctcctgacctcgtgatccgcccgcctcgacctcccaaagtgctgggattacaggcgtgagccaccgtgcccggccaagccaggtattttgaaaagatgcaaaaataggaaaaagttttttttgacagataaactacatatataacaagactgtaagggaggtagaaacatagtataaaagaaacctaggagatactgaaaataagtttatcaaatattttggcttaagaagatgccttgtcgtgcagaaacaaatggctgtccagtttattaaaatgcccaacaactgcacttccagtcactcgggtcttgcatataaataccactgcatacagtgagcacatctagctgatgataaatatacctttgcttcctcctcttcctcaaaatggtgaatctgttcttatctacatgtatgaacttaaaatacggaaaatgttaagggagcaaatggtttgtaactttgtaagtacttatgacgtgtatctttttgcttatgaatattctgtgctataaccattgtttctgtagtttaattaaaacattttcttggtgttaaaaaaagaatgatgatatatggatacatttaaaattggaatttgttctaaagtatgatttgttgtaggtagattttttttcctacctcctgtgttacggagttagcgtgatgatcatgatgattcaatatactgaagtaatgatagatgacacttaaaatttattacattgtaggtactctgctaaatcctgtgtacgtcttatctcatttcatccttataaccctatgaagaaggacctgtgataacccattttatgtagaaagaaactgagacttgaagtgattaattattttgcccaaagtcacacagctggtgagcaatggagatgagagttacattcaagtttgtctgactccagagcaaatgctgttaaccactttgtcttattttaatttgaatgacatcttgctttagaaaggacgtgatagaaactagttggaatgaaggagctgctttttagtgatgttctgcttgaactaaggaaagaacccgttgtctataagtaattgttggttgttctagctttttcccatattggcctgagtggaaggagagaaaatgttttctctcttgggttgttttgatatttcgagagagtggggatgggtcgggaggttttctatgagtgcctgtggtgtgtctggcccgaagagcatgccactgatgtgaagagttctggctttgctgagggacccatcccttctcactccccatttgaaatgactgatgaactctttggtccatgaccagctgtgaccagcctgggcactgaaagctcttagaatgccatcttgtgggccaggcttggtggctcatgcctgtaatcccatcactttgagaggctgaggtgggaggatcacctgaggtcaggagtttgagaccagcctgcctaacatggtgaatccctatctctactaaaaatacaaaaaatagctgggcgtggtggcacatgcctgtaatcccagctactcaggatactgaggcatgagaatcgattgaacctgggaggcggaagttgcagtaagccgagattgtgccactgcacttcagcctgggcaacagagtgagactccatctcaaaaaaaaaaaaaaaagtatgccatcttgtgttttagtggtcaggctagaactacactttccaaatggtagccactagtcacatgtggctcttaaaagttaagtgaaaattaagtcgatcaaatgaaaactttagctctgaagttgcactcttcacattttatgctcagtaaccgcatgtggcttttgactaccatattggaaagtgtagatatagggcatttctattattgcagacagttctgttgcatagctctgatctggaacacaccagtgctttttattttctatctgcaccatgatgtgaaaaagactcaacaaggctcataggacaggttctttgagtacatgatttctctcaccctttccaacctaacccaagaaaagaactaaaatttggcatgctattttgaaatgatcttgctttaggttaagaatgcaattcaactatgtgtaaattaacaaagatttattcttcttagaattaaaaaaataggcttataaaagcatgaagcttgaacatttatgttttgttctgagtttgtctcatttaggagttttagttagtactcaataatagatttcttaggatttaaaatttagatgtgttatgaaataatttttcaagcctacaaaaatgtattgataaaaatgtcactcgccttttttacatttttcagtgtgaagtaaattatatattaaatgtgagttaaattttaagtatttattaaaaagccttctttctcacaggactcttagtcataccagccctaggctattcatatgtgtgaatatagggcagtgtatttgatgaactgagagccctaggatttctgtatataggaactcaattttgtcataaaaatagttttgagaatacattttatactataagaaagtgggttcctctgaagactttactgaaacttttttttcataaaaaatataatttttttgctaaaccttgaaccagatcagtggctcgttgcagtaagtattcgcatgtaaagctgtttgggcaaaataatatactgtgtgacacacagcagattgtaatgccactttaataaatgaatgtgctctcaataacttaactgtgtccttgctgcctcaatttttttgctgcgttatctcaactatattggtttgcttttataccagataatttttttcttaggctgacataaggagatgtcattgcatatagttataaacttaccttttcattaacatcttgcatcttttgattttaaaaaatcaattttgggtgctgattgtttcctttcaacctgatcttttagtttttctggcttataatgaggtcagacctctcatggttgaccctacctaccgctgaagaatctgtccccaaatcaatatgaagaaacagacaggaaatgatattaggagatgttttgttgttttcgtaagctactggcaaccagataaaaatgatgaatctggaaaaaaacaagacaartgacctaacttttattatcatcctcactgtagaagtttctctgtaaatttctcgtcattgtgaaaaataagaaagatttgccagtttgtgttaagtatatcactgagatcactaagtatttggcagccttaacaaattgcaggaaaccaatttgagcaggaaataacacagcctaaactaaacagccaattttgggaaacagattcatgtataagttctgtgtatttttctcccagaatctggccctcctagttatttttaaacagctctttaaggctcatttagacataacactgtagggagagttcagagaaaataagcttattcctttgactcgagttacaagaactgaacatctaggtttccaacttttaatatgtgaaactttgtggatgccagtgtctcaactgtgtactttttttgtgggctgtaatggttgatttgcctgactgttcctaatagtaagaaacctaattgctattgaattaaaggcattaaatctaattctctaagtcagcatattctgctctgaaaaagaaatctgccaacagtctagggttgaagaactcatggttggttccatcagtcaacaagtgttagcatggccgccatctttgaccttcaaggaattactagtttggtcaaagcatatttaatgttacagtgtagtgaatgagtactagtttagtcgcctcctctgttaatatttttgagaaggtgaatcaacatgtgagtgagatagaatgtataagaggtatggaaagtgctttaggaatttagagaaagagtgtcaggagctttggcaggcaggcctggcatcaggggaagtgaacttgagccaaacttgaggctaagagggatgggaggggggttagagtagaaggtaatcctggtagarttagcacacagaccagattaattcagataaaggtttcttgtagggtctcatgggtgggtaggttgaagtcaatgagtttaattctatcctatagggcctgggcagcttcagagctgttctatctcattttaggatgcaagtctggaaagttacattagttgtgccttcagatatacccagatattagtaacatttttattcgtaaagatatagtgctggttttcttattgatatttttatatccaataaacaaatccragtggtaagwatatgtattttccaccatagtactaaataaaaccattttcatcttcagttaagtaaagaagcagccccataagcatttttgtttgtccgtaattggccctattgcagaaagaaagaaagaaagttgccctcaaatgcgtgagacagcatggcaggctagggtgtaacagatgagttctgagcagggaaggtgaatgaagcaagtggatccttggaaagataaggtaaagaaaggatgttagttggaaactagcaatcaggaaggtcagctgctgcctggtctaggtagagtggcagggcagaggagggcttggctggwtatggtaactactgctccatggatgggtagtgacagtccttgactcacgcttcagtccttttctccccaggcctaggacaccttttctctgtgctacttgattcatctctatgttggatttatttttgagaatccagaaaacctttaggctgactttattttaaaattgagaggagggcatagaaaacttcctttcttgtcattagcaatgtgttttgtattccgtggtattttagaatggtcaaaagggagtcacacaaagaaagtgctgcagtgggagagagaatgaactagagataaagcttggtaggttctgaaacatcagtgagttacatcttccgatcgttttctgtgactaggaacttccacccattgatttcctagttaacggattaaccactggcttcagctgctttatattatgtcttcagaggtccctgcccttgttactgcagggactttgcattggtgcttctaggtggtatgaaatcaagtgggccggacactccctacttgcccctaagttactagaaagaagcaactgttttcttaggtaggttgtataatgtagattagaaatatagtaatgtcgtggagtcacagtactcaggagctggaagttaactcgggagttatgacctagtaatttcamtgacagcagagaaaaaagacgctgttttaaagaagctccccatttttgctgctgtagattctggacactaactttaaatggaattatgggatagtggattgtattttctcacagaacaagtgttgttatttgtcataaccaagcaaatcatgggtgtcaccaaaactatattaagaaaactagataaaacagtgatataaattttgtaatcatgcttcaagatttgtgaaataaaatacggcattggttagtcaagcaaaactaatagaatataaagcataggacatatacttagcaatactatttttgatttaaatttcatacatttgttgtaaacaatattaacaatatttttgcctttcttggaatttgacagatttgagagcatcatctggatggcccaaatctcttataataagttgcccaagggagtttcaaatgtacattttcctattgcaagcagagaggttcaaaatcaatccattgactttccagctgtcagccaaatagtaggttattgttgttgatgatcttgtttttccttgttaaaaaaaaaaaaaatttaaaagtaaggtctgacccagcatttcatttctttcctttaccctctcctgcctccckggtttattcagagtcactcctatagtgttctgtattaggccaaatcagtgctaccagggaacagtaagtgcttttaagtcccccttttaaaccttctctgcccccaggrctacttgacactttgttgacagctgtcactgtacttgagtattccttgaaaagcctcgggaacccatgtggatcattatagaaggatctccaaactttatcaccgaattgctatggcatgcttatgacaatattctggttctatatgccctgcttcccctgaatgagtggttgattgaaatatgggttttaattagccagcatcaaatgattggagcttgaaattactttcagttacagggtagtcatgataactcacattactataaagatacaaggtgtttgaaacatctgacagattgcagggtgggcaagtacacggctgccagcaaccaacccctgtgtactcactgtgttggcaggacttctttcctttgtcagctgagtgagtgcagctgctttcctcctcacttcatgcacatgcaccttgctcttttctcatagggtttttttttttttttgcttgtccacacccatcattgctatagtcctgcaagggtcactcgcagaccttgtctgtatttgatgagtagcagtagagccttgctctgcatttcccaatttattatgttacgctttgcagtttctcccatccctggtgtcattgccctagtctggccaccattatctttttcctgcattaccctgacagtctcttgcttggggtccctgcctttagtcttgcattcccyggtctattctcactgcagccctagtttctttccaaagcatgaaactaatcatgccattcctctgttagaaacttgagccctccaccccaccccggccttcctcttaggatgcagcccaaatctcttacatagccagcaaggtcctgtacaatccatctcctgctcgagtcttctctgggaatctcatgggattgagcccaaatactgcttttgtacaagaccttgctggcagacagacctttgtctgttgtgttgaacttctttgtctagtcatattgwagttcttgtatatcctcagacttatccttttgagtttttttatttttgagttggagttttgctgttgttgcccaggctggagtgcaatgcctcaatcttggctcactgcaacctccacctcccaggttcaagtgattctcctgcctcagcctcccgagtaactgggattacaggctcccgccaccacgcctggctaattttttgtatttttagtagacatggggtttcaccatgttggccaggctggtctcgaactgctgacgtcaggtgatccacccatcttggcctcccaaagtgctgggattacaggcctgagccaccgcacccggcctccttttgggtttttgaccgtgttgttccttctgtctgaatactgttccaccttctagccctgccccactgctatctcacctcttacctgccttttgtctagcaaactcctgctcattgttcagatccctgcctagaaaccacttaccccaggaaayttttmatgacacccagtcctggtgagatgccccacctgtgtgggcctgtggtacctgtgcacgtctctcgtagcacacgtcacgtggttctgccattgcccgttacacacccctctcctccagatcccatagcttctattttctcattggtcctcccaggacctcctcttctggcacttccttcagcactcccccttgctttggtgctgagctctctttgccaaggccgttatagaactgtgtgtgtttgctgcaggtaaacattgacctgttgagaccagataattaggcaaagcaggaaaagaagaagtctcagagggtcgaggagatttccttcaagagccatttcctcattttctcagtgtggactttccaagttgataccattttgaagagtttccttttcttgtgttactaattctctttagtactgatccttgtaatagtatgtacttcattgtgttacaattacatgtttacttgtctgtttttcccatttgattatgagcctttgaaagaagtgwatgttcgcttcccatgttctgtacgctcagccacagtgaccgtattataaagttaggtgcctcataaatgtttgtggaatgcrtgagctaaagcaaatcagataatgaagcctgatatgtacaagtgcctgtgtccactaagaggcaagcaggaaaaggggtctttctcttaggttggttccactgggcatgggtgtgagtgtcttcaccaggctcctgatggtgcttatacaatgccagtttcaggtctcaatcgtagcagacccaaggaagcccttttggaagaggcactttcttgagtaccatctggggaaaagtacgagtctgtggaggagtggctagggagcggggctctggatttggaaacattgatgtggaggttcatgtcctcctcctagttactaatttagtttagaaaggaaatcatctgtgtagacttgacaagttttggtgagtgctgtaktgagttgggattttcccttctcggaccctcccgctctcagttcctgctaccctcctcactttcctcctccattgggtcgaagttaatctgacattagtacctttgtcccctggaattttaggctaggagttttaggtgaggtttggttagggtgtctagaggtaggtccctaacttggaaamcaagttacccctggcttccttttctagtagaacccgctgctctcttcctgttgtcaaaactctgggacacttgagagtggagcttttcttcactctatcttctcctgtgtggcttttctcgtgtctgatctcagcttctcacttgaggatcatgacttattttcttcttgaaagagtggtctttctgccatcattcatttcctcaagcctctgaggcctgctctttgaagtctagggactttggtgtctggaagcccaggaaggttgcggtttggtttggcttctgggtaggggttggaaggaaggtccaatgcttgggccagtcctcccagtgtggggacgactgggagaycagggagctagctcagggagctccccgtgtgctcaaacacacagaagcatctgaggagccctaactaataaagagctaagaaaacctctagaatttgctttagctcatatgggcttttacccagtgcttccttttcacctcatcaccgtgtgctacagtcacagggaatgcgtataatgatgtcggattggcttcatttggtagttacgctaaattcttcagatgcaatttgtttttttgttgacatagtggtcatctcatgactttaaacaataagataaaatattgattgctgtgtgtcagttttgagaatggatctgaggaatgaaatgaaaatcagttattaaaatcaggataaatttgatttaaatcaaaaatattaaagcagcatttaaggtcaacagctcccccaaaaacattgttttgttatgcaaccagctaggttacggattctgaatatcatccttataatcatttaaacaaattattttaacaaaatacctctggcagccctcaattcatttcccttcttgaaacttgtactttttggtgtgatggctcaggcctgtaatcccagcactttgggagaccaaggcaggaggatcccttgagcccaggagatcgagcttggaagtgtactatgtttgcatccctgcactccagcctgggtgacagagtgacaccccatctcaaagaaaaaaaaaaaaaagaaacttgtgcttttagcaagaagagatggctttaactgtgcatgcatacttacagtaaaaaataaggccaatcacctgtttctttttccttggtaggaaaaatgaggccagctaagcagcttttgtttaattttgtgggacagcaaagatactcattgagcacaatatgtttctttaatttttcttaataacatgttgtcttctctgggaatctgatgggattgagcccatacactgcttttgtgaaattttttaaaacttttctaaaaatgttgctttaatattccatctcagaaacttttgagagtgggcattataagattatgggaagttataatcctgttttcatgattctttgacctttgacatattttatttttttaataaatctttaaagaaaattaaatatatgtatgtgtataatgaaaaagtatttttgctcaagcttgataaacatacaaataataaatttttcctctaattattttttcctgtcctattaaacatacctctactgacataggcactatttcataaccygtgttcatcttttttgcaaaaatgacatttacaaaagtgatgacataaaacttgttaaaaatggtgattttaaaaattgttcatgattgattataggactttgagctgaaaccttttttctttttttttctttttttgagacgaggtcttactgtatcaccctagctggagtgctatggtatggtaatggctcactgcagccttgaactgctgggctcaaggagattctcctatctcagcctcctgagtagctgggactacaggcaggtgcccccacactgccaatttttaattttttttgtagagacaggatcttgctatgttgctcaggctggtctcaaactcctggcttcattccatccttctgtctcagcttcacaaagtgctgggattataggcatgagccattgagcctggcctgaactgaaactttttaaggctatgttatattttgattgagaactacctttttctctccatccaagtaaaattcttttagttgawcaaacacctccctattcccagccctgcagcatcatctgtgatgtgcctcaataggtgtracttgaaccagccgaaccagacccaattgcaaaggccaactgaaatcaccatctgtgctttactggcagtgatgtaatgtgattgcatgctttcagaaatagggytacagaggaaatgaaccccagttcttcacatggraaatggaaaggtggtagttaaatcaccactgaatagaggagagagagagagagtgagctcatgtggtgtatatttagtgttcaaagggcttttgccatttaatagttgtgtgatcatggacaagttgtctcatttttcttcagaataaartggggagactaatgccaatttctcatggttgccatggagactaaatgagaaaatatacaggtgctgagtgaaatatagcaggtgatcactaagtatccttttctttttttcttctttaacacagaagcatccagggccataacttcactgccaccttttacctgttccacattgactcttgccaastgaactactttytgtctaccctctttggctttcatttggttttctgtgcccttgttccaacaaacatttatttatttattactggctatgtgccagacactgtactaagtgccagagtttcaaagatgaataggtcagagatgtgactgccgactaactctgcatagggcggtcagggcagacttcaggaaaggggtggtgatgatgtttgagctgaatattgaaggaggaataataggagtttaccaatcagacatgatggaattggtggtgggggcgaggaggagaaagggcatttcttgggagaaggatgatgtgcgatgatgggtgcattggttacagtcataaagggcttggtgatttctgtgaattataactagttatatttatttgaaatgcacgtacttggtgggagatgaggttacaaggagtaaatacgaatagactgacaaagctaaggagtggggatttgcttctatagtaaatggctctaaccctacatttttttttttttgaggcatagtcttgctctgttacctaggccgaatgcagtggtgtgatcatagatcactgcagccttgaccttctgggtgcaaacaatcctccctcctcagtttcctgagtagtttgggttacaagtgtgtgccaccaccacatttggcagacttttttcttttttgtagagacggggtctcactctgttgctcaggctggtctctaactcttgggctgaagtgattcttctgctcagcctcccaaagcacaggcgtgattacaggtgtgagccactgccctggctctatccttacatctttatactatttttaattaatatatatgtgtgagtatggtgggggaggagtgagggagagatatcacctccaaagtcacctcaacagaacttttcttgatcctatttgccttcctctaaactcacatgacattttatctatatttttctcttggcagtcagtattttatgtatacacacacatataattatatataattaactataatataattaaatgtataacacatgttataattaattataatttgatatataacacaattatattagaattaattataataaatacataataattataaacaattataattaaatatgtaacaattatattataattaattataataaatatataacaattataattaattacataacataattataattaattataataaatacataacaawtataattatgattactatataacataactattataattatataacataattataattaattataatcaaatatataatacaactaattataaatatataacaattatatataatatattcaactaattattctaattaaatagataatataattataattaattataatatataagtatattataaacatataagtatatgcaaaattatatgtgtatattttatatacatatcattatatattaagaatacataatttttgtttttttaaagagatgaggtctcactgtttttcccaggctgaactcaaactcttgggttcaagtgatactcccacctcagccttccaagtagctgggattaaaggtgagtgccaccatgccaggcccctctacattttaaaaacggttacttatttataactctgttagcacctttactatacattaagctccttgtgggcagaaggcatacctgagagcccctggttcctttgtgacccatatggcatctgtctgacctgtagaaggtgctcaagaaacacttgacaatggaatgaatgaatggatgggcctgtgatcatccccagcttcttcagaatactttccacttcaaaaacatgtttgatgaaagcagtcagtcacaaaagaccacatactaaatgatcccatttataggaaatgtccagtataggcaaatgtataaagagcagaagtggtggttgcctagggctggggtggtggtggtggtaacaaggatagggagtcactgctgattgttgcacaactctgaggatatactaaacaccattgcatggtactttaaatgggtaaattttatgttatacacattttgtgtcaataaagcttttgaaatacttttgaaattttgtcaaattttaacaaaagtatctttaaatgcatttttttcctgtttttatgtttaccgtatatacatagggacttgcattatataatatttattgttattttttgaagtttggactgggagctcatagcatgtgctttgggacttcattaaccatttcagagatgcaaggcagtgtgagagggaattcttgtgagcctatgcagaatgacctcattctctctgtcagagaaatactgcactaagttattttagtattagcagaatgtcgttgttggatatatttggacagtatatttttgtttcaagtcattgaagaagtttgtcttcatggagtaatatattgctttatcttaataaataggcatagcattggcagaagtacaaggaatggtgctatttttctgtcaccttcagaatgaagaggtaggtatagtttgttttttagcctgttgatcttgtacttctcattaacaggtactttatttttaaaagtatgttttacattaaaatagcatttgtgcactaatgaagcaatacttattaataaaacatgcccttagataaattgtttaatgcagttttcttttttcttccacattgtggggactagtggtttctgtgttgatgaaagagcagggagcatcttttcttgtgtgttcattcatgcaaaattttgccctcttgaaaaatgaacaaagatcatagccagaaggtatttatcatgcagttaaccacaagaaatcttgaatgagatcatcatcaagtaacttaaataaaacagttattttctgacactttatcaccagagycattctttaggacacttagcattattatgtatgcatttttctttttcatataattgccaactattttgaagaatgggatgcttcagattaacgtcttgggagggagacacaatctacttgaccctgatttaaaggaatagtggaagtgggtggttcttcaccacacatgtgattgttactagggattcttcatagactctgtcatagcaaaagtattatatttggcttctcatgacgtgtcccgtgactagcagagtgttgctcagtggaatggcttgggctgaatcagtaggtctttccaagtataaatttgagtgctcactagaccagagagaggcagaggcgtcaggatttggtgggagattctctgagtgttgcaaatagtccccatccctcctgtgcatgacccaagagtttgctctgagacacctattgaataaatggccagccagcactgtggttaggtgaaaggagcacgaatattgatagatatttaagccctgacgtgactgagcctggccttcagctttgcctcttactatatttgtgatgtccaagagtgacaggggctaacatagctataaataagcaactattaagaaattgtaaaaagcagtgactgccaagagaaaaatatagagaaaatgccktgtgaatttggaggaagtttagagtgataggagctgtgtgccaaagccactagtctttcttgggcaattcccattatggaacaaagggatccagaatgcattttcccaaagaaagaatgagtacagatgaaatattgttgttagaataattcttcaggcttatcatgggtttttgggttaacttggaaacccaaatagcattttactttttaatgacgaatatacaaatgagctatggcacccctgaagagttggcatggttttccatagctgcggtcaaggttggctcctttctgtacaggttttccatatgtcttgtgagagggtttgaaatatcaactttggattccaacatctgagttcagttattgtctctatgcagttttgattacaagcaaacatttgtatacatacaaatgtgtgtctgtgtatgtgtgtttgtcacttaagaaaataatgtgtcaaccacagatatgttagtatgagcattttaacagttcgttagtcactgaagtttttttgcagtacaggctaatgccaaaggcaagctttctcctgcttgctgttttgcccagggctggcatggctggtcagtgacatcaagggattgtaacaattcacttttataatagttgatataattttggttggcttttgtttattcactatttcaagtatgatggtggtggttttttgtttttgcttttctctgcttcaaagctatcaacgattgcattcctctcctccactaaactttatgtaggagggagggaggatttagtacctgcacatggaaatactttgatgctgtgtcgggtcatttttcagggagacagaggccagagtctgtgaaggtctgtagctgcagaatggttagcacagaggcaattgatacaatgagggggctcaggttttgggaccagccagccctgagtcaccatggggctctttataacattggaataatacttaactcagggctaacctaatgcctagaacattgtagaatcagtagagactaaattggcatggtattggattgctgactagaaatacttctatctcaaccttataaccaactggctgttttaccttgggtatgtttctttatttctctgggccttagtgttcttatctgtcagatggtggaatggactgttatctctaagattcccttgatagattctgagctttttagataagaaccattttcattcgtctttgtttcctaacactgcgattatacttggacaaaacatttttttgaacgaatgattagatttgcagctatagttatatagctacatatagttataattatgagcttatttgtatatgtctgtgaacatttataaatgagaattgtctttttttgaggttatcctcaagcagcctgaaatgcaattttatctctaaatgttcattcatacatatacatatgtgtgtatgcctagaactaatatataaaatttaaaaattagaaaaaaataaaaatgatcaaggtgcaagagtatacgtttaaacaaatctattgctttagaagaatttatttatgttgcattatttggatatgatgcttagaataacttggctagtagaaaaatgctgttggcagcttctaggtttaaaaaaagcaccccagagaattagggaaaaaatagtagttaaaagggtactgtcaaggttggtaggtctaaatttaacagagcagctgtgttttggtttggaagggtgtgtgtgtcatgctatctccccgcgctgtttgcttgccctgttatgaggcagaaacatgttataatggagatagagatcctgccttttgaaatgcagcctcaagaagtggctgcttgaatgttgcagtgcccccactggcttacaagaaccttgtcagtgtttggagaagtttaaakctagcaggtgtaattgttgttatgctttctggcttggctgtggtctttttctgaaggaactcttcaagaacattgagcagtattctctgtgcttgaaatattgtgttttattgcatttaagatgccagtaattataagattttattttattttttgagatggagtcttgctctgtcacccagcctggagagcagtggttcaatctcagctcactgcagtctctgcctcctgggttcaagtgattctggtgcctcagcctcctgagtagctgggattacaggcacgttccaccacgcctggctaattttttgtatttttagcagagacagggctttgccatgtcggtcaggctggtgtcaaactcctgacctcaagtggtctatctccctcatcctcccaaagtactgggattactaaagtcatgagccactgcgcctggcatatttttaagattttatgttccactaagaaataaccttgacagttaagctgtgataaagtgctttcctatccattagaatattcattttatgtttattggagttgttctatctatgttcataaataaaaaggaaaatttaagtgaaatgaattggtagcaatattcttgaagcttacattcagagcccaagtcttctgaatcattttctgcctccatgttgtccatgtgagtgttttttcctatactgtcaccctgtgtgccattaagagtggtagtaatgtagcagttgttaaaaagtgtgctctactgtctatcctggaattttcttccaagctgctgactctcattctgcatttttttttttttttttttttttttttttttttttaagacacagcctcctctgttactcagcttaggtacagkggcaagatcttggctcactgcaacctccacctttcgggttcaagcaattcttgtgcctcagtctcctgagtagctgggattacagacatgcagcaccacactaattttttgtatttttagtagagacagggtttcaccatgttggccaggctgatctcgaactcctggccttaagtgatcctcccgcctcagcctcccaaagtgctgggattacaggcatgagccaccacgcctggcccttcattctgcatgttttgatgctactgccttcttgatctcacatagataatgtcatgaactatgttatgactaccacctggcccacagtgacaggaagataccgtcggtatcagagacgaataaatgtgtaccttagaagcaatggcatgtagcagcagtgcactagctgtaaaaaggactttgaccaaggagtcattgttcagaggttcacagtggaagtgtggattatggagtattttctttattctaaatggttaaacaccacaagtaaagaaattgtttcatgttcagacactattattctctaattgtattaatgtacagttaccttttttctttcatggagaatcttaatggagagtttaacctgaaaagaatagccctgctgtttctatttttttgaaacatctttcaaacttcaaacatactttgcttctcaaacattcatagtgtgtataaattatgaggaatacaaagatgagtaaggcttgttgccctcaagcattattggttaagtattggcggttaaatgagaagtggtaataaacatcactaacaagcacattatagtcttcaaagtaggataaaattgttgggtactgtttaccttggatttattaagtttaattaagtctgcctacaataaattaaaaaatcacatgtctaaaaatatgtgcatcatcttgaatctgaatcagatttctttccctttagaagctctattgtggataattgattcaaaagaatatgatctgtacattatagtatttatggctgttaatgtcctaatttgatcatggtgctgtagttatataacagattgtccttgtgttttggaaattaygttggaatatttaggggtaaaggcatcatgtctgcaatttatcgtcatgtgtttcagaagaaaatatttgtgtgtgtatgtgcgtgttatgtttgtatagagagaatgatcaaatatatctggtgaaatgttaattgggaagtttgggtgaagggtatacgcggattttttatggcattcttacaacttttctgtggtttgaaatgattttaaaataagaggttatggaattgaaaagctattgctaagatatcagatgcctggtacttttaaatcaacacatttattttatgtgactttagggcagatgtgtgcatattttaagaaaaattccattctcttggcggaaacttgcagaatgtcttcaactctgcttcctcttgctttcacacaccccgaagtgcttgctctctcactttgtggatttatatatcttttgcggcccgcttggggggagtatttgcacatacatttctatgttactgctgttctccaaacactctattattattgtatctgagaggttttcaattgttttaggggggagtttcctacacttaccctttggtagtgattttccaattgtctatgactagctattttgatgacttaatttagaatggtggtcccttttgtttatttctaaactagctgctatgatccctgcttcccttctgcctctttacccctcccttatttgtcacccttctcctcacttctctattaggccggattcatctttggaattagtaaaaatcctgcctcttccaggaagcctatcctgactatccctatggaactctgattacttcttaatttgccacttactgcactcagttttgtatagttatattttattgttttatattgttctcaatgatggattaaaattattgttgttttgtagtcacttcaagttatatgtgcatattattttcccagcccagtgtcagagtactagcagatataagcagatataaactacgytttccctcccccgctgactttatccccacagctcatggctgtctccacgaagtaagtgattctgtctgagtaggtattttttttttttytatttaacctaggatcagacctaagggagttttgttgttgtcgttgttgtttttgagacagagtttcgctcttgttgcccagcctggagtgcaatggcgtgatctcagctcacgcaccctccacctcccgcattcaagcgattctcctgcctcagcctcccgagtagcttgggattacaggcatgtgccaccacacttggctaattttgtatttttagtagagacggaagtttctccatgttggtcaggctggtctcgaactcccgacctctggtgatctgcccacctccgcctcccaaagtgctgggattacaggcatgagccaccgcgcctggccctgagtaggtattttttactgggtccaaaactgaagccactgtctgacttttgggattatctgtatctctcctttcttcctttttacctccaatctctgaggattaaagattttttttgtctgcattagctgagatattagtttcataatgtagccaattcatttactatttttaattcagaatgacaaataaactggatttttttcacctgtaatttgatctgtgattgttgaaacacgtaaaacatatttgaacaaaaacattccaacacagtttataaatgtgttatcctctgtggtaaggacaaagtcatgagactcgtttttgctcaaggatataccacatttgcatcttaaatacaactgttaatattctcttcttgttaattcaggcagggtagcttttcctgagtgacagaaatgtagatgattatgtgaaataatgagttgattggttcatatctgggttgtcattttggctttttggattgtcttatgaaaattttctgagggcagtactcttttttgtagagttgggattataaaactgtgaaatgttctcttttacctttgtcttgcctctgaaacattttttgggttaaattctttaaaaaaaaagaagtcccattgactgtgtatgtgctattaactctagcatcgcttccatgatctggtgttgtctaacatttgattcgtccccttttgtacattagcatatcccagcagctcgtggaagcatttgtgaacgaagaaaccgaggctatgagagattaagtgatttactctagaccacaggtaacaatgtctgatgtaagtttgggtcttcactccaaacctgtacattctactggattaaaggttcttaacctgctttgtgccaagttgcactttggcattctggtgaagcctgtggatccattttacttttaaatacaaaaaatatggccgggygcggtggctcacgcctgtaatcccagaactttgggaggccgagacgggcagatcacgaggtcaggagattgagaccatcctggctaacacggtgaaaccctgtctctactaaaaaacacaaaaaattagccgggtgtggtggcgggcgcctgtagtcccagctactcgggaggctgaggcgggagaatggcatgaacctgggaggctggagcttgcagtgagccgagatcgcgccactgcactccagcctgggcgacagagggagactccgtctcccccccccaaaaaaatacatagcattacaaaagaaaccaattatatataattaaaaaaacccaagtttgtaatatacactgacttactagcacattaaataaaatgacctggtgttgggtgtattaactactattattkcaaagtagtgatgagcatgaatatttggaatgtctgaaactattgtaatgtgttatgaaaatgtgtgatttctattggtgacaaatcacaggtactgtggctaatactactaggttttagggtatcattcatatttgaaggaaatgcatactttatttagaagttagtgagaataaagatgcattttttttcctatccaagtttacagatctcttgaattcccaggttaagaaytacttcatcagattataccggtctctcatgtttataaacatttatgccacctgctggatctgctcttaaaaaacagaataaacaattacaaaagcaaaaatatatgcaaacaatgtaagacctcactaaaaaaagtaagattcaggcttaagtattagttcttgcactgctataaagaaatacctgagactgataaagaggtttaattggctcatgagtctgcagtctgtaggctcatgactctgcatggcagtatctgctggcttctggggaggctttgggaaacttacaatcatggcaggagatgaaagggaagggggtacatcacatggctggaggaggaggaggggcagcgagaggtgccacacacttttaaacgactagatctcatgagaactcactataagaattgcaccaagagggaaatcagctcccatgatccagtcacctcccatcaggcctcacctccaacactggcgattacaatttgacatgagatttgggcggggacacagatccaaactatatcagcatatacatatgttgcgagatcctggagggtaaaaattaaaatttacttaatttaaaatggttagaacctataagtttaaattatttgtgtttcttaatgttctagtcagttctctgcctacctctcccctaaagataaaatgatcatattgaagtttgttattttcttcattaaaaagcctttgccttctatatttcagcttcttctgggcaatttgttttaatgagggtgactgtcatagagagtttcagttcagttctccattagtgatgactggtaggtagagcagagacaggacctgaaatagaatgttagagtgcactgaaatggcatgtctctcctgtgcgtcgtgtaagcctgaaaaggtttgttttattgcttttcactgggtgagtctgaacctcttcgtcagttgtcaggcctgacagcttaagtgtattgtagttgcttccrtccttacctaaaatctagttctactctttcttttgttaattaaatgggaggcattcacttaaatgcattttatttcctctcttaggtggggaatcataagctgtttcttctaaactgttaagcccctctgtctgagttgctccagagatactaagtaactcggatgstgttgacaggaaaagctttaggtagaggggaaaaaaacgactgagcacatttaccgctcagcagggttgccatgctcccctaaccccgcatcatgcagtgagtatgtgcgttgctttccccaggccagcatcctggatcagagctgcaggacttgggaggcagtgcctcagccctgctgtcagcctcatctcccgcctggggaggagagctgcagatttgtgtgagcttccatgcagcttcctggattccctctcccaagtctgccctgcagacccatccagtggactgctcttctgccatatacattctctcccttgactctttccagccttgggctttctaatcattaccaacactttacagtctttttgtatttcacaaaaatagcttgcaaaagcttttggcctgaatttttgtaacagtcttttgattacaatagggctggagaatactattaacttctgattatctgaggacagattattttaaatttggcttataaattgaatggtattttattttcctttagtacttcttgtattattattgttattattttggggtaattattctccccacccattaacttttattttgctgcatcctatcaggaaacttacaaaacctaaaaatgtaagcatttattcaattataggtaatgtttgaaagaatacaggtctgcctaggtttgtattttgtaccattcccaactgggaacttaaatgacaatgttttggagagcgcatgctgttaaaagcgctaatggagaacattttaatttctattaacaaatcaaccaataaaacaattatttaagtattttctttaaatgtctagtgagttttgtgattgttagtagagatcaggcaaaggggtttcagcccttcagttgctttatccacagttggtttatcacacatgctgctacctgccatggtgattagacatttacatagtttaaactttttattcatagtcatgcagtgtttaatttatgcccataatagattattggtagaaatctggaaacatacgggacactgatgctgaaaagcaggttaatgagcatcataaatgtgatgatgcctctgaaaattagcgtcaggatgcttttcactagactactaaaatgtattcatttgctaaaatgctcatatagcacattggggtgtgtctcatattttgctacttaatcttagaaaggttgctcttcatttattaggaataaaaactatcctcccccaattttatttgcatttgcaaatagtaccctgaaatcttttatcctgtcataaataaaacacaaaagttctaaaatcaaataagttaacttccctaagtgcaaaatgtgagaattctgaacagtagagcatgaaagggaattttgtctattttttttttttttttgagatggagtctcaaccggtcacccaggctggagtgcagtggcgctatctcggctcactgctacctccgcctcccgggttcaagcaattctcctgcctcagcctcccgagtagctgggtgggactacaggcatgcaccaccacgcccagctaatttttatatttttagtagasacggagtttcgccatgatggccaggctggtctcagactcctgacgtcaggtaatctgcccgccttggcctcccaaagtgctgggattacaggtgtgagccaccgtgtccagtcgattttgtctatttttgaaactgtaacagttaagtcagttttgtccacattaaaaaatatrgttggtccacaaatgaaatacaatatagtgtcatatttaaatttttttcataattaaaggctgcaacaagttaaattttatcttgatataaatggtataaaaagattattacaataaactttgttattaagggttgggtgtgatggttcacggctgtaatcccagcactttgggaagctgaggcaggcgggttgcttgagctcagaagtttgagaccagcctggacaacataatgaaacctctgtctctacaaaaaatacaaaaattagctgggtgtggtggtgcacacctgtggtccagctgctcggtggggctgaggtgggagaatcactggagccctggccattgatgctacagtgtgccgtgtttgtgctgctaggctccagcctgggtggcaaagtgagaccctgcatcaaaaaaattgaatacccgaagcaaacaaacaaaaaaaaactttgtcatgatctttattaataatattcattatttaaaataaaatgttttaagtaaaatcacttatgtaacatacaagttacagatgtttaaaaatattaccaaaggtttcttaagattgtgttattatgagaaatgcagttgtctgttggaatgtgtagcagagagaagagccttggggtagggacatggaacatcttcccggtttctgcatcagagagtgattgtatgaaaatgtgtacacattggcacagactagagccagttttgaatgatttctgcagtatattggccttgcctggtcccctgtgtcatcgcagagttgattataatgatgagtgtaacctagcagggatgccaagctccctacatctttctgggataaggatggtttgagtaaaaggttgccatggttgtctggaggcagcaagcaataaaagactgtctcagaatgtgttctcttggtgttaagccttggaggtgtgtctttgtgagtattcaaagggaaacgtaagatagttggagagaatcttagggacatgcagaaatactaccgcagtgtgatgaagagaagcctttttaagattgtaaaagtataaatattgctcataaaaaaatagatgtgtttcaaccaagcttgcttttaagtgaatatgtataagtggattatagttctccatttacatcttttataaaattggacatgctatgctggaaaaaaagggcccttggatataatttacatttcctaggaatgtggcagttctgtcattgcatgcttaaaaataattattttcttacagaactttacactaatgccaaaaacattgccagcacctcttatgtattcgtattttacctaacttatgcccaggcagactgctttagacctgaactatgtttattttttagctgatagtcgaagtcctcataggactattagcgtatcaaaggcagtattgaattagagcagttgtttgctttgggtcttagaaattcccagagtttagcagcagaacatagaatagtgaaagtgggttcttagatggggacagccaggacagggtgttctaaatcacattcaagttttgcgtatatgactggagtagatggagatgggggaataatgaagttatgactcaatcagtcctttcatttcattctgcttagtgaattttgaataaaagaaaacctgtgaaaaaggaagatttaggaagatttgtactggacccttgctgctattatgcagaatggtacatgggaagaaaggatggaaaaataaatcaagagcatcgcttcacttaggttttcagcaaacattgggatagctgagacattttttcattaaaggttagcttgccagaaaggtggttgagagtgagtgaattattagtatgtaggtactatgattgttagattatcattaaacaggaagtagatgactggatggagccttgaagaattactagagtaggaaaggtaatttagtcattgatgtgcaatctataaattccttgttatttgaaatttgagtgttatttatatagggatttgrgtaaagtaggtttatgggaactaaaatgtaatctaatgaggtaatggtatttatcagaaggtgatataattctcacaacaatcttattacctggatacttgtataattcccactatacaagcaaggaaactgagttacggggaagctaataaacttggccaacaatatacataaacacatggcatggcagggttttagatcgaggcattctgattctacaggcgaccttcttagctgctctgctgtgatgccatgggcagagaaccacagtttcagaaatacatttaccagcagggacactcgaggtgatctaattcatggccctcattttagaaataataaaagggctcttcgactgcgactgaatggcttgttttatggcttacttaccctgggatggaaaaagcattttaatgactctttaatttcctcttattatggatagctgggtagtataggggagtgagagatcatctctgactcccctttttgctcttgtgtaaatgggctctttggctggatctgcaaactaaattgacaccaggcatattaacaagtgaaaagcatatacatcatcgacgtgttcatggggatcttcataagagagtgaatccgaggaagtaaccacagcaagatgcttgtatacttttttgacaaagaacaatgaatttgagaagaaatgacaggacaagtaaactttggtgaggggcaataaattttctaggggagttactgagatatatagaggggtgtataaaactagtggaagataagggttacttcattaagtatatttattcaggtctgttgcagcmccagttctcaatgtctggtggtaagggctgttttctcaccccagtactggaagggtacccctcccagaggaatcttgatggcttactgcatgcgggaagagaaaggtcagctagccccttctgaaactacaattcctccagtgttttcaacttgaaatagtcaataggccattccagcatattttgggatggcatgtccttcactccttcagtagggataatgaaaaaagagactttcctggggcagctataggcttctgctctgaggtctcttccagctcttgcaagtatacccaacatagctgatttttagcttttctttctaagtctgcatgtttttgaggctatcctttgattcttctaggtctgacaaagggtagagttggacatacgttttagtaagatatgtggggtcgaatataggttccactgttctaatggagaccctaagttacatggctcaaaaagttaaaattttatttttctctcatgtaacattttrgataatttgatgattccctaatgttgggacccagtcttttctgtcttaggctcacaactatccttgagcctgtgtcatgggggatgactctgaagctgcgtgcaccctgttcattcacattttcttggcctgaacttagtcactaggctattcctaactgcaagagaagctggaagatgtagtcttccttctgaccagccatgtgctcaaccacaaattgagtttcagttattggagggcagaaagaatagatatggggctgctttgtaggctgctgctcggggcagcctctgctgtgttatttgagatttataattttccttggcttcccagatgacagtggaaaaaggcatagtcaagacttcaagtgcggaaaatgttggcaactctgacatgcaagttcttttccatatasagctgagttatgctggagtattttggttacaaagacttcattttctcacctgtctgaattcctgtttggattttagttactcttgatttatcagcatggattaaaaattgaaaagacttggtattttaaaattatatctgaaatggcagagacagcatctgaggattcctcttgctactataaggaatgagtaatttagtttgatttttctttaaatccaaataaataagatgattaaactcaagataaagctgtaatatctcttatcgtgtcctgtcatttgtcattgctaccatgtcttgaaagctttgtggaaaaataatggttttgatatttgttattgagatagaatacccacaaataggtatttaaaatatttttgtcttagccagttgattgtggcgtgtgcatggactaagcaacttaaaaaaaaagaaattggtttgttgaataacagctttcactagagacactaaagtccacaaaacctcagtgagcagttgtcagattccattttaaggaggcaaagctaaactttatatgcgtttcccaccatgtgtaaatccaaacagcaagcaaggactattaaatgttttattttgctagtggcagcaaagaatgtaatgttggatataatatagtttacatttacagttgaagttatattttcaattgtatggaataaaatgaataggtctctatttcatagccaaagtggacaatttatagagtgattttctagaacaccccaatatgtagtgacattttgtggcagtgatgccacatgtaggaartggatctctatagaactttgctattaatgttgcggggtatttgttgcatgatgtagaaaatgctatccgggttacctttcattccttatatctgacttagcttaacctcagctgatggcttaagtcagtggccaagaatttttcatcagctgtccttggtaacatatatcattcatcatactaggatgattggtgttatcaattgaaaaatctaaatggaagacaaaattaaatgctacttgagaagctagagtgaaaagagaatgtcttggctctctaacatttcctctcttttctacctgtattcaatatggccatgaatatccttttggagacactttgaatctcattgtgttcaattacagaggaactcttcagcaaataacccttgtatggtgtgcttctagatagtgtacataagaaactgtgtgctgtaaattctgctttcccaaatgttataaaggtatatgattgcatttttctataatataatatatcatataatataatacagatgtttgattgtaatttaccttttaagaacacatagtcttataatggtatatgggcaggatacctgtggggtcaaaggaaaagaacatgaaccaattttgttttcttagagcctgtgctacctacttttagatactttaatcccagccaactctctttggtataagaatggtttgaacttctgttagctaaactgatatactatgtaatgttcatgattgaattgataaaggtgttttttaaaaactgaaattatgcctcattatgcattgtttaaaaataacttttaaatgattatgaaagtaaaaatgtgttcttggtaaacactrcaacgaagtataaagagagaaaggaaaatgatccatttctcccaaatataaaggtaatcattagtatcattttggcatatgtatttatgtatgtatgtatttattttttctgagacagtctctcgctctgtcgccaggctggagtgcagtggcgtgttctcggctcactgcgacctctgcttcccgggtttgagcaattctccwgcctcascctccctagtagctgagastacaggtgtgcaccaccacgcctggctaatttttgtacttttagtagaggtgtggtttcaccatgttggccaggccggtckcgawctcctgacctcaggtgatccgcctgcctcagcctccgaaagtgctgggattacaggtgtgagccactgtgctgggctatatgtatgtatttctttgtgatggtgtccttaggcttttttcagtactgtacatatagaaaacaaaatgaagaccaaatagtgtgttcagcctggtatcttttcacttgtgagaaatttttcgtggggtttaaagcatgttttttaatgttagcattgtattatttgaccatttcactgtttttggacatttaatttgcttctagtttttcattgttttatatataaaatgtatattgttctccctcattgtctaaatctttctctttgccacactacacttcatgtttcttaggaggaagatttaatagtcttttaagcttgtcatgaagatgaatttttagaaaatgcttgatcaacatcaattttactttaacctttggtctcgtcatcattcatcatattctattactttagcagcattcaaagataatgaaagagattcagataaattcttgttactctcagatcaaattcatttacaataaatatgtgaatcttgatgatcagaagctaaaatacttattgaacctggacatcaagccagatcctaaatctttatgaaaatgcaccacaaattcttcttgttacataatcttttctgtaggttaaaaaaaccaacaaatcctagcatgttgacattctgaagaatatatggctttaaacagtctcttgcaaactatagtactggctcaatgaaatgttatacagcatcagtcaggatttttaataaaatgctgttggttctccaattgaagagtttcattctgtttatgtaatgatgttcatgtttgacctgaaaatacctcctcattctacggcatttcatcttcaagagaaaccttattagtaatttgtagattagaaataaagtcacagagggtagtcaggagaacacaggtctctgtaaacctgactcttttattaaacatactttgccatgaatacttttcattgagctgtttttctacctatttaagatgaaccagatatgacatatttctgtattttatttcacaatcctatggtatatacccccaacacccacacagtggttataactgtaaaatgaaagttttgcatgtgtaacatgtcgtaacattcttatttcactgccttgtttgaaatgcatataaatttaaatgtgaacattttatactattcttttaaagattttaaatattatatatgtataatgctttattagattaatttcttcctgttaaattccctatgaactgtgtaacttgagataaaaatgttacaatcatttaaaagtgttaaaacatgcagtaaaatcttactcatttggattcatttaatttacaatttgtcagaaaattagagaagaattatgtttacttacactaacaggatgggaaaggggtcatggggtgagagttggggagggtttggtaagaaaattcccctaaaggaaatctcaattgcctagcgaattattttatgaaatcatcatgtgtgttggatgttactatttatggagaataagttggtattctaattactagtttcattaaaacagttcccctaaggacccctacctgataacacttttaagactggatccakcctttctttgcggaatcaccatggcggctgggaccctgtacacgtatcctgaaaactggagggccttcaaggctctcatcgctgctcagtacagcggggctcagrtccgcgtgctctccgcaccaccccacttccattttggccaaaccaaccgcaccyctgaatttctycgcaaatttcctgccggcaaggtcccagcatttgagggtgatgatggattctgtgtgtttgagagcaacgccattgcctactatgtgagcaatgaggagctgcggggaagtactccagaggcagcagccmaggtggtgcagtgggtgagctttgctgattccgatatagtgcccccagccagtacctgggtgttccccaccttgggcatcatgcaccacaacaaacaggccactgagaatgcaaaggaggaagtgaggcgaattctggggctgctggatgcttacttgaagacgaggacttttctggtgggcgaacgagtgacattggctgacatcacagttgtctgcaccctgttgtggctctataagcaggttctagagccttctttccgccrggcctttcscaataccaacygctggttcctcacctgcattaaccagccccagttccgggctgtcttgggsgaactgaaactgtgtgagaagatggcccagtttgatgctaaaaagtttgcagagacccagcctaaaaaggacacaccacggaaagagaagggttcacgggaagagaagcagaagccccaggctgagcggaaggaggagaaaaaggcggctgcccctgctcctgaggaggagatggatgaatgtgagcaggcgctggctgctgagcccaaggcyaaggaccccttcgctcacctgcccaagagtacctttgtgttggatgaatttaagcgcaagtactccaatgaggacacactctctgtggcactgccatatttctgggagcactttgataaggacggctggtccctgtggtactcagagtatcgcttccctgaagaactcactcagaccttcatgagctgcaatctcatsactggaatgttccagcgactggacaagctgaggaagaatgccttcgccagtgtcatcctttttggaaccaacaatagcagctccatttctggagtctgggtcttccgaggccaggagcttgcctttccgctgagtccagattggcaggtggactacgagtcatacacatggcggaaactggatcctggcagmgaggagacccagacgctggttcgagagtacttttcctgggagggggccttccagcatgtgggcaaagccttcaatcasggcaagatcttcaagtgaacatctcttgccatcacctagctgcctgcacctgcccttcagggagatgggggtcattaaaggaaactgaacattgaaaaaaaaaaaaaaaaaaaaaagactggatccaattgctgaaaggacttgaaaagaattatagatgcattttttwaaaagtatcatatatgtttagattttactcatccttgttgctttcttaccatttattctagatagtttaatattatatgctttagtgaaagctaacttatttttgctgtttatagagaaattatttcttattataccctcacttccttaatttcaaaaaggaatctctgtgaattattataagttaattcaggatgagtagctttaaatcctttttctttttccttcattataaacatgatatggccttattgaactgtttgttcagtattcattctgatattgtcatatataaaacatagttttaaatggtcaagcgctatcctgtgtagataattttgatgggaaatgtgtcagcttgaaataaatcgatgtttgggaaattgttctcttaaagacggtaatctgaaaatgtgaatgctaaataatgaaaacatttgtacagtttgggggtagatgagttttaatctgtttctggcatctgtacattcttgtgatatctcacagagacctggagtgtttaggttgcaatttgtacccaccttttccatttctattgaattaataatggagccctcatccctctaggacatcaggagagaaaaaaaaatagacaatgtgatgattagcagagagtaattttgattaccctaaggaaaattaagatgatctttataagtggaccgggcaaaatgtggttttggtgagtatggagctagagaaagctagtcatgtttgggcaccttaaggcagagatcatgttggggaaagatattttggtgtcatccaaatgtttatctgtttgaaaaatccatataaatattagtagattatttgtgactatctatctgtggtcatacaaaccataaaatagctagatttcccactttttttcatttatcagggtgaatattttagccctgtctaaaacaatggtgcgcagtggtggggcaatactgtaccactttagaaagtgtttgagtagtaccccacttgaggagtacggcaccacttcaggcactttaggaatttgagggaagctgtggtgtttagtggcacggggagggatcttcatggctagcagtgcctgggggtagtttcccatctccaagaattgtcctgtgccctcyaacttctgaatgtcccatcagagattcatggagctgaaaacctatttacctggctgagaacttagttgttttatatataaacagaaagtatgttttgcatggttttaaagtatactgaattttccaagagtgaaactactgtgtaacaatagcttttgcatttgtgatgatttagcacacaaactcaagattcagactgttttattatgtctgctagggtagttatgtttgaacgtttacataatgagatgccattattttattataaattagcttgttttatttaaatattacacttagggcattatattgattacttttcttggtcacacaggaccatttgcgtgaaatggaaaagagcttgggtggtttctgtacttcatttagtttggagagttaacactgtattatagttttatctccagtgaacaaaatataatcatttttrwaacaaaaaaattaagctatgtatcagaaagcaatatccaaaggtaattattattttttaatttaaattatagatcttattttcctggaggctgtgtgagatcttgcaactattattcagaatattaagacatgaaatactagatatatctgattctcaatacgggttttaggaattgtctacttaagatgtctaaactgtagaatatgaattacgagcttatctcttgctatacggctatagcccagtattgatgttttctttcctacatggaatggaacatggagctagtttctatgggtgcttattgtgaagcaaacaataaaatgaacattatttgcgtaatatgccattcagatgagaaatttacaaaggtatatacatcctgatggagtgataatgctacaaaataagccattaacttgatgctgttgatgttcaggttgccaaactcttcctaacactgccttctggtacagtatttatgattatgaatgtgcagtgcagaactttcattctaccatcttcattaactttaatgcgtaagtagccacagttacccctgccaggtagtagacagatgccatttgttttgaaggcactcttaagatacattctccttataggatggtgaaggtaactgtcagctgaatatacctatattctctgtgtgcmtggtttaaatcaggtttatttgtctgccaactaaatggtgccacaaatggataataaacatgtttatttctaactcttgagatttatcctagtcatcttttggctcttcttccaatcaaaccctgtagcttttagaagataaggagcaggacaagatttatcctgtaacctatgctgttagtcatttagctctaatatacttggtgttgtatttcattgattgcatggatgctttgattattattttcttaaacaataattgctcttcattttaatgaatttattgaaattataagattaatgagtatttctattgagctgaaaatttaatttggctatatcttatggtataactttttgctcaactatctcaatcctgggagaatcagagtctttatctgaaatctgctgcttatattatgcaggtacatatatttattttgttctcttggaagatcttcrtggtttctctttagtgtgtttaaactagcacatgaaaataatagactttacaaaattggcsatgacctatatcagcaaatggtgaaaccagaaagaaaaatacattaaaggaaaaatcccaaaggaactgatatttctctaagaagcaaggtataacttttattaagcaacttaaagagattgtttaagaaatactgtaattggggagggaattatagtgtaaggattatgcaaaaaaaaaatgaagtaaaagggaattacaagtgggaaaagttacaaaggaaattagtatgttccttgaggttcagggaatctatgtatatttcagatcatggttgcattttcagtcttctgtttttcatggttgatgagttcatcaagtccttccatcttttggagtcatttctattcaccattcaaggatctatctaaaatgtataattatgtctccccgtaccattccctcccttcatatctttagtttaaccagtttcggtaaacacaggaatttgagcatcacctgtcacatagaagacaggtgatgtgtattgaacttatgttacactttctttgaggaataagaatttcctcacatttcctaagaatactcaggatcaagtataagtttaggaatcttggactttcttatttgatcctgaactcaratttatagcccagaaattttggtggctaagtgggtcaaaagattcctaggcaaaccttaaagaagacccttggactagccaaagcatttgtttagaatattgtttagtaaagacaaacaaaaatttgttaggaatccagagctgctttcaatcatccaagtatttattattttcagtaatggtttcaagtaaatggtttagagccacacttgctagaactaagcaattgcaatgcttggctttttctgacatgttttatgatcagtgtttatatctataactaattgacaaaatgccagtgtttgtgttctttaagatacattcaccattgagaaagaaattaaaatggtttctgagaagaattttaaaaagtacagactatacaagtatggaaagaaaacattcttttgtcttaacacatttctaaaaggagagtatgtgtgtatataaaagccatggaaccatacttactgaacttgaaatagttttgcaaatttccatggcaaatgggatttatattgcttgaacatttttttgtttttactccttttctcatttcacaaactttgccagttcccaaagatttgcttggaaactcactgtgctaataggcaaagttggcctttcttgtgcttctcttaaactagcccttcctgaaacactgaccttttagtttaataacagttttatttgagaaaatgttcagatcctgggagctgaaaagagtgttttcagaaaggccattttaaatagtggtctccaaatgctgtatctttttccctcatgcactttgggtcagacctatcagaagaaatacagtattgctttatgtattctattgatttaaaaacaaataccatgaagcttagatgtgctcagaacccattacctcactggtttattttcctggctgtgctttgatttgctattttagatttcaaactctttatgctaggtcatgtttttattttctgttattttaacttctcatttgtagctaaggtaattactttttcagttgtgaccttggacttgacccaaaagttgtgattttttttttttttccttttctggaaataggtagggcattagaaagayagctgtgctttggctcctttatggaccaaaagtgatgtcaaccagctggtcacttggacatgtctttttcagtggccatgggagtgttcctgtccctttcattgctgttgttgtcctcttcccacgtttttctctcctctcatggcctacctggacgatgccacctgtaatctgtatctctttctcacctcaccccacagcaagtggcagggctgatgatagtagggagaaggggatagagaaggaaacagcaagcctccagtctgcattttcttcaccccaaaccacttcctctccacattctcacctggatggcttcgtgcctatccacccagctggtcaccgtttgatcacactggaataaacagctcgctgctgatttgagcttttcctctggtaggaagacatccctatgttataggcataaagtgcactatgaagatatgacattgtgccaagtgaaataagccagacacagaaagacaaatactgtatgttcttacctatatgtggaatctaaaaaagttgagctctaggaagcagagtaaaagagtgattaccaggggatgtgggatggggaaatagggagatgttgatcaaagagtacaagctttcagttataagatggtgactttagttaataatattttttacttgaaatttcataagagaacaaattttaagtgtccccaatgttccccaccccratggtaactgtgtggtgctcgatatatttgtggtaatcattacatgattcrtatcaaatcatcacatagttcaccttgaatatatatgattctrtttgtcaattataycttaataaagctggaaaaaccaaactgcttaatctcttttctgttgcttataacagaatacgtaaaactgggtaatttataaggaaaagaaatttgttacttaatgttatggaggctttgaagtccaaggttgaagggctgcatatggtgtgggtcttcttactggtggggactcctgtagaatccctaggtcatgcggggcatcacgtggtgaggggctcagtatgctagtccagctctctcttctttttcttttcttttctttttttttttttttgtgagatggagtcttactctgtcrcccaggccggagtgcagtgatgtgatcttggctcactgcaacctccgcctcccragttcaagygattctcctgcctcagcctcctgagtagctgggattgcaggtgtgcaccaccatgtctggctaatttttgtatttgtagtagagacagggtttcaccatgttggtcaggctggtctcaaactcctgacctcgtgatctgcccacctcagcctctcagagtgttgggattataggcgtgagccaccgcacctggccttctttttctttttaaggtaccagtcccactatcatgataaaccattaatccatgcatggattaacccattcatgaaccctcatgtcccagtctcacctcttaagggccccacctctcaatactgccacagtgggaattaagtttcaatgtgagttttgaaggggagaaacattcaagccataagcacaaacagacaaaaaacccaagacaacaataagaaagatgtgatacaattttattagtttacttagaacactgaycccagtgcatcatagttactctctgaggttttacagaagcctagttttaattgaattaaattaaattgaattttgattgagaatcctgttgaattttgcctgagaagtatcttgctgttgtaacttgaagtaatctaggagaggcagcatgattttacatataccatttgactgtgagttgatactaactggtatgatcaatcatactaattatgttaaatatttgtttcagtttttgctacaaatggagctactggttgtatgcaacttgaaaaattttagtgtcaggttgttttacttttttatgagaagtagatgaaagtatgaaaatcattaccttgtgaagtctatagtctagaatttcatagctaacaggtgtacccatatgtcatatttttaggtggggaaactaaaattcagttagattaactgatttatccaaaatttggctagttgaaaagcagactatttggactttttgtggagctcttactgcctgaaatttctctgcttttatttggatcgtttaaaaatctttcatactttcataaagagctctaatacttgcctgaatgcaaacagaattctgttctaggggtttcctaagttttrtttgaccccttcaaagtagaggcttatatttttctcatgctatatagactatgaagtaggagagaggcaaaacagaagcatagtatacagttggaagggtccctaaacacccatttgagaaaaggttgttctcttgctgcccagagaggttaatacctttcccaaagttcccctagattgttgatggccatggtgggattagacattaaatagtttttcctctattccctgattccctgtayagtgttctttttattcttttctttcctcttcctctccccccctccctccctccctcccttccttccttctcttcatttctttctttctccctctctctctctttctctctctctctctctctctcttacaacttattaaggtacatttagcatatcataatattcatccattcagagtgtgcagttcagtggtttatagtatatttatagagttgtgcaaccatcacacaatctagttttagaatattttcgtctgggcatggtggctcatgcctgtaatcccagcactttgggtggtcgaggtggacagatcacctgaggtcaggagttcgagaccagcctggccaacatggtgaaatcccgtctctaccaaaaataacacaaattagctgggcatggtggcgcrtgcctgtaatcccagctactcgggaggctgaggcaggagaatcacttgaacccaggaggcggaggttgcagtgagccaagatcacggcactgcactccaacctgggcaacagagcaagactcagtctcaaaaaaaaaaaaaagaatattttcaatatcttaaaaagaaattccataattccatacccattagctgtcattctctattttctgctttctcctactgcagggaactactaatctactttctgtgtctatggacttttctattctggacatttcacatgaatggatrtagcaggtgacctttcatgtctgacttctttcccttagcgtagtgttttcaagattcatcatgttgtagcatgtatcagtagttcattaatttttatggctgaataatattatatcgaatggatataccacattttgtttgtccattcatcagttgctaggcacttaggttgtgtttagctttgggatgttgtgaataatgtcactgtaaatactcatgtatgagtttttgtatagacatgttttcaaattttcttgagtatatatagtacctaaaattagaattgctgggttatatggtaactctttagcattttgagaaattgccaaactgttttccacagtggctgagccattttgcattcccacaagcaatgtgtgagggttccaatttctttacatcttcaccaacacttgttattgtttgtcttttttattatggtgggtttgaaatggcatatcattatgattttgatttgcattttcctaatgactaatgctgttgaacaactttttatgtacttattggctatttgtatatcttctttggagaaatacctatttatagcctttgcccattttaattgagttgtctttttattatttgtctgtaagagttctttatatattgtatatcctatatacgtgcatactctggatacgagtcccttgtcagctaatgacttgcagatattttctcccattctgagggctttttagctttttgatggtatcactggatgctgctgttgcagtctgatagtcctcaactaagggaagtcatccttctgatctttcatgtatcttctttgtgattgcctcatgccaatgaaatatttgaaagggcttttgcatatcctattgtaaataatatttttgcatatgctgtgggactaagcatttataatgtcgaggttatcgaaagagacactgctgtctagttttccatctgataggctcaactatttgaaataaaacttaggtcctggccaggcgtggtggcttacgcctgtaatcccagcactttgggaggccaaggtgggcggatcatgaggtcaggagattgagaccatcctggctaacatgatgaaacgccatctctactaaaaatacaaaaaattagctaggtgtggtggcacatgtctgtaatcccagctactcgagaggctgaggcaggagaattgcttgaacccaggaggcggaggtcacagtgagctaagatcgtgccactgcactgcagcctgggcaacagagcgagactctgtctcaacaaacaaacaaagagaaaaaaaccaaaaaagaccttaggttctgtggatattcctagatcctcctaagtgcttctggtgctttcttgttcgtaattttgggtagtaggtctgtagtgaagaggagttagtctttgtttatttcttgtggaagcctcttaaagacgtgtgtgaaatttgtccattttatttaccatcatagctgtaagaaactttacaaaacataccacacacagtcttctaattggaaagaccagatgtttcaaatccagtcaccaggtatttagaaagctccagctgtgttatcagcactcttctctgtctctctccagttgctggcacttgaatttgaatgacatgtattccaaaaaatagggtttcaaaattttcataaatgacaaatggcttttttcataaataatggaaaaatgaatgtaactataaatgatttgctctttgtagtacatgattttgttagttgtttaattattgaaatgagaagatttttttttgtcattttcttctccaaagtccctttcttacagcgtctcctctccttacacaccgttgtcagactttaatgttaggacatcatcttaaagaattggtccttactgactcagtccccactgtacagtaagcagttccttgagtttgttataaattttggcaggagtggaaatctaggtcactagggaactcttgattaaattactcctgaagtgcactaattggccttttccacagtgcttgagaagttccaaggagacgctggccacttggcagaactttgcctgttcaaatctagtctcagccgggctttcctgagtattttcttgcttttatttttaagaagtcacctattttatctccttctgctctttatcgattctagtttctgatgaagaattgaaaagaagagtagctgaggagctggcattggagcaagccaagaaagaatccgaagatcagaaacggtgagttttgtgrtatcagagagaggttttggtgggttttgtcatatttaccagtatttttagagaagaatgattgtgataagtctcattatttgtgtatgactgaacttcagaatgtgctgaacacatgaacttggccattttcggttttagattgtgcctcttagagccttgggttacctgcttcccaaagctgactgtgaattaccattatatctcttgtattggttgcttgaatattgagccgtgttttctcaatatgtgagaaggagtttttgagtattctccaggaatttcccagtcgatcagcaaatgtatgcatcattgaaaattatattgcctgccacaggcactaaagtaaatattttggctcatgatgaatatcgtrtgtgatacatagtgcccggattaacaaatagcactaattattattctgttcacgtaaaaaaattaggatgttacagacataagtaaggttggaaataaaaatcctgtttccatcctctgaagttaaccactttttaacattttattgctcgagattttttcctctgcacacacttccatctgattgttgccattattaatactactaacaacagctaaaagaatgttcattgaagtgtttttgtaacagtagaaaattggaagcaatccaaaccgaccatcctcgaggactggctgaattaattatggtacatgcctgcaatggaacactagaccatcagttatagccctgtgtgctgattcaaaaagatgttgacgagctatccactgaaaaaaacaccatgaaaggattttaaaaaagcattttttttaaatactactttttgaagttttagagtaggtacttattcataaaaagatgggaaaacattttaatctaagataaagtgcttcccatctgtactatttctggagtttgcacatagcttagagaattatgattacatgatcatgtgaatgtctttttactgtgagcaccaaacacatgcttgccactgagcaggtgcttagtttgtatttgttttgttttgaactgcccaactattttgcttgagagatctagaggtaaggaatctttgaattggattgtagtcctcactggccataggaccttcaccatataatttaacctctttgagccttaagtatttcatctttaaaatgagggttgtgaaaaattattatttaatatttcttttgacaaactaactcccaatttacacaaaatatacasaacagaatatgaattttagattaagactgctattttcttaggaaatagagaaggcttatgacttacaatttaaaaaatcaagatttaattagtactgccagaaaggtctctgtatatttccacagtttcccatgcagtgctttataattatttaattgggttaggttgatagactatataattagatagtgaagtttaaatattccaaaaaaattcagaatcaatttttaaaaaaagagaatcaatatgttatggtagaatttcttgtctttgaaattttgttatttttaattgagttttattttaataggggttttttggttagattctcatatttagtttgcttattatatttcacataggatttttttttttttttttggtcttcccttctctccatatggtgcaggctttttgttaaaataactcactgtgggttttttttttttcttcttcttcattattcagcttccatttgctctgccttggctcatgaaagggaaagggcagatgagatgaataaaaggtgccagtgaaagccaatttcatatctcasgtggaatggggtgggcagcctagctgtaacctggacaaatgactattgataaagaatttattttctgtcacctttaaggagrgcagagggtggtacagcctttgtattattttttcttttttaaaaaaagttttgtttgaagcctccttcatgaaaacttcagctgtcaaatcttggcaaaaaatgtgtgttcatctatatgatagttcttaggagaatcaatagctatatttttctttctttttttctaccagagaagaaacttcagaaacagcattaagaaagttttgtgtgcagtcttttagcagcaactttttggagtcacagaacatgtatacgttattgtatgtattgcctgaattgaatcgagatttataggcagttttagaaaatagctcctcttgcctttgtactgttactcatatggtatataccctgcgtgccaagttttctcttttccctccaaatgcacacaaacctgttgaccagttctcaagcacttcatagctggacatacgcatctacgtacgtacattttgaagaaacttgttcgagaaggactttgtaattaatttcgattgtgatatttttctttatagaatatctattatcattgtaaccctttttaaatggaaattttttgtttgttttttgtttttttttgagatggagtctcgctctgtcacccaggctggagtacagtggtgtgatctcagctcactgcaacctccacctctggggttcaagcaattctcctgcctcagcctcccgagtagctgggattacaggcgcccgccaccacacccggctgatttttttgtatttttagtagagacggggtttcaccatattggccaggctggtcttgaacttctgaccttgtgatccacctgccttagcctcccaaagtgctgggattacaggcatgagccaccgtgcctggcatttaaatggaaattttaaagctccatgaaaaatatagtatagtgaatccccatatcccatgacacagttgtaacaattcttgtttcatccacatatctagtcactctacatatgtggtgagtggtgaggaaaagtagtacaattttaaacaggttggtgaattttatggcagggaaatattccaaaatgtcttctatcagcatagttgaaataagtactttgtttcagttagatttatttagttggaagactgaaatttaactccgattagcttagaaagcaaggaaatttttaggagcataaaggatatatagctcaaaagaaacaaatggaagacttagaaaaccattagcaaggggagaactggatgtttctaaaactgtgtgtggtgaggaaatagttccccagcaggaaatcatgatgagcattccataaggagggggaacggatgcygggtggctgaatttctttgcatgcccctgattttaagattttagtgtatttggtgtaccctatgaaatatattgctgcaagttttaacacaatactttatctcttagaattttcttattgaaacaattcattaacactaattttgaatttttgaaaacatatgtatattcataagaaggaaaaagtaggcaaaataaattgattaaggcagtggttctcagctgggagagcatttgatccccagggggcatttgacaatgtttggagatatttttggttgttaaaatttgtcaaatgttattggcatctagtggatggaggccagggatgctgtttaacattctgtaatgcacgtgacagtcctcacctcctgctgcccgccggcccccctcttatccgttctccccccaccaaaaaagaattatttggctcaaaatgtcagttgtaccaatagtgagaaacccagggctaaggtattcttcaaaccagcccacattggatttaattgttctggatcacttttggactcagggtttgatgtctttgtttttccacacaatatcatattctatgccgtcaaaacctcggtgacacaacattccttaaaagattgctccactcttattcctggaatttttccgagctgctgacagcagttctgcaaattttgatgcttctgtgcaagcaatgacaacagcagcaggactgccgcctggcagatagcaattttcagatgcttttaggtttgtgaaaacgtggaaaaatatgcatcctagaattgataaaatgcagtccatgtacacttcagaccataaaatttgtcagctcggaatgacttcttgaatgtcttactttaccttctacttaatgcagaagccctttttaggcatctgtgactggtagggccacatgcttttagattccattcaaaatcatcgaaactgatgatatttcattaggtcatctaaaatttaccccaaccccattaaatctccactcctaaatctaatgcagacctgccatacttaaaagttgccttagaggaggtttcttactaaggccacagtgacaatacagttgctaattattagcatgatgactatatatattttcatttttacaaaacatttacatatggactcccaattcattttgtcttagatttatcctgttttatggggatcttaagtgatttgcttccacaatcatgtcccgcacaaatcgctgatagattagtgcacacacgaaaatttttgggtctaatttgaaatcatggttttgcttatcaaaacatctagtagacagaatagttgctcagcgtaccgagaatccagagtaaatgcctctgtcggcagtctgtttttgctgtgatactcaatggtgtgtttggattatagctgaccatattgtgttgtaactgtgtaggccaatatagcaaggacataatatgctacagtttgagtatagactttaaaaatatgatttacttctcctctgtgccctacctccaaaagtcagtctttgacagctagaaaaatgtgactacttctgacctctgacctttggcatttgaatttcacctctttacctataaaggcaagtgaaagtgtttcacttataataacatttttttttcaagaaaccaagaagaaagggaatggctgcttgatgttggaactaactgtacatcaaccaagattacttgctcgctatttttcaatggacattagttgagatttttcccgcacttttagttatttggaaagttacattagatttgtaagacttcaaataatctatctggtataatgagtggtttaataaattagtcataaattttatcagccatctgkgttagagtatagtgtagtccttttatttttccattgatagcattgttgatatcatcaaataagggcttaaaacttatttgtaccttttagtttctcatactaatggtgaaatttacagggatggtaccatctgtttaagttcattatatatgataatttatcttgatttttattattacatatgttstgcctttgaaaaaggcagcaagaaaaaggcaaaagaaaaagcagaaaaaaggaggagggaagagttytgaaacaaacaggagtttgtgggtagcatcatgtttaaaatacatgatmcaagaaatcatgtggctgggcctggtggctcaygcctgcaatcccagcactttgggaggctgaggtgggcagatcacctgaggtcaggagtttgagaccagcctgaccaacatggtgaaaccccatctctactaaaaatacaaaattagctgggtgtggtggcacaagcctgtaatcccagctactcgggaggctgaggcacgagaatcgcttgaacccgggaggtggaggttgtggtgagccaagatcgcgccactgcactccagcctgggcaataagagcgaaactccgtctcaaaaaaaaaaaaaaaaaaaaaaaaaagagaaatcatgcamctagcatggtgcttttcacatagtaaagtctcacaagtatttgttcagttgaatgaatcactgggtctggaaaatcatgataaccttttttctagaaggtgcagttctatattatgtatgtgggcatatatctattctacattatattaaaataaaaacttaaattatctctttgaaattggctactgaccagagactatagatacttgtcttaaaaatctttcttttaatttagtwtagtgttgaacacttgttttcctgtcatagacacaaattacacagttatgaaaattacataccttcaacctgcatgtaatttctaggtgtaagtaattaaaaaaacttttcagggaatcagtactattgataactaatattgatcaaggcttataaaggcatagttttgaaatgatcttatgagatcasttagcagtcagtatattctcaatgcagtcacaactgacacaggcaaatgaatttcacttgtaatttataaatagttgcaaagaaggttattgcagaaatttgagttgtagctcttcagcgacacacagctgatgtccaggtgtaacctataccatcctgctgtgatgtgagcatatttcccaggctcattaggcttcactggaggtagtagatggtttgttggcattatttccaaaatattcctttatatactccaacatttaagagatccttctgtagtataaaagtcccactattttagattatttttttattaatcatatttttgctgtttttttaaatgctttattgcattgctgttgttttatactcatacttttccatttgattctgcttaacaattgataaaaagacctaaccagttstgaatgtagtaggaacacgtcctagccacccagtatttttcactggaaggtgattggaagtgctgtgtctgtactaggtattggaatcttgtgccatctgctactttcattgtttttcttcaggtggcagttttctatttttaatagccaactgcttttttataaccaacagtgatagaagtttggattttctagctctgttttattcttattgttttatttcttttttcaaatccaattttctttcctactgatgctacactgttgtaaatcctgtttgagaagatatttttacatgttaatatcaaacctggaaaaccagagtcaatcaagcgtgccatagacatctaacttttttactggttataatagcagcagtgatgtttgaccacttcttgttcacatgtttcttttgacagtaattacagtgttttctctcgtgaagtgcagtgtttgaagtcatttgtgccaaagtcaatttctgcatttggaagtttctaggaattggtttctcagtgttatatagctgtaatagtcttgtcgaagtgtctccattactttttggtctggggatgtggagttttaatgtactcagtcatttattattccttgcataaaagattaatgtttattgtcagtattatcactgatttataaaaacagatgactgagttagacacaggtaatgtttttcagttagcagaactagattagaattggcctgccgcattgctctacctagtctgttgctgaagtgatagaatcatataggctgtcatcattacataaacatttttcaaagggagtgcaacatggaacccaaagtaaagctgatttaagtgctgtctggttaaagctaggactagggacttagagctgtgtcagcctattttcttctttttccttcctaaagacccaggcccttgtgctaactggggctttcttcaagaaaactttggtcaaggtcattttctcgcaaatttggacactttgtgtttgaggagtgtactttccttacccaaatagcatttgttggatagactcgattctgtttctgttttaaaaggtgggtggacagtggcctgttgtccatttccttaatccggaagtccgtgtttatgggcagtggtccacataggctggacctagccctggctgtttcttagtcctgggccttctggaagccatctgttgatcctgttggtaatgctgtgttaggaacactggagaagagtgtgaggtccttctgtgcaggatctggaaatactggagaatattcagagagagtccctgtttcccctcytgacctccatagctttgccaatatagcctcgagctaaaaaggaatgtgggcaacacagttgtaaatcaaatgtaaattttctctccagattataatacttccaaacattggcaccgtttcctgttcaaataataaccttacccccttcttttcttggttggagcaaactgttaaacaggagtagcccatcttaaatttctgtttgatactttagtgagagaaccacattcttttgtatcccattcttattcagaagcagttgtcatttgtctttgaaaactttcctcacagttttatacagacacatacatagaacatgcacactggagtcacatataatctgtgaaaacgatttcagagcataggatccatatgcccaactacaatgtacccacattaacaaacacaggggtcatctcttacttactgtgtgctaagcactgttctaagcattttatgtattttcattcatttcaactatataacacccctactgggtaggcattactgttatcctcattttataaatgaggaaacagagagggtaagaaacttaccaagttatatggtttggttctatgtccscacccacatctcatgttgaaatataatccccagtgctggaagtggggcctgtaggaggtgattggatcatgggtgtggtttctaatggtttagcaccatcctcctaaggctgttcttgtgatagatttctcatgagatctggttgtttaaaagtgtrtgacagtccctctccctctttctcttttcctccttctctggccataaaagatgtgcctacttcatcttgcccttctgccataattgaaagtttcctgaggcctcccaaaatgctgccatrcttcctgtacagcctgtagaaccgtgagctaattaaacgccttttctttataaattacacagtctcagatatttctttatagtgatgcaagaacagactaatacaccaaggtcatatctatcaagtaagtggtggggctcggatttgaatccaagtctgcatttaaacaccctacagtattactttctgtgtggacagggaataccttctttaaagtctttcatttacaattgtgggaagaagtatcaaacagttacttggattttctcttataaacctttagtaaataacaggtctcttaggtctcttaaaaatgacctctgttttgtgctactggttattagatctagatagctactctgtacagtatttaaaaaaattcttttatcttaggcccaagctgtcttgagaacctgtctttacagttaatattctttttgttgtgtaggctatacctgacatttatttatttatttatttatttatttatttatttaatttttgagacgttgtctggctctgtcgcccaggttggagtgcagtggcacaatctaggctcactgcaacctccgcctcctgggttcaagtgattttcctacctcagcctcccaagtagctgggattacaggtgtgcgccaccacacccagctagttttttgtatttttaatagagacagggtttcgccatgttggacaggctggtctcaaactcctgacctcgagtgatccacctgcctcagcctccaaaagtgttgggattacaggcgtgagccactgtgcctggctctatacctgacttttaaatgcttgtttgtgcacattttcagtgacaatggcagtttaaatttctcatgagttcagttctcgttagcttaagattgggacatttttcttaatagtacagcggggagtatgtggaagcagctggtgccctgcctcatgaactttagagatgaggatctgctgctggtcagtgaggcacgtgtgtgctcactagcgatttcctgagttcagtagagcaaattgggcacctttcacggtgggggaatttgttaacttctttcttggagttaggaagcaataaagaagtgcaggaattactttaattaatgattgcagaggggaaaaatatttacgtttctctctatattcattcttagacttttttttttttaaaatggaagactggcttattctgttattttatatatttgtgttgcttgatatgctgggtttttggcttgtagtgtctgttgttagtatttatttgccttttgtatgatagtcagtcatcacatttagtctacaaayttagatgttttgaaatcaattaaaaacttagctgctgggacaatttgcygttggaactagaatattgaatttatctgtcaaaatattcagccacgatgggagcaattgttagttatatgctatttacaattgcttccttacatataaacaatctgaatccttgaggctgcaaccatttcatttgaaaggttttttttttttttttgagttatcccccaaacaattttagtgtgatttaggtgtcaggtataaagcattaaaacacagattaaccatgtaaatgtttcaattcttgatttaaattcaagtttcttcacaacttctcagaatggatcttttaaattccttgtttcttggtgccattttgtcaaggttgatttagattaaaacaaaaatctcataaaaatccrtaaattacagggcattttgacttcctgatggggttgttggattaaaaccaaatgataccaaaaaaagtaccccacaaagtcaactgaaaccactratgtgacaagtgtctactagttaagaaacacttatgcaacagagtttctgcaattcttccattatttctaccgaaccaggtaggtttgacataggaaattcattccttaaacaactgaaaacatggatattgtgtttgtttctttaacaaaaaaaaagaaaattaccagggaaatacatacctataaaaggaattcagtaaatacagatgaatagttttctgtctccctcctttcccttattcttactccctacaaaatcatttatacattcttaccctagattatttatcattttgtttttttaaaacaaaatgagcatgttatataacgtgcttttttctactcagtcatatattgtgatctctcttcccatgtcagcatatatagattcaagtagaccgtctatctgataataaatgccatttaagaagactttgcctaagaaaagtaatattactactactaataatatgtaatagtaagtaatcatttgtaatagtaatagctaacagttttgaatacttcttttgtcctaagcactggtccaagccctttgcacatgtgattatttaaccttcatagcagccctatggggcaggttctgacctgctagtctcctcactttgtagatgaagtagcygaaacacagaggtcacttgcttatagccacatagccagaaagcagaggagctggaatttgaacgcaggcagtcggcatctgsagtcacccatacttaccatcactcgatcagactgtgtttcagaggctaaattattttctgatccagcagtaatgttacctattatatgtctgtctgaatgyttttttttttttttttttttgaggcggagtcttgctctgttgcccaggctggagtgcaggggtgtgatctcagcttactgcaacctctgcttcctgggttcaagcgattctcctgcctcagcctcccaagtagctgrgattacaggcacccgacaccacatccagatgatttttgtatttttagtagagacggggtttcatcatgttggccaggctggtctcaaactcctgaccccaggtgatccacccaccttgacctcccaaagtggtgggattacaarcgttagacaccactcccagccctgaccttttgatgtcggttattgaaggtttggcctcccctcccctcccttcccctcccctctcttctcctcccctcccytcccytcccctctcttcccctcccctcccctcccctctcctccttttctttcttagttttgagacaggatttggctctgtcgcccatggtggagtgcagtggtgcaatctcagcccattgcaccctctgtctcccagactcaagccatcctctcaccttaacctcccgagtagctgggactacaggtgcatgccaccatgtctgcctaatttttgtatttttgttagaggcagggattcaccttgttgcccaggctggtctcgaactcttaggctcaagccatctgcctgccttggcttcccaaagtgttaggattacaggcgtgagccactgtgcctggcctgaagatttatgttttataggttttaccagtaaactatgccttaattatggagctcaataaataagaaatttagattgaaaagaatttcacaaatgaaaggactttttgtgttttgttttttaactcacatgactatgttttgaaataaaactgtcaaaatactgtcaaatggtgggtaaaaattaatattactgtagatttagctgtaataggttggaaattgtgcatttcattatgaatatatctgtcagctgtacaattcagtttttatagaattaaagaaaaggagcccaagtgggtttctataatttatgttatttagccctacataggtttgccttacatagtttgccttagaaaagctctctcctcaaactactgaaaatgtggataatgctagtctaacagaaaattgcgggtaacagaaagttgagggtaacatcaactttctgtaacccttatcaactttctgaggttgcagtgagccgagattgcgccattgcactccagcctgggtggcagagcaataytctgtctcaattaatcaatcaaccattcaataaatgtcaggcataaataaataaataagtaaatgtcagtgtttcttcgtaacagaaagaatattaactgtaaagacagattctcaagagagcttggtcctaagataaaataattttttaaagattttttattattgacgattccaaattcattcttcctgcctttatgtccctgttttcccatttccagtgaattggccctaatgtctctgcttttaaaatatattagaaatgaattacctctcacctttgccacccctgccttaggctaagccagtggttctcagctgctggagattttgctcccttccccatgggacttctggccatacctggagaccttttaggttgtcctaacattgggggtaccactggcatctgataggtagaggccagcaatgctgttaaacatcctacagtgcactggacagcccctctacaacaaagaattgttcagttcaaaatgttgatatagctccgaggccgagaaaccctggtgtaagccattaccatttctcatttgtagtattacaaagtcacctccattgggctattcttgtccgccacattctatttttcacaaagcagcattagttggctttaaaaaaatgcattttgaatcatgtcactttctttgcttaaaaccctctaatggcttcattaggtttagcataaagtccaagtccttttctctgaccttcaagtcctctacctattgttacacatttacaccctctgatacttggatctcctatgttaccaccctctcattgaacacttcggccacatcggctgccaaacctgtttgtgcctatagctccttgtccagaatatttgcacttcatattttgcatggctgactccctcttactatcacagtttttcccaaataaccctacagagaggatttccctggtcattttgtctaaaataactcttctttctttcctgttctctcatcctagctgtccttttcctgctttatgtttctttatagtattctttttctgtttcttgtctgtctcctgcactggaatataaaagtttatgagggctgggcatgcctgtaatcccagcactttgggaggccgaggcgggcggatcacctgaggtcaggagttcaagaccagcctggccaacatgacgaaaccctatgtctactaaaaatacaaaaattagccaggtatggtggcaggcatccgtagtcccagctactcaggaggctgaggcacgagaatcrcttgaacctgggagccagaggttgtagtaagccgagatcacgccactgcactttagcctgggtgacaagagtgagacccygtctcaaaataaaagaaagtctatgagggcaaaattcattgtctgtcatatagtaggtaccaaaaagggattttatattaaattacgataatattttactgttgtggctaaatacattaaaatgggatagaatttgtccaaaagtcaaaagagacaggagaatcatcatatgacaatagcaactgccatttaatgattgtccactgtgtactgtgcgctgtgcatatatttgtatatattagctctgaactccccgagagccctctgatgaagcctgctttggcctgtattgtggcctataagatgatgctcctcatattcccctccaggatccaaggctaggtgacccccactctgccatcaaactgaggagcaattggatgtggtagctctgctttctacaggtttattttacaaaagtagcttggagtgggcaastaccttgacctgacaacaggcagcatcaggttcaaatccagttctcttttactccaagcccgttcccaacatttcagattttcatagtgtttaggaagtgactgtgattcatgtcttcctgttgagtaggcttaattggcttcattttctgatatgaggactgcattataactccaggagcagtgtttttttggtttcaggtcctgtcctgagacagttgctcagtttccttcatttttaatgagcattgtctaaaagtggaaacttgacagtatatgaatatcatctaagctttcagagtatttttattgttggctaacaacataatcaaaatttgaaacgacatgaacaacatgtactatagtttgcacttacattttacatgagactgaaccagagcgtatgttgtgtaagtctttaagccttgtctgttgggacagaagtcaagaagtctcttgtgtctctgagcatatacttttgccctcatgaaccctgtcaaagggattccagatgtcctttgaacatttggtgccttagattcaagaggtgcatggcgtaacatggatttgtatcttgaaacattgcattctttccctggtttcgtgacagagttttttttttttttgtcgtaacctgagagatcatctcttctctcctcgtgcccccctcagcctccctggcttctgggaatcagggctctctccaggcaccagagaaggcaaaagcccagagcttcctgggatggcaaattgttctgagtttcagtgtgttcctgtacttttttttttttttttttttttgagacagagtctcgcactgtcacccaggctggagtgcagtggcgygatcttggctcactgcaacctctgcctcctgggttcaagcgattctcctgcctcagcctccygattagctgggcttacaggtgcacaccaccgtgcctggccaatttctgtgttttttaatagagatgrggtgtcacatgttggccaggctggtctcaagctcctggcctcaggtgatccacctgccttggcctcccaaagtgctgggattacaggtgtgagccaccrtggccagcccttgtgcgttttgagttgaagattatctcttgcttcttggcctcttgtatctgtcctcccactgactacctktgtgttctggtttttgttgttgttgttttttttttttttggtcttttttgttttttcatttgccagcagcttgtcataggaatgacacatactcagcagagtcagctttagacagctttttgcagacaagaacaacaaattcaccagtcagggaacaaagtgagagaaaaatgaagaacaatattagaaaagaatcctttgggaagctgcacaaaaaatgttatattaaaatcrataccagggcttgaccttttgtggtagtgtatattttaaagcctcctattgattctcttttaataacatgtttattctagtttactgacataagcctacagagaatacaaaaagaaaagatcaaattctttattacggtggtcatttaaatttgtctcagacatttcatatggctaatgttatatatgtatgtatgtaacatattcttatgcattgtaagactttgagatgttatgaaggtggcaaaggggatttttatttttgttggaaatactcttggccttgctgtgacatataaatatatctccttccttcaccatgaaattgctttttttttcttttttttttttcttttctgcatgtgtgtagaatacagaaaagtctcattttgattgttttttttttcttctcttaaaaaccatcgatagcttaatctgccgagtctgggaacatttggtgacagttctatgcataaagacagctgtcttttactgtataactaatggcaaaatgtcgaagaataggaaatcttcttacttgatccctttgatcactcaatcttgtaatttcaaagacagaaatatttattgcttttcacagtgtggggccatgcacatttcacttaggaagatagtcatcttaagggtgttgtccagtcatgaattggttgcactattcttatctcctcaggtttttttccattaggaaagaaacagaatcaattttcttacttcattcagatgatttcccccaacataacagatattaagaggtatccagaataacaggaaggacttgagagacatacctggaaaggttatcctgtaaatggcaaattaaatgagattcaacctgtagaacatcttgttaataggcttggggagaaataggatgctcggatctaattcatggttttaatataatagtcctgttgtttatgggacatataatatcagatgttgagaagccagagagtaattccaggaaggctgtaatgaattaraggacattttcaaagggcaagtaaattaatcaggaagctaaaaatcagaaagttgggacacgtrtattgtagcatgggaggagacagggaggctcagcagagatgtagcagggcatccctaaggaggtccagagagtggctagtttctctctacccttgtgtctttaaatgttggagggacctggagtgagcagccgtagtgatgatactgctgccattctgcacactgctgrtgcggggccagccattccgttaggattggtttctggacactgacctgcttgctagggtctcaaaaggtgagtgtcagaaaagctagcttataagtaaaggtaaaattcaaataaaactaagatttaaaactgtccaacttagaagtcagtttaactaatcccatggtagaattgagttatggtatatgtccaaaaagagactgagaacgagmcaataactaaagacatgggcacaatcaagtgggtctctcctaggtctgcccctgcttgcttctctctcttaccttgtgccattgtcaattctttattagcctggtctgctcttctgtgttttatcattaccccacctgtaacagcttcctagtacctatcaatatagatcaaagtgaaaatcacaaggcacatgatagtaataagtatttttttctagttacaaaaataactcacactgtttagaaaattagagaaatgcagccaaacaaagttaagaaaatgaaaatcatctataatctcactattcacacaaaaccacggtaaatattttggtacacaggcttatacacacaggagaaaaaaaataacaagtggtattatagtgtccttactatttttatgagctgctttatttttgctcataatatatcataaaaatatgttgtcagtacatatataartaacttaattgtagttcactattagwcatttacggttccaaataaatggttcagaatgtttcacttttatgaacactctgcattggatatycttattattaaatttacacatatccagtgttatttccttagggtaaatccctagaaatggaattactaggtcaaaggttatactaaatattattattgtcaaattgccctcaagaaattgtgttacttaattcaccaccagtatgaatccttgtttttttctcactgttgcaaactttgggaacatagtagttaaaccagtgttgtgttatgcccatatgaccatggttgctcgtatctgtttatttggctagtattttcattaawtttatttatttatttatttatttatttatgagacggagtcttgctctgttgcccaggctggagtgcagcggcgcgatctcagctcactgcaacctctaccttcccaggttcaagggattcttgtgcctcaggctcccaagtagctgggattacaggtgtgtgccaccatgcctggctaatttttgtatttttagtagagacagggtttcatcatgttggtcaggctggtctctaactctggacctcaggtgatctgcctgccttggccttgcaaactgctgggattacaggcgtgagccactgcgcccggcctattttcatttattttagatgggtggttactagtgggatggaatagtctttttgtgttagtactatgggagtttagatactttaattcttgccagatcattttaggttaatgttaagttaatatagtttaagaaatctgtaacttaataatgttctttgttagttgtctgtacatacaaaatcctgtcactgagacctatatgtagctggcgagatacaacagatatgcaataggtgagatatgatatagctgggaatastctaattgccctggagtggactcagtatttctaaaattgccacagcagatctggcgtaaatgtgatttagttaactggtgagtattacaccttatctataaatgtataattgtgccataagatcaaatgtcacagaagaaataaamcagctttgtgacatttctagctttataagtaaaacaataccctctatatagtagatactaaataaatacttgttgattattgaatttgaccattccttcatttttttgaaggataacttgatgtttgccttttgcttgttacatacaaaaaaaggaaaatcaaataamtttgtagattgaaatgaaaactccatgagaagcgaaaatcagtgactgagctttgggcttaaaaaattatatagcgtatacttttgtgatttttgtttcttgattctgtatgctgacctgattttcaaattcctttttaaaaatgagcacattaaacaaaatgaatgttgatcttaattctgagaaaataagtaaatatggttgttggatcttttcttgatcccacactaataagagatgcataggtctagttccttgttcaggttcaccctcgagtgaggatgagcctagagagacacatgcgcttcacccttaaaccacatatgctgacttaatataatgaatacacctaagtggtttagagatggaagagattttaggtttgttttttgtttgtttgataacaaaaataacccagaattgggaatcagaagaccagagtctggtcctgcctctctgcttattaactgagcagagattaatcacagtttctttaagctcagttttttcatatttaaaaatggaaacaattttaaaagcactaaatactgcttctattctacttttttgtaaagatcaatatattgaaataatatattgaaattgcattgaacccatgtacttttataatgtatttttaataacaaaaataagaatgattattattaccataaatacttctactataatctttggaataaactccctcattattacaaatatgacagcagtggtttgatacaaatgttaaatcagcagcatcccaaacacacatttttttcagtttgccgtgccatggtaatcaggtcactgaactcaaataaaatgtaccaacatttgaaaattgtcttcattgcaaagtgttatgttatttaaaaaagtttgcccactctccttgcctactgcagtttccccttcacattgcctttctcctctcttatctttcatctgctacttaattgtttcagtgtctttagttagtgtcctgttctcattctctttggatatacaacttctgggcttaagtggtcctcctgctctggcctctcagaaagctgagtttctaccatggcattagttaacctgacctctaggctasatggttttaaatccctcttgtatttgaattttacctttacttacaagctagctgtgctgtcacttaccttttgcttttacagctcacctttgcagtcagtcctatcttttgtgaactctgaagccactctggtatgctcctccttagatagatgactgataagatatatggaaaaactgatggatctggttttgttttggtaattcttacccaggtacacattaattctcatattaaatctttaaggcctgctgggtgtagtggctcatgcctgtaatcccagcactttgggaggctgaggcaggcagatcacctgaggtcaggagttaaagaccaacctggccaatatggtgaaaccccgtctctactgaaaaacaaaaacaaaaacaaaaattagctgggtatggtggcgggcaccagtaatcccagytacttgggaggctgaggcaggagaatcgctccacggcggaggttgcagtgaaccgagattgcgccattgtactgcagcctgggtgacaagagcaaaactccgtctcaaaaaaaaaaaaatctttaagatatctttcaggttcaaaattctaagtgttgactttctaatggaaattattttcatcaggaccctttgaagttttaaaaagggttaatgttagggttaaattgatttataaagatgatgtcatatgtttcttttcaaggtatttttatcctccgtgtatttttatctcagcagctatgtttgtagtaatagaacaggtgggttaggaagtagccagtgaaaggtggcagatcactttgggcaagagcttgagtcagcattgggcctcggcaagtgtaaaacagaagactgtgtaaatttgaacatggcaactgtaaattgcaatgcattgtcatagtaagaaaaaagaagtaaaattggtatttacagccaaatggtgcttttccactgtcacatatgatggacagtgacaaaattatcatctcagctatcacacttttgagtcatgccagatctttaagttttctgtgtctcatacagataaaaataaaggcttgattgtggcatttgttattcttgtttgcttttaaaactagttgtctatcttcttgtcttctcctgggattgaccccaaacccagaaaggttaatttactattggaagcccatttttacagcacacaggcctcaatttattttaagagcatgtttgccaactctgtgctgctttagccctgtaaacatgagtcttaagggaatttttaagaattggcaatagtggagtttcacattctgctagcagtcttctgcaagtcgtgtttcacattgtctctgaaacatttatctgagacactgccttctgaggttcatcttgattaattatatatatgtatatagatccttaatgctttcaggatttatttttcataaactatccgaattgacctccttggctgcttacattgttttccaccccatttccttcctcataggcatgtatacatactgcaactcctagacattcaaatacatgttttatttttcaataacttgggcatttcatttcaccctggaaaatgtaatcaaactacataacagtgtcattcattttcatttttatttttgctcaattgctatttaaaccaatggaaagttagtatcattgcaacatttactgtaatatgagtgtattgtatatgaaggtttcaggaggtggtcattattgtgtgacattaaatggaagagcaattttagtaagggttctatagatatttgataagaaaaagaatttgtaaatgtgttactatttaaatatactcccactctgagttaattctattaagggaagctaaaaatgaattacaaattgaagctatgttgtagcctcaaattgtctttttatatgagtgtttttttttttaacagtgcttaccttcacctaagttatctctataaggaatgctgtttgtaaactgttacgaactacaaataaaattatttttgtactatgaaagcctaattatcatggatttctaccattagcaaatatcaaacccacctaaatctcaggaaaaaacccaggggccaaaagttaatgtcttttggagttggagagatctgatttgaatgccagctttgtctcttagtaatctgtgatctcaagtcagtgatttacccttccaggcttcactttcttcagttaggaagccaagttaataagaatatctaccagataagcatgtttttcaaatgaagattaaataagataacatatataaagcacctggcacatattaaacttttgatacaaaatgcttattcttacagataactcttttctctctttgaagtgaagatcactagagtgtgatggttaagagtgtggtcctaggagtcagaccacttgggtttgaattccagcttcatgggttactagttctgagaccacttagtaaattacataacttcttgagggctcagatacctcctctgtcaggtggaggacaatgataactctagatgcctcatctgtaagatggaggacaataataactcttacctcagggttaccttcagcgttgttttgaggatcagatggttcattccaggtacagttcttagtacagcacagcgactcacacagaatcaaagtaaacgctctgtaaaaatgattatctatcgcatccatctgtgtattcattcatttcagagaatcgtttcctagttgtatagtgttaaaaatctgtctgctctcttctacatttgccctttttcattttttcttggctttatagtttctgaagattgtaaaagatctctttgttgatgaaaatggaagaaaaactagctaagtgaagctagatgagctttttctcttttgtaggagccattgctcctttctggaaagctatgccatgtgtaattccaaaagtgctaagtgagagaaataagaagactttttttcttatcagattaacaagtaattaaaaaaaacaacttagtttttagtttgaaaaatattccttttagttgacataagttttcactttgctattggtgctaaatggttgattgttgtatattgcttttttgcttgttcagataatcattttcaagggcttggaggccctctgtaaaaatccaaggatctctgcagctggaatgttgcagtgttagatgtgagagaaagggataacattgtgtttggcttttaaaaaagacattctgaaaggagatccggagggttagcagtacctgactctgctaatgtagttaatgcccygaaatgaaggtagtcagtggctttgcacacaaatatgtaattttaagaaytctcatttatatgccagaaggtaacatgcaaggattgagggcattgaatagtaggttaaacacaggccttgcagagagaaattaaatcatttttggtgagggagatgccatctaaagctatgccttrataaagatcttagaaattaacagtcacacagctgtatgttatgaggcgagaactgatgagaagttgtaacatgtacctctgtattgctttgaagttttggaatagaaatacctaacttgtgcctagctatgattttgagacttactgtagctctgtgctgtcctatggtcacaggtgactattaaacacttgaagtgtggttggtccaaacagaaatatgctctaaagtgtataccaaattccagagactcagtgtgacaaatataacatctctttactagtttattgtattgattacatgttgataatattttggatgtattgggctaaataaaatacatggttaaaattaattcggcctgattctttttagttttctaatgtggcttctagatgtagtctgcattatatttgcattagtcagtgttgctctaatatatttaaacataagacaattgcatgaaagtgacaacatcacataagtgaaaaaagctaaatcccagtaccctatctcactccccaatggtaaccatcattaattttttttttgtgtccttgtagacatttttctggtattctcttcttcccttaagtacgttgtagattatagaataatcataaaagtcaccttaatttaatagagatttctggattgtgctcggtaaaaatgttctaaatgaacatctatatgcctttttgtctcagttactcatacttgagaaaagtctaattactgaatctgtgtacctttrcagagataccactgttacctgataggattaggactggtgctcagcacgaatgatttttcattgaaattgtagcatcaattcttttaaatggtttaacagaagaaattgactctcaatgactctggtggcaattarggtctcatattgaacgaagagtattacctgtcattggcaaatgtatcaagttttctgcagtgtaaatttttaagcarttttgtttctctttgtcactttttgaaataattgttgataaaattgctgatctgataaaagtgagataggtgaatttagtagcattatataatgtcatgatataaaaaaggaatgatactatatttgatggtaaaatccatctgattttttaaacataatgctttgtataatgttgtaagcacataataaatgctcaataaatactttaatcaatgcttaaaatatgtgatatcaaattgaataatagatcattgagtgtcactgacaatttccttttctaaattaagatactttgtgaactatcaaaatatgacattaatgaaagtttagacattagaaaatgtttaacccaygtatttgtgcttatttttaaatactttaatcaatgcttaaaacatgtaatatcaaattgaataatagatcattgtcactgacaatttccttttctaaattaagatactttrtgaactatcaaaatatgacattaatgaaagtttagacattagaaaatgtttaacccacatatttgtgcttattttcctcytttatagaaacagaataaggcaatatacaaagtgccatttccttttattataataaccataatggaaatttcagtaaagaaagtataactaaagcagtaccttcctgaaacattgtaggtgctcaataaacagacttttctttgttcctattggttaatgcttaaccaaaatgcttaacagtatcgttaattggattccacaataatcatttgacatagagtgtactattaaccatcttcatgtgagaaaaccaatggtttggagatgttacaatgctaaattcagtatgtggcaaaatagagtctaaaacccagatattctaactctagattatattttagtgattgttgaaatggccattgcgaactggaaatgcagataaatattggaaattgggccttattctttgaatagtgttgtttgttttgagacagggtctctctctgtatcccaggctggagtgcagtggtgatcatggtgcactgcggcctcaacctcctgggctcaagcatgaatagtgttttatttttaaaatgctaacattcctaacattccagttaggaacactttaaagtcctttcttcagagcactgtgattttgggtattagttaactgatttgtcagtaaatcctcttctccttgctgttttaatgctaatttttaagacaggattgtttgyaaatgagacaaatccaataatctgtgcagattacccattgatttgattaaattgactcattgaccaactttgctgtgtgatattttagattaggtacttcccttagtagaagatgtggagacaagtcattatttgatctgaacttgctactttattacagtttcatgcatttttaaaaacaggagtaatcaaaatgacatgttgatgtaactggcagagttgattcctaaatgcacttgaagctagactacccattgttattttttgcactaaccttattattattttttccacctttggcaaaacatgtgagcttctagtaattctaaaatttctgatgaatgacatttgataagtggtgtgatcctgtgaatactgataagcactcgaaattcagttggtgaagcatcaatttcayacctgagaycccagttccaagtttaggttaaaggtttgcctggcgtccgcagtctttttctcaggtcccttgataagtgcagtcattccaaaccacatttttcttctgcatcaaatccaggcagcactcggaatcattaaatattaaaacttatattcagraacattattcattcataaatatttcattgcagcctaaactgcattgttcaaaacattttaggatgttatgcaactctgtcaaagtacattaacaaacttaagtcatgttgaactaagcaaaaaatgacagactgcatcacatacgtgttatagttgaatttttgtataggaagcattttgtgttgggatatttggaaattaccgtaaagataaaatggattgcagaggaagccagatataatgaatattcatcttctgtgtaacatctgctatacatcttaatgaaatttatagttatccctgaaatttttcttccttgacagtatttatttatttttaaaattattttaaccgggagttgaatatgagttgataccattctagctgcatataaaatgacagtattggatgcagggaccatttttcagatctccatgatagccatcatctccacagaattgaacttagacctcctgtgaaccatagagtaactgggaaacttttgatattcgcagagtgtaagagagtgatgagttcaagcattggtctctgacaaaatttgttytggattgctgtgaacacatttggtctcttgctgtttttttttttttttttttttttttttttacaaccctgttagttacagtgagaagccataaaattcttcctatgcaggaaaatggtagaagcattttttgtgtctaaaattgttctttcttaaaaagaaaagaaaaraatctttttctggtgtggtaacaaaaaattgaaatagcaaattcaaatagtagaaagtgtaaaaattcacaactgatgaggtgatagcatacttttttttggtacagtgacagtaatatagcttatgagctttatctgaagtaggtgaaatactgattatattttacttgagctatcattgacacaatggattagaacttaatgagggggaggtagtttgattttaaaacatccttgattacatagatttttttggaatggaggacagattaatcttcctgtgatatgtggatcaaaaactatataggcagccagtgggctcatcttgaacacctacagccgttctttcaaaaatgatagaaatggatattgtgaagtaaataatgaaggtggcatagtgaattcctgctggcagagagttaaattattcattttgttagtttagctaacatggttcatgctgcgtgggatttgagcactatgtcaatgactaatattgcataattaaaaagcctcagttcctcgggcttagaatgtagctggaatttagaaatggttgttaacatcgtggaaatatagttttatttgtataagtagatgctgtttacctagccgttttgaagttttgactttatgaaacatttgtgtagcatgtaggcagtatgccgaagatgtttttaacgatagttaatcttgcagtcccttccccttgctttgcgtcccaccccacggtgtttttcttcttgaaaggctgctctgtagtaaatggtccgtttcgaaagcctggtgagcacactccctcagcatcgcaccgctgcctcttccctttgcttatctcttccacattaggttgctgattagcgacagggcttggaaggattgccamttctgtaacgattcaatttgggggactgcataggcactgatacctttacaaagcaacgccgacattagtttattaccttctcaattttagcaactctgaagggaaagagacctaacataaacctcttttcatttttgtatgatataatcttacacacagtatttcatagtcagtcaattggactattttgttttatgcttcttcacggaatgtaattttacatgcatatttgtaactttgggataactttttagcactatttttgaagctcaggactctgtgaatggggaaaaacaaagagtggaaacacgttctgggtcacctggtagccasttgttgccttgtgatgtcaataactgcgtgtgcttttgcagttgctttagggccagttggatkgcagagcacgtaacagtgccctgcataaaggtccacagaagggtgggcttcattaggggaaagaagaaagatgagacatgtacatcaatgtttgaatcagaacatggagcattttactttgagggtcttgagctaagcgtttcggttcacataatcaagatatagcatagtgactagctatttggtttttttaccataaatctagaatacacattccagcacatgttttcctatgtgattttgagtaatctattgaacttctctaagctgtggtttctttagctctgaatggggactaacaactactatgtgggatttttgtgtggagtaaatgaaataacatacataaaacacctgttaaaatgcctggcacaaggaggtacttcacaaatggtagctattataatattattggtagtggaatattatgcatagtttttagtttaaatggtataatttgtatgttaaaattgttaatactaaaaataaaaaaatgaatggagtgagaaaatgaaggagcacataggcctgatgccttttgttaggatgagttggaattgtatgttattgtagacaccttaagagcaagtcctaggttttacrctctgtctcctgccggccaattccgcagcttcacactatggcctgcacattagattcacaaaaagtgcttttaaatgcacttcaatttcaggttacttcatttgtttattgtttttgtcttggatgtgaattctgaatggtaattcttcttgaagtatgtctatgatttcacttttgagtcaaagatggaaaatatcaagtgaggatacagcatagtgcctacagctaacaatattgtattataggcttaaattttagaagggtggactatatattaagtggtcttaagggagcggaaggaaactctgggaggtgatggacttgttaatggccttgatagtagtgatggcttcatgggtgtttacttattcctagactcatcaagatgtgtacattaagtatgtgcagctttctgtatgtcaatcatacctcaataaaatggttttaaaaaaagaaaataccaagtaagggaatgaacaggagttatcctaaaatgacagtaaagaaaatcctactgaatttcacattttttctctttctatacatgtttctaccattttgaggtgaaaattaaaaaatctagtatactgcttagtgtggctttaaaatcaatrtatttgtttttgaayttttttagtgtgatttcatagggaatactagaaataaaacatctgtcaaggaatgaattttttgcagatgagtagtgtcagagaggcatgaaattgattgctgtgatctaaggagaatgygctgtggagcaggcatggtgggtgctgatgttgtctgttggtctctctgtgtatgccaaggtgactttcaacagaaagatgagcttggtctaggggataaggccccttcaactcttggtatttcttttgaggttgtaaggagttgaggtaaaaaatatagggccatctttattcagaagtaagactgttggaaattgttttctaaggcctatgtttaactasctaataataacaattgttgtgattgtgttcaatgakataaaatttgattcttaagaggcgatttatccttttgctggagtgggtttcaagtagtttttcagaataaaattagttttgcagcatatattcctttggagaggggttgttctgttttctcatataacttcattagactcctagctttcaaaaacggatatcactcttccctcagattggctgacctttacagcaattggcggtgtctttctctaacatcatagaataggtgctggccatgaagtttaatcttgaacttacttctgtgtaatgtttactcaaagccatgctctgaaatataggcaatccatttatttcttgattgtctaagacctgtcttttcattatgtttgattattattagtgagctacaaaactggaccatgttgttctgtctctctatatcaaatttctcttatttgattgttttggtgttcacagttttcatcctacatatatagaaagacttcatatagtacttacagtgagtgggggagggggctatgttaaacctcaaggtgtctttttagaaaaatgtagcctatagtgaaaagatggtacaaggaaattatttccataggaactaatgtacagtgccccagattgccctatcttgcactttttacttattaactctgccctaaaattctttaagtaaycctttaatgttaaaacattaagatgaaatagacattttaaaaatggagaggattctgggagttggagacttgaagcatctctgcaccttctgctatcaatttcagtctcgccactagttgctgtttctcagaagcacatctgacgacagatgtgagccattgggctagttctggcaaagtgcmgggatcaacagtgttggccccagtctctgtgactgttcctgagataaccttttggttttcatgtccctgtcaactggtttgggtgggtgagggatggggagagactttctccaggttttcttaagagggggctgcaaactcatcagctgstggcataccactgggcctcagcagcagaggctgcctcatctcccaccacttagtggatccttccacttaaggcagcccaacagtgggacctgagctctggtgcgtaggcagatgaaaaagaaggggtcatctatggggcacagtaggcggagagaaagagacaaatgagaacttagaagaggtgtgtcttggaagaactcttggaatagttcagtggtgctttgatgtttgtagcattgacaacgattactacttgattttaatacaccctcaattttaagttgcattttgatttcatagatagtgaagagtagaagaaagtaacttcatgcatgttatatttgatgaattagactaaattccagaaggagataaagggaagagtttgagaggaggtgataattatgtgatataaaacatttcactgagctgaagaaaactggagtctgcaaattgaaaggactctttattctaggaggcactgatgagaaaacatgcacacctagtcatagacagctaaaatttcagaactctaaggataaagagaaagccttatgaacttccagatagaaagaacactaatttataaaggaaatgggatcagcctgggtttaggcttttcttctgccagactggaagctagaagatggaatgacacctaaaaggactgcaagcccacaattctctgttgagctcttactcagctgttacggtgaaaaagaggaccattgatatgcaaggatttagaaaatttattaattttaattctagcaggcagagtccattaaggagatcaaacacaccagttatttttatagagagaatttaatgtaagaattgttaatgaggcacttaagagctgaaaaggcaaaaacaaacaaaaaaaagtaactctaaagcagtactgtttaacagaaatattatgtgagcaatcattgtagttaattttctactagttctgtcacaagtaaaaaaggtagaaataattctggttttttctcagtatatctaaaataataacataaggagtataaaatttattttcataccaagtgttcaaaatccagtgtrtattttatgattaagcaagtcttggattggactagccacatttctgggctcagtagccgcatgtggctaatggggactgtattggacattgcagctccacagtatctcagatgtagcactgggggagcaatgggaagaggtagttgttaaaacattaaagcttggaggagaggctctgtgggatgtagctcagacgtctgaggaaggggcatttcctagctggtagactgctgtcatggagctctgaggagagacctgtgggtctgggactgagattttcaagagtgtgccagtaggtagggtcagtgtctccagaatggggtgcactgaggctgattttgcaagcagacttagcttgaacaaagtgcagactcaactgctgctgctgcaggagcaagtgctgctgctgctgggaagcagtgaggcccgagtgacgcgataggaagcaaatgggaaacagctccttgttcttccaccagccttgcagtttccctctggcttcccttgatgggtcctagtagggacccagctatgaagcagaaatgtgtttagagaccttgccttccccgccagctccacatcatgaagcagagagcagaagaggggtgagaagctgagagtcgtagccaaatgttgaacacagtagtccatcttaggataatacttaaaaaataattctaaccaaattaattacaacagagacttccatgtaggggaagatggagaggaggggaagcacccctgaggatcagtctttgccttgtgtacataaatgatagaccaggattgtctcataaagtgctaataaagattctcgaaattgaagaaaaatccttgaggaaaaaaaaaactaagagttttatgagtttcaaagtactgaactcttagctcagaattgggttgggggaaagtcaaagcattcaaacgatttcatcttactgggtttgctggagtagtgtttgaggaaatagttggaactgtgtttttaaacaacagtagagaaaagagtatgagattttttggtgggagttgggggagggtatggtaacttgatacaaccaggaaaatgaggaaaagggaaaaagtaaaattaatattaaacatgatataaaatggaagaaataagtatatcagttgtactgttaataattgtgactgggcacaattacccatttaaagatcaaggctgccacatgcacaataagagctatgtatttatatgaaatgcagttaaaacaaagtaatttgttttaaccttaataaaggttaaaaattaatggattggcaaagttgtgccaaacagaaagaaatatgaaaaaatgtacaatcaaagcttataaacactaaacagaataaagaagcaaattatgtaatgataacaagcacagtttataaagacagcagccattaacctttatgcatcaatcaaattagcagctcaatgtaagaatcaaaaatgattagaaattcaaagtctagttgatttacaaaaataataagggactttgtataattattttttccttaaaaatgtttactctggcttcatggaggagcatgctaagctttaacatttagcacatctagtataaaaagagacagaatgagttaggttgtgtgtgtgtgtgtgtgtgtgtgtgtgtgtatgtgtgtctgtgtaggggagcagaaaggccactcacatccacctctcagctccacatctgagaagctaaatgcaggtatagggtgagaggttgcattttggttcaagttggaaggtcttttgaaatcaaaaagaagaggagaattattgattgttttcctccatagggcttacaatggtaatgtcatctctttgtctggcctaaggtttccctagccttatcaatgaacataatttcaaaattcgagtcctggcaaaaacgtgtcccttrtgaaaaagaaacgtaagtgcaaaacaatgtaaatgatgtatgttttgtctacagaagtgtactgagattctcayrttatttcatagcttacggtcctctttatgagaccccacccatgtctctcaggtcacggaaccaggattattgccctagtttctgtcttcaggaggaagccatttcacattgtcatctgtccagggctcaagctgcccatcttggatggggccgctgtttgcgggaggagttgatagttggcttatgaaagggatttgcccagagatgtctgcatttgaccttaggttcctttttcttccagctgacttcatgattgtctagctccagcatcttagtaaatacatagcagcagtgcccattccagtgaaggatgctacaggggaggatgcatggggaggagtatagatattttctaaacaatagtaataggtcaagcatgagcatttcctcccataacttctgtaaaacaggttatttatttatttattttttgagatggagtttcgctcttgtctcccaggttggagtgcaatggcgtgatctcggctcactgcaacctctgcctcctgggttcaagagattcttctgcctcagcctctccagtagctgggattacaggcacccaccaccacgcccggctaatttttgtatttttagtagagttggggtttcaccacattggccattaagccctgctgataagacacagtttaatggtggtgtctttacctccccattcccaccattattcacccgtatattgaatattatgacatttgatgtgtactttaagataaaaagctgatgatctcggtttaagatgcctctaaatattcagttcaagttagacaaagaagtggccataggtcatttcagtagaggaagacaaggatactttgkggtgttgkgtaatttcctcctaggtagttttggttgtgaatttctgararagagtgggtscaggasccatggatataggaacattaacttatgaactaaaatcagaatacttttcaaatataaatgtatttttcagtgcagtaggagaaaatatttaagaagaaggtccaagagcatccaggacaggtggtacttgttcccaaatgagaactgaaatagggactttaggtataaagtaatatacaatgtgtaaatgggaggcaatcatctggaagggggagatgaaagctagttaggattatggctgtaggtaatccataattatagtcctaggctttcagttatgggctgagttttttttttttctcttgcatcattttgaagctatgcaggcatatttccagattgcaacaaaattttattgtgaattaaaataaaatcaccttttctmtgttcctttggaaaggaaggaaaccttgacttaaattctgagtgccattttcaatgctatttacacagaaatgtagatgaccaaaataaatgtcctcttggttttattcagaaccaggacttaatgctggttaaatacagtcctcacttgatatgcatggaggattggttccaggatccctaaggattccaaaaccctcagatgctcaagttccttatataaaatagtatagtacttgcatataactggtgtacttcctcccgtatactttacatcatctctagatgtacttacaatacaatgtaagcactatgtaaatagttgttatactgtatattaaaaatttgtatttttaaaaattgtgttactatttttttattttctttatttttttaagagacagggtttcattctgttgcccaggctggagtacagtgctgtgatcatagctcagtgcagcctccaaatcctgcagtcaagtgattctcctgctgtagcctccctagtagcttggacttacaagcaggtgccaccacacctgactgataaaaaawtttttttttgttagagatgggggctcactatgttgcccaggctggttctgaactcctggcttcaagtgatcctcccacctcatcctcctgagcagctgggattgcaggcatgagccactgagcctggcttttattatttatttttccctaaaaatttttgattcccatttggttaaacctgtggatgaggaacccattttatttaatttattgctaaattaccattatgtaaaatatatattgctaaataatcattatataaagagtacctatgttccataatatttataaaaatatgctcacactctgtattcattctttcaaaatatattttgaatgcttaccaagtgccaggtattatttaatgtggggattacaatggtatataagacaaagttctacccccatgccacttattttaatggtatctgtatatttgtgtgkgtgtgtgtgtgtgtgkgggkgtgtgtgtgtgtgtattttctgtaagaatgcaggctctgaagttgggctgagtttaattctggctatacctctcactggttttattttgggtaaatttgactatgggtaagtttcttatgacccttgaatgacctgagcgttaggaacactgatcccttgtgcagttgaaaatctgtatataacttttggctccctaaaaactgaactastaatagtcatctattgaccggaagccttaccaatagcagagtagattaacacatattttgtatgttatatgtattacatactgtattcttacaataaagtaagctagagtatagaaaatgttagtaagaaaatcataagcaagaaaaaatatatttattatttattaagtgtaagtagataatcataaaggtcttcatcctccttgtcttcaggctggagggttggttagtcttgctgtctctggtggtagaggcagaaaagatgaaaggacaggcagacatattatggaaatgccttataatttctgtctgactttttttgctttttttagtttctctaaaaatgtttctacatggtaccagttctcctcccactgtttgctttagtttcagtgactatatcttagatgggtccctgtcataaaataagtcatttgtagtcttggataatctgaacccttgtgccagattgtctaatgtcagttgtgttctggcactgcttcttctacatcttctcatygtctggcgctgtttcgaargcactcatcaccataatgtcgtccatcttctgttaattcstctggtgtggtgtctgttagttctggaatttctccaaggtccatcttgaagcccttcatctcccaccttttttggttatattcacaatctctttcatgatttccctggttgactctgttgtaaatcatgtgcaatatctggacacagtttcctccaggaggagtttgttgttttgggcttgatgactttcatggctttttctktaacaacagtggcatcttcatgaggtaatcctttcagacttcatgatgttctctctgtccgggttctcttccatagtgttgacagtccttttcatagattatcatgtctgatgaagaaaggtccttatgatcccctaatctataggctgaaataaaaacattctgtttgggggtaagtcaccactttgatgtgttcaatattgaagtcatggggttctgggtggctagaggcattgtccaatatcagaagaactttaaagggtagtcctttactggcaaggtattttctgatttcagggacaaatcattgatggaacctatctagaaaataggttcttattgtgtagaccttcttgtacaaccaaaagactggcagctcgtgtttatcttttccctatgaggctcaggggttagcagctctatagataaggacaattgtgccataaactcaactgcatttgcacaaaactagtagagatagcctatcccttcctatcttaaatctttgtacttgcttctcttctttactaatrtatgtctttcatgccatttattttctagagtagggcacttttgtctgcattaaaaatctgttcaggcagttatcctttcttctcaatgattttcttaatggcatctgggaactggtttgctgtttcytggtcagcagaagctgcttctcctattatcttgacatttttaagtaaaacctctttctcaaattatcaaacyatcctttgctggtattaaattcgcctttaatctatcacataatggagacttgacttttcctcaaatcgcattagagtctataggtaagcctttcctttcttagcaatccagcactcatatagaagttgwattttctttttttttttttyytttttyctttttctttttyytttttttattgatcattcttgggtgtttctcgcagagggggatttggcagggtcacaggacaatagtggagggaaggtcagcagataagtgaacaaaggtctctggttttcctaggcagaggaccctgcggccttccgcagtgtttrtgtccctgggtacttgagattagggagtggtgatgactcttaacgagcatgctgccttcaagcatctgtttaacaaagcacatcttgcaccacccttaatccattcaaccctgagtggacacagcacctgtttcagagagcacagggttgggggtaaggtcacagatcaacaggatcccaaggcagaagaatttttcttagtacagaacaaaatgaaaagtctcccatgtctacctctttctacacagacatggcaaccatccgatttctcaatcttttccccaccttctccccctttctattccacaaaaccgccatggtcatcatggcccgttctctgagctgttgagtacacnnnnnnnnnnnnnnnnnnnnnnnnnnnnnnnnnnnnnnnnnnnnnnnnnnnnnnnnnnnnnnnnnnnnnnnnnnnnnnnnnnnnnnnnnnnnnnnnnnnnnnnnnnnnnnnnnnnnnnnnnnnnnnnnnnnnnnnnnnnnnnnnnnnnnnnnnnnnnnnnnnnnnnnnnnnnnnnnnnnnnnnnnnnnnnnnnnnnnnnnnnnnnnnnnnnnnnnnnnnnnnnnnnnnnnnnnnnnnnnnnnnnnnnnnnnnnnnnnnnnnnnnnnnnnnnnnnnnnnnnnnnnnnnnnnnnnnnnnnnnnnnnnnnnnnnnnnnnnnnnnnnnnnnnnnnnnnnnnnnnnnnnnnnnnnnnnnnnnnnnnnnnnnnnnnnnnnnnnnnnnnnnnnnnnnnnnnnnnnnnnnnnnnnnnnnnnnnnnnnnnnnnnnnnnnnnnnnnnnnnnnnnnnnnnnnnnnnnnnnnnnnnnnnnnnnnnnnnnnnnnnnnnnnnnnnnnnnnnnnnnnnnnnnnnnnnnnnnnnnnnnnnnnnnnnnnnnnnnnnnnnnnnnnnnnnnnnnnnnnnnnnnnnnnnnnnnnnnnnnnnnnnnnnnnnnnnnnnnnnnnnnnnnnnnnnnnnnnnnnnnnnnnnnnnnnnnnnnnnnnnnnnnnnnnnnnnnnnnnnnnnnnnnnnnnnnnnnnnnnnnnnnnnnnnnnnnnnnnnnnnnnnnnnnnnnnnnnnnnnnnnnnnnnnnnnnnnnnnnnnnnnnnnnnnnnnnnnnnnnnnnnnnnnnnnnnnnnnnnnnnnnnttaggagctggagaccagcccggccaacacagcgaaaccccgtctccaccaaaaaaatacgaaaaccagtcaggcgtggcgccgcgcgcctgcaatcgcaggcactcggcaggctgaggcaggagaatcatgcatggaggttgcagtgagccgagatggcagcagtacagtccagctttggctcggcatcatggggagaccgtggaaagagagggagagggagaccgtggggagagggagaccatggggagagggagaccgtggggagagggagaccgtggggagagggagaccgtggggagagggagaccgtggggagagggagaccgtggggagagggagaggagggagagggagagkaggagcctttccgagaagttgtattttcaatacaagattaaaargtatttctcaaaacatgcaggggttttggacctgctggcatagctgcattgaaggcttcgtgaattttcttttctttttctacaacagtccttatgctggattcacttatctcaaagtggcaggaaactgcagctgcagacctcaatctatggtacttaccaagcaattcaacttttttttcctctaatgtcatgacttttctctgcttctcgggagcacttctagcatcactagtgacactttgtatgggtcccatgatgtgatgcaaagttatggtattgtaataaacaatgaaaaatacacgagaacctcaaaagatcactttttactgcagtatgcaatttactggagagactaactgctcactcgatgattagcatcacagtgtgttaagcagatactcgtaactcctgagctcgctacaatagcaacaggaggtgcctactgaattatagcaatacagtatgtactatagttaattttatgcagttatgacttaatactgcatctttacctctgtttacgtttccgtccactgcagatggtgccatgtacagtctgtttgtgtgcatacattttgatacattttaactttttgtttgagatagagtctcggtctgtcacccaggctggagtgcaatggcgtgatctcagctcactgcaacctctgcctcccgggtttaagcaattctccttgcctcagcctcccgagtagctgggattacaggygctaccaccatgcctggctaattttttgtatttttaatggagatggggtttcgccatgttrgctaggctggtctcgaactcctgacctcaggtaatccacccgtcttgcctcccaaagtgctgggattacaggcatgagctgccgcgcctggccaattttaactttttaataatagattcgtatatattttatgatagtgaatgataaaactgaccagaatcaacatattttatgcattcatgacatactttaaaaatttatttatatttatagatatgtgattcatctgtgagttttatcaaattgctacaagtcttcaaaaaaatgttcaatatatttattgaaaaaaaaatgcacatatgtggttctacacagtccaaacgtgtgttattgaaggttcagctgtacttaaaagttctgtaggcctcaattttacataatttctctgtgcctcagcttttcatccgaaatataattgatttaatagggttgttgtgaggattaaatgagttacacccatcaaatgcttacagttgtacctggtacgagtaagcataataaatgctaactctttttctgtcacacatgcagatattatatatgaatttaggctgggtgtggtggctttcgcctgtaatcctagcactctgggaggctgaggtgggtggatcacctgaggtcaggagttcaagaccagcctggccaacatggtgaaaccttgtctttactaaaaatacaaaaattagccaggcatggtggcacatgcctgtaatcccagctacttgggagactgaggcaggagaatcgcttgaatcccggaggtggaggttccagtgagccaagatcacaccactgcactctagcctgggagacagagtgagactccgtctcaaaaaaaagaaaaattaagatgccatattcatgtttatgtatttattttggaatctcaatccacatatattttcttccaggatttgaaacgatttgagctgagaagtgttaagcttctctgttcccttatttttgtcaagtcttattaatcaaaaactgtatacgtgttttgtcmttatttttaatagtctaataattayttcattgaattacccagcttagctcttctgtttaaaaatggatggtaaacagtatcttgaatgctggttcggcaggttctgacaaaatatgatgygttaaaataaaattcattgttagcattaaaatgacctttgaggttgtcgtcactcatttttctctttcagtgtttgaaatagcctttctgcatcaagtgcattgcagtatcttgtatatattgcctatgtataacggtcacggttcaactttagataagtcatttagtcaaatcactttatctctagcaatctccgtttcccatttattcttacccattatctgaagttcttatcaactttctctccatagtgtaatggccttatgtattacatttataaagtaattttctaagctagaattgtatagaattacttatgtgtcaacctacatgaagataaatctgagtatttgtgaatggccaaatgagcagtatccaaattcagaaaaacatttagggccattaaaagccaaaccactttgggaaaggggtggtaataatttagactctggcaaactctgacttagtgtagtatacacaaattttaaaagagcctattttaaaataaccgtgaataatgtaagatttaaaaactgtccttacatgaccacaaaggtgagtagtataatggaaactaattcctataggaaagtttactctttaagatgtttaagaagtatgactttggaagtcagatcaccatctttcacacctctgttgtacttctcagtttttctcatgttaaaaatggagatagtagctggtgtggtgacttgtgcttgtaatctcagcactttgggaggctgaggtggacagatcacttgagcccagttcaagaccacttgagcccagttcaagaccatgtggacaacatgctgaaacctcgtctccacaaaaaaaaaaacaacccaaaaatcagccaggcttggtggcatgcaactgtggtcccaactgcttgggaggctaaggcaagaggattgcttgagcctgggaggcagaggttgcagtgagccgagatcatgccactgcactccagcctgggcaagagagcaagaccatgtttcaaaaaaacaaaaaacaaaaaaactagagctagtaatgcctcccttatggaggtgaatgaagttcaatatgttaatgccttgctaaagttatctttaaaattctctttctactttcttaaaaacttgaggttctttagagtaaagtcaaactggctagtttttaccctgggactaaaatatagagaactagattttatacctgctgtccatgaaagttgaatgttttataagtagttaatttgttttcccatttaaaaggacatgtaataatatttattataggagatttggctggcttttaggaattcattttgctggtgtaccttaagtccctcgcctgattgacaatatactgaggaaagrgctaagttgctagggcttgaggtctaagggcagcactgactggtatttgtttcattaagcttaggcaagctatccaattacttaatgcaaacaagaaaagtttacactaaactcctacttctttgcttgaaactctagagaatttaaatgaggagagatatgtatttaaaagaaagaaatttaaatgaaacttaaatcagggacttaatgtagaatatattagagcaggagatctaaaatattaagtgggaaatgccaataaataaaaaaggaatgtattctctaagatacttggcatgtttagttttgttttgagataattcttaaatctttggaaacccaagttaataatgagagacttattttatctcctgcctttacatataaagtcctgccttcccttggtcagtgagagcctgggtcttctctccttagtgaagtgttcccaaaacaacatggcttctgattttatagctccactatctgggcagtagttttcagagaggcccagatggcagggctgtcttatttggttcaaaaagagaaaaattggttgacagctcatctaccttttgcagatggctgttgaatagtatagctccatgcggtataaaaccaaggggccagagaggaagctttgaaartaattgggggtttctgaaaacataagcagtttttctttgcaaagtggttttggctcagtaaagaatttacaggaaccattgaaagaggaaacttagaagaaaataattgccatgcaatattttggaggggagggttggggaaatggagaatggtacaattttgaagtttcaaatctattgcttttaaatgggaaatggtacaacttagaagcttctcatctttgggcactggtcaaaactgaacctcagtcagtataccattgaaactctgtcctccaagagaatctgaaagcaagtaaaattctttgcagaggtgatttcatgcctcagagacccttctaagtgtcacaggaatctaactgaaggaaatcctttcttggtgcttctggacccaactgatgtttcctctgcctaagacactttctccttccccatgttgctcagttaatgtcctgtagagctcaagttaaatatcagtcccacccatgcagtgtcatagatacctacctaactttttaaaaataatgcatctgttatttgtaatcatggctcatgaaagtagggactgtgtctcttgctcactacttcattctcagtaaccagagtagtccctttcacctagtaattatatactgaataaatttatgaattccagtgtgtagtttttgttgagtactgtagtgagaaatctcaggattacagtagaagtatatgtgcccatcgagtagaaattataacagtatcaasctgggagataatataatgcccctctgttttatttatcccctgccaccacctttttcaagattttttatggaatgaggaataatatgtttaaggtatagactttttakaatgtttatatgcaaaggaccataagattatatagtagttcaaccttcaaattttaaaactgaggaaactgaggcttattagattgtacagctaagttgttgataggaaatgagaatttgttcagagtcctactgccaaactccctgatgacaaaaaatttggtttcttaaacagtcaccatacagaccttaaaaaaagtttttttaaaatttataaacattcctttaaaaacatttgagaatttgtgcagttctatttgtaaggatgaatgaaagtataagaatttattaagaaaggaaaataatattctttttagtcagtttgcaccactgccaatcctctttcaatccaggtgtcaaatatagttaggtgttgatgttggaggggctctggactgttgtggcacctcctgttgtaggctatttaatgtagcctgggattatatcacagatgtgccacatctaacatggtggctargcccttggaggatacagtttgtctcgttagttgtttcttatatrccatcgccttgtgttcttttgcagtttgttttccttgttttgtttgtggttagaaatatgccatttatttatttattcattcattcattcacacatgcatacatcaacaactttttcttgcgtgtttgatatgtggcaggcacttttataagtatgggggatatagcagtgaacaaaaatagggcaaatcgttgtccttatggagctatggacaagagggaaaggaagcagcttgtgaaaggktctagctgctggagttagtagagtcaatttgtgattttagaagtccttagagatcataaaaataaagcagaatttattggtgaaaaattggaaaagatgatggagatggcattgtagttagtgaatttggagattgtcttcttcatttcgtaaaatcactgctttctctgtattcctacccgcatagtgggtactattattattactgctacttacctaacatttattgagtgtatattatgttatgggcattgtgctgagtgccttgtttatatagaacgctgtaaggtaggtattacactatttcattttacccatgagaataacaggactcaccggagattaaataaagtacttattcagataggaagtttagagccttgatttggacccagagtttgcatatctgtaccagtcatggcaagctaaatatgtttatttttattatcacattgaaggcttttgtgctcatgttttgcttctttttcattaacttgccaaaatccttatgatcctgtatttcttaaagttgaaccatgtagaactccatatgtaattaaaatctaagcyatacataagtaaactaaaatggaaaaaaaaagtagtaatttttaaacagtactttaaaattagatacaccaaatgtggtagatgtgataattcagttgwacagaattcattttatgttcatgaactaataatagaatttgaataaacattttatatatgtttgtaaagtgcctagcacagtgcttagtagttgatccataaatgatagtaattttattattttattttagtttccacctcactggtaaaaataggtaatgcttttttacttaggggtaagatgtccatacaaatgcgttaaatacagtattgtaatctgatatgataacctcagcagttatttgcacaatattctcatggggagcacttcatttttgatgttactttcatttacctccaggatttatttgagtacaagtgtattttggtaattaagggctgtagtcttaaactttagcatgcatcagaattctagagggcttatgaaaagacagtttgctaggcactatccctagagtttctgattcagcaagtgtgggatggaatcagagaagctgcatttctaacagactcccagctgatgctactgcagctggtttgtggactgtagttttagaactgctgttctaggaagtggtgtgacttctaattattgctgttctcttacaattacacatatccagtggtgttaatgtgttgatatcattgatgttgctgaatttattgtatggtccttgtgaaataatttagagaaatttggtttgtatgagtgtcattgtgcttattgcttaggaagtttcccaaaggttacttttgcattagagaatttcgaaatacagattttaasttgtttctagtcctctttttttttatttaagacacaaaactacacagctttgatttttaggggaaaaggatgataactttggamtatatctcacaaggtgacttttttttttctgttgtagttgatttctgagaattccagagtatcaggatgatgtagcaatttaaaaatagtaacacaaaattttatctctagtttttttcaaaaatctttttaaaactaaaatttgataagctagtactgagtagaatttggtgctcatcattcacacgtataaagtagatttcactcagaatttcacttacaccaacataacaattttacttttcctttttaaagcatagctataccttcagggatatgatggtatagtagggttattctctcaaagaagaaaaggcagtcagaaaatctttgttcatgagattagactgaaatcttcagtgattcagtgattactgaatgcctctatgtgccaggcactatggcaaaaatcagtgccaaagtaatttatctttatcatgtacaatgaggggttttagtgggttgtaacttaatatgatctaattgtgtgatgaggctactgagaaatctaatgcaatcttatgcttcattaatagaattagtattgtgtacagatctagggaagtaagattctcctgtcttagtttgctagagcatgtctggagggttaggtttagtttggagctaacagatcgattggagtcattccagaagtgaggagccctgcagttgaaaggcgtggtcatatttgcatatgaggattgttggaaaataggggtaatatactgggaggaaagatgtccttattagttccataatgtctggcttctctgctgtgctgtaacatccacaatgacagtgacctgtccatcttgtttatcgctgtgtcctcaatgcctagcacagtgcctggtgtgcattcagtaaatggacgagttgagtaagtttggagaaagagacgatggttaccttcaaatatttgtcatgtagatkgctttttttttttttttttaaacggagtctcattcgcccaggctagaatgcagtggcatgatctcagctcactgcrtcctctacctcccaggctcaagcagttctcctgcctcagcctcccaggtagctgggattacaggaatgtatcaccacgcccagcgaagttttgtatttttagtagagacggggtttcaccatgttggccaggctggtctygaactcctgacctcaagtggtccacttgccttggtctcccaaagtgctgggattacaggtgtgagctgccaccacgcctggcctagatggtttgttaattacttaaattttcagaggccaaatggaagcaccagggatggaatttttttggtgggcagattttaattttacataagaagaactttgtaaaacttagttatatttggcagccaaattaataagcttcttcatgtatttgaatttggttatttgaaatgcttgagtggaggctgcatggggatttacctctatacctgcttttttgatagattatgggccaagatgatttcagctgttgacctttttggctatgtgtttctatttttaaattatttcatttgatagaaaataatgtcaactaataaaatattttttctaacttagacaattcttgtcattttagactaaagcaagccaaagagctggaccgagagagggctgctgccaatgagcagttaaccagagccatccttcgggagaggatatgtagcgaggaggaacgcgctaaggcaaagcacctggtgagtattaaaaatgtaggagaaattttcttgcctacaaggaaatctctgatgtttgggaagagctaagtactctgtgccagcttttagtgttgataatattattcatgttctctttgctcagattttgatttttgccttttataagtagcttacagtttaggtttaaccatcaaggactttaaaggcaggtaactctggaagtattgaagaccaacatgcagacatgtgtacatgtttcacacctgaaggattgttgtctgcttttttttctttttctttcctttttttttttgagacggagtcttgctctgtcgcctaggctagagtgcagtggtgcgatctcagctcactgcaacctccgcctccggggttcaagtgattctccagcctcagcctcccgagtagctgagattataggcacctgccatcgtgcccagctaatttttgtatttatagtagagacggggtttcactatcttggccaggctggtcttgaactcctgaccatgtgatccacccgcctcggcttcccaaactgctgggattacaggygtgagccaccgagcccggcctgtcttctttttttgtcctttgcctttggttttattgtctttgaaacctcaggggtcagcaatgtaggcttctttctctcgtggctggcaactaccagatgttagtctggaagactctggcaaaggtgagtaaggtttgatcaatcactgcctggggtttagggaagagaaaatgtagagccagggccttggggaacagtcttttctaagataatttttttaaaaagaaaatattttttaatcttttaaaagattacatagacatgtttttgttgttgtctttaaaagtattacyaacagacagaagaaggtttaaaagacacccatcaatctgtctttctgatataaccatggtttacaccagtgtgtgttttcctcgagattatttttttctaggctttttaacatattgaaacatttagataatgctatagatggtgttaagcctcatgaacattttcctatgtcactgaacatttttctgaaatgtagtttttaatggctgaataatgttctgccttttgtattcaacataatttattaagcaatttcttattgttatttgatagataaaagtggagctgctctgggtgaaacctggagtgttgactgcttagcctccacttcggccttcctagaaacccagatgttactcctcggaacctttagtcctcattggagcacagttgggaactcactggacagggaaaatgggaccatggaatggagaactttgaactgaagagtgagggggattttcctagttcactaggcaattgggaaacactaaaactttctaagaagaaggctcatttctagtctctcccattctttaccttagtcacttctctgaaagaccaacccatgaccagctgcaaacagagaacatgaaaggaagtccatgcgtaatgaatcagtttcttcagtgacaaatctggggtcccggttgcatgggcaaatagtgaagccagaatagaggtggtagaccaagaaagaaatgtcagtggactgactggcagctgccctaagaacagtacatgtgttgagtggaacaaagggaataagagaggtggaagcaaagtcagtcattgtgaaaggggaataatttcagaattaaagacagtaagttttgagtaactcaactgaaaattaaatttgttgtacgtctaagctgaaggattttttgaggaagctgaaaaaatatcaggtcagtgggttgaaaagtcatttctatgtatattaaagtctccaaatttggaagctaaggatktagtggaggaggttaatagtgctcatgtttgaggaaggtacgagagcaaaactcttagtttccagcgggcagaagaataccttggttggcatttctctttgcctcccagcttttactcttttgaatcttatctttgaagcactctttctccacctctttttgcctgaatttggacatactgtcttactctcttagtttatggagaccagcaagattcaaaaactcaaaaaactcattaaatatatacacacactcagcaagacataaaaagagatttcacaaaaaaatgtgaaagtatcaaaagatttgttactcaacataactaaaatattaagcaacatgttttgattggaatagcatatctgcagtctgttctgttttacctaataaatcttgtctattgwctgtctttactgctttgtgtagctggtgaagcatgagaaactggcctcgtacattctgatttgtagatctcttatttacagattctggttgtgtggtatagatgacaaattgtagtactcacaactcctgtatttcagcatctgttgtaatatttgccaaatagagccctcaaagcacttagggaataaaagtggaatttatgccataggatgacagctgattgagagagtcccttccttcccagagtgttgtcagacatttgcatggtctgccatggccacagcaacatggctgccagtgacatttagttattgggcagttcccaatttatttaccagatttctccctttattgttgttatttattattatggaagacatacatattcattggatcaagattagaaaataaatacaaagrgatactaaaatcactcaatgtactacaattcagagatagttactgttaacattttggtttgttgtgtttatattcctttttacttcccactgagttggtataaaacatttgattttatgtgtataacggtatttctccaaacatagataatagtatacactcttttgtataactgttacaataaccttcacattaaaacatttaggccatgtggtaaaagtttttatactgataaatacgtttttgtgtggtcacattttaatggttgtgtttcactgagttttccactaattactaaattaatacaagaatattatagaacacttggaaaacaaaaaattacaaagaaaatcagtattgttataattctgtcatctatcattaakgtttagaggtataaagttctttctcccttccccatatgtatatattttatacatgctttagggtctcagattatgtatcccaccaccctccaaaccagtactgtgcggtgtggacagtgatcgcaagcctgctgttgtttgttagttccttgatccccagctggagaggtgggcatcttcagaacccataattgatgtgggagtcaccccagaaaggttagcattgctcctgctattttggagggcccctattgctgccattcttaattctaatatgtgggactctttgagtaatggccaagcattgcttcgttcctctttatttagaactcaaatgttgcagtctgcaggaaagtaaagattgtgtttcacacatgtgaagtaattaaaaagttgtctttcaggagagcgagggtgaaagcacgggagctgatgtgatgttgggactgtgaaataaaacgattcccaccccttaccccacaccccccacatctttctggctcactaacagctgacatttaggtttctgtctccttagatgtgagtccaggctttttcttcccacagttgttttagcagctagctttattgaagctctttgaagggcaaagtcatgatggccctgttgttgaagttttaaaataggatcagatcaaaactttcccctttggaagaattgctttagctggggaagctgttaatcccactctagattctggaagagtataccagccccttcctctactcagcactgagtgatgccagcattttaatcagttgactttatccagaggctttggaagaggcagtctactgataatgattttacctgcatgaaaatgttaaaagcaactcacgttcaaaatatgcttcttaggatcaggaaagcacctctgtagaagatgaagactgactagaaggacaggaccagggaatttgtaaagttaatgcaacttgatatgtgtattgtaaagatcttatatacgtgatctaatatttgctgtcattagattcttttttgaaattgaagagtagtgagttagtttttttgactttgcagttatattttctttttaaaattccagttaaaattttgactcactcttttttatgtcttactacattatgctggtttaatgttagatttttwaaattttaattatttttaaaaatttaagtagagacagagtcttgctatggatcttgaactcctggctcaagtgatccttctgccttggtctcccagggtgttgggattatagatgtgagccaccatgcccagccacatatttcttgttmtcatcacagaactatgtagtattttctcttcttttcttttttttttaaatctaaatgttaaaaagaagtctcaatttacttacttaaggcaatatttacttcaaaattcttccattactctttggacagatgttttattgagtgcttactgtatgaaatttactatgttaggtactaatgatctatgaataaaagacaaaatcttgtccttgaggaataaaaggtaaaagatacactaaaaataatgtttaaaaatgctaagtctgttatagagccatgctacttatagtcttgtgaggattcccacttttgggaaagccaggactttgtctttcttttaactaattgctatgtttgcatttatttattcaacaygtaattgagtgcctaatatatgccagtgctgagcaaacagtaagcagtcaatacatatttgttgattgaataaatgactgattgcatctactgaagccctggaaataggaggagaggaaatggggaagaatagaaaagattttctggggaaaggacccctgagctgactcttgaagtatgagtaggatttgctcccaaggttgaggagtgggatgaaacagccttaggtattgcaggcaaaagcttggaaacgtggrgatagggggacactactagaagttgctgagtgggaatcattgtggcagttagaacatagtctgttctttaagtgggtgtgtgtgtgcaggggattcacgacttaacccttgcctggcctggccctaggtcctgtttataattggtacctgattgccacaaaaagcctgctttgtcagtcttgtggtctctgttttaacgttaatgctggtcaatggttgtatctaaactgtaaaagagagggtgtataaagagacatgtccaacctcctatccctttatggtcgagacctcagtttttaagtttctctgaggtccccttggccaagagggggtccatttagtcagtcatggggtttagggtttgatttttagcttacactctaatgaagtatgaagggaagagcagaggaggaaatggctggaagcccagagaccagttagaaagccctgtgttaatccaggtgagaacaggtagtacccaaattagggcatggtagcagggatgcagaggaaagaagaggagtaggaactatttgggaggtagtattactaggattttagctttgaagggttgagagaaatgtcaagcctaactacaagcaaggtttctagtatcagtaacttcatatcatttgaaatacaaaaattagcaatcaatgtaaaaaacgtcctgggctaagcatagcrtgaagtctgacttcagtgtagcattgaggagggtcctggcctcagatactgcaccagttgtttgttcagctctgggcaagaacattagtcagatcattaggtatttttgtccctttctgcattgtccttcgtcatatatttattaaacacctactgtatcctaggcagyatttcccagggatgcaaagatgaattagatctggttgcttttcttcagagtctgaagttaagtgtcaggtttgtggggaaggttattcttgccttgtgtattttgtcccaacttaagctataatttttgaatttgtaaaaccttatactgtttagaaaaaaaaaaaacacagtaaaaaaaaaaaggatgggtgaatgcataaatttagtttttgaaaatttaagcgactgtttctccaaaatgtcacttttcatccccagtttgccttttgtctsaaatgcaccagtgaagcaatcaagaagaagaattgattaattttgtgctgtatgcctttcagttctgtattttgtttgtgcttcaaactgtgacagttgaaatttcatggtaaaaaagaaaacggttttgaatttgggatatagagaaaaatgactaaattaaaggaagcagataagaacactactgctgtccaagtgaggttctatccaacgaggaagggaaacaactggggttgtaattttgaaatgatcgacatggtttatactcaaaagttctgtgtaagagaagagtaagagtgatcacttggggtttttagtatcactgaaattagccaggtgaacgaaattgcagtgtaagcagtggtttcccgggttcttttatkgggcatttaaagataattttagaaatctgttgtttttgggtgcaatttagacttggattataacctctgttaaaactctctctggttatgtatgttgtgtactggttttcttgccctagacactaacctccaattatttggatatgtgtagagtattagtttgctttgaattccaaaaatgaagttaatgaattcgagcttttgcttttgacaactattgaaatatggtatttccacgttgaattggaaggatttgggccatttaggtgttagacatttttctcagtgttattggtgagaatgggctctggaatccatctgcaagtcccattctttctgactcttctctcttaatagcttaccaggaaattcaaagggaagcatccctcacgacaggtgggagccccctgtgcatttggatttagcagggtattagggcttctgggacaaagtatccagattctgttttctcctttgtgttctttgttatcacgtgtggcctctacctcctgtgtgttatggcagcattattattatcagctggaatgcatatacaaccttatgaagagactgtgaaccaagttttctgtggagtagcagggcagctttaggtatgtttgctactgcagtgaaaaaggagaaacgtgttttgtttcagtttgmctgcctaggctgcaygttaagatcccaaagaatgaataggactgcgattacagatttaaagtttgcttgtatcctgaaaacttgcccagattaatatatttctgaaatgtacattgtcagacccgctttcctcatctaggtcggcagaaatgcctaggttcttttttttttttttttgagacagggtcttacttgttgcccaggctggagtgcagtgcatgatcacggctcattgcagccttgacctcccaggctcaagtgatcctcccacctcaacctcctgagtagctgggactggaggcacattccaccatgtctggctaattttgttttattttatttatttatttatttatttatttatttatttatttatttaagaaacagcattttgccacgttgcccaggctggtctcaaactccygtgctcaggagatcctccctccttygcctcccaaagtgctgggattacaggcgtcagccacagcacccggccagaaatacctaggatcttaacatcaccaaatagcctctgagaagctcaatattatgctgactagatattgagggacctggaggtggagagcagtggagtgttctggtcctggagaactcactgccaagactctgggggcctatccagtcaacacggtgttgccattctccaaggaactgtgtcagactgtgtggccttttggrcagtgattagaaaagaagacagcacagttgagtagaatgctattgatgttcttggcaacaattagtcatatttaaggacagctagggggaataactctgcttagaatgtgttctcatattttctaagtgtgattttgaaaattcatyaagttacttgcaaaccagttggttcagggcagttcttgttgagtggtgtcctgtgtgttagccgtaataacttattgacatcctatcacttgggtcattatgggtgtccaggtgagatatggagagcactgcgtaaaagtccataggcaattaaggtgcaaagggctggttataattccatcactttatgatgacgtggcattcattgtgaacatatttacttcattgcctggtctgttggaattttatygaactgacatcataatctcatttcctactaaagaggctaagaaatacagcccttggtatttgctttaacctgcaacaaattaaaagttaagcataatcaagtctgtcagtccttaacaatcccaagtacatgttttgcacattatgttttgaatgagaatgtaaggcagatgagctccttatattcttacagcaatctttccagattgtcttcatggcaagtcacacaactgtcagttctgatrcagttcttgtgacttgttttcaacctattgtgcatggacctcaggtttagtgaattcagtattacattgaacagcaatattatttaccatgtgataaactatgtgatataccatgtgcaatgrcgcctgcttcattttcgtgtattggatgttaaatttttcacagtgttgaatatcacagctctgtattccttttctgtatccgtgcttttattgctttgatatgattcctaaatggcactgagttatgctttttctgtgtttcttgatgttctgacctgtgtcctgatttggsgatgggggcaggtggcagctatcttcatgtatcttgtaactattcccttacccataaagacattggacattttcttgctcactcttttctttactaactgtagtttaaggatgacttctcttgaaaataccaaacggcagaattaccaaatgaagtaaggcttccgttctctcaagagcaggaatctgtttacaaacctgcagtatttattacatacctcatttagcccattcatcattttaatagaaaaatgagtcattttagatgattctgaaataattcgaggtaagctacattgctgcaggcagaatatgatttacacagatagcaccatgctattttgaaaaaaatacagtggaatgatcagcaccaataatttatgattacttgtggtaaacttatcaaatgtcttcattgtcatagaaatttgttgattagataaagcatttagagttttctagctagcttttcccccttcttccatcttttatgacaaatgattacaaagttccatacttaccctctgcctgtttcaaacactgactgtaaatttaattccagatttgtttttaatattttcttgataagaaataacactagtcactgtcatgggccaattttattggagatgataaaacctactcatatacattttctgcttagaaattaaacttcatccatttacagtttctttagcccagtgtatgcacatattttaaatcctatcttacctatccataggttacatatttgactctcaggaacacaggtaactcattgcctggaaccatagctctgagccccaaaggcatcacaaagtgattctagttagtgtcttgaagcttatgagctttgctgataagcagcatcacagtaaaagcaatatttgtttttagatttagttttttttttttttcatttaactaaragccttcaactgtactatcttcttgggtgtttgatatgggcaggacatctatcattgattcctattagagatgataaagcaaacattcaaagagactgtgaaactaaatgttgcacagagatagagccagggttacaactctgatcttctgtgccgaggtgatcttattttgggcacaatttagcaaatttagttttgttgttgttctttgtttttaacgtgtaatggatttgatttattacattagaaagggaaatggacttttaggcacgtggtcaaagcagaaattactgcagctaagagtagaaagggcaactaatcgccatgcatgtgatgcacactcacaggaagtaaaacacacacacacacacacacacacacacacataaaacccatagcattatgagcctacttagcatagaggcaggcagccgtaactactcgaataggccttgtgtgttcttgcttagtgaaataatgtatgcacaatcataatgctatcagggattgagaataatttgtttaccagcgtgggtgagaaatattagcactaccatttccatmgaaaccattttgcatttaaaaagttctggcatgtcaaactgtaaatttcagtatttaaaaacattctcttatgtgaatccctgtattgcaaaagatactggtcaaaggaagtgctatttgtacactttcgtcaagtcatttttgaattttcttatttaaagaaagtttgccatggcctgtcatactttgggagaagtggttgatatagacacaaaaggacctggtttgtagcaattatccattcccttggcctcaaaggaatactagtatataaaggcagaaactttctctttttcttttgagactgagtctcaccctgttgtctaggctggagtgcagtggcgtgatcttggctcactgcaaccttccgcctcccgggttcaagtgattctcctgcctcagcctcctgattaactgggattacaggtgcacgcctccatgcccggctaatttttgtatttttagtagagacggggtttcaccatgttggtcaggctagtcttgaactcctgaccttgtgatctgcccgcctcggcctcccaaagtgctgggattacaggcatgagccactgtgcccggcctactcttttttatgtctaacataaagtcttcatttgtgcgggaggtaagagatgattcaattatttttgtcactttgaataataaagaagcattaatctgggagaatgcttgttgagagtagaggtgggcttgctgcaatagagtatttttaggaataaccgtgatatacattagcagtgtctactcgtagtgaattcagtcacttttgtattttcattgaattttatgagaaatttaaaggaagatattctacagtttgtttgtaaagccaagctctgaatagagtttgaaaaactatgccattgaccattttggagatttgttaagtttaaacaaacaaaaaaggaaacaaaaaattggggatgtagttgtataattgttaatgtatttttcaattatactttccacttccaagaataattatctcaacagcaggttaactaatgtattaaaaattagtttatttccaaaaaataagctcttttctcatagctctgatagaatgataggaaagagctggtaactgattttactgtatgtctactattgcaaaaactaacaactgagtattaacattgctagattatgtgtgtgtgtgtgtgtgtgtgtgtataatcgtttgtgttgcatagggtaaaggtagagacactaggaaattacaatttttttttttttttgagatggagtctyactgtatcgcccaggctggaatgcagtggtgcagtytccgctcactgcaagctccacctcctgggttcactccattctgcctcagcctcgcgagtagctgggactacaggcgcccattaccatgcctggctaatttttttgtatttttagtagagacggagtttcaccgtgttagccaggatggtctcgatctcccgacctcgtgatccgcccgccttggcctcccaaagtgctgggattataggcgtgagccacagtgcctggcaaaaaaaaaaaaaaaaaaaaaaaaaaaattacaattttaaaattcctttcttaaactttttactttgaaatatttttagcttacggtaaagttgtaagaatagtacaaagagcttgactctgattcatctgtttttaggcatttaccacactttatcattctatttctgcctacatatattatatatatatatatwtttttttttatttgggggaggggatcaattgagcatgggtagaagacatgctcatttacctcttaatacttctgcctcttagaaatcagtgtttcttacataatcaagtatagttgtcaaaatcaataaatttaacattgatgactattgtaatatttagcccaggtttcaattttgtcaattttctcaataatattctttatagcaactgttcctctggatacaggatgtattctaggatcatatattggcaactattatagttgatgtgtcttaaaattccatattaaacataatttgcaaacagtagtattaagatgaatacttttaacttcaatttatgagttactgctgtcattgctagagttttagtaagaagaaagtggaatgggcaaaaaagaggtgaagaatttcattcagacctatagattaatattctatattgtgggtgarttgaggaaaaaccattgttttggaaattttcttttcatgaactaaaaatgctttcagcatctgtatagatcccgtatcttcaaaatgcagcaggcatccaacttgcatcattaaaaactgttagagaataaactcttcctattttttgacaatttttgaacaataatttcatctgaaatagccttctctctgtccctctgcccttcccgtccaggtacaactccatgtaattttaggcaaattgcttccttttctttatgccctttgtttccgtctttttaaaatgaggacaaggtcgttaatgtagttctctttcaagtctcttaccttgatgaataaatatctaaatataggagttcttacagaattcgaagttctatatacgtataaattgagtttttataaagtaattttgttttatgaataggttaccaattccaagagtcacatttattttaattttctttggttattaaaaaagtccattttagaaaaagaaaaactgttaaagttgaaagcctctattttcttggctaaattggaattttgttattgattacttattctgattagtaaaagtggtttagtcacaggccgggcataaatgcttttagacagtcactgaattgaaagtgtcaacatgagagagggatccttttcttggaaatgggagcatgggatctttctgctaatacgtgtttgttggcttagaatgaagactcagagctttgttaggaaaataaacttaaattggcaacatggtgagtgtgaacctggagggcattatgctaagtgaaataaatgagatacagaaaaacaaacactgtatgttctcacttatatgtggaatctagaaaagttgaactcacagaagcaaagaatagaaaggtggttgccagaggcaggggactgggagaagtggggagatttggttaaagggtacaaagtttcagttataagatagatgaataagttctgtggatcgaaggtacagcattgtaactatagttctacagtatttttaataatactctattgtatacttgaaatttgccaagggaatggatcttaaatgttcttaaccgcacgcatgcattgtgtgcgwgcacacgcacaggtgtgagatgatagatgtgttaattaacttgattgtggtagtcattttatattgtatatgtatatataaagtcatcatgctgcatacctaaaacatatgtaatttttacttgtcagttacacmccagtaaaactggggaaaaataaagaaccggtgggaaaaaataattaagtgacccaaatttttgtatcatagtggatgaaacccctttgctgtctctaagcttaaacaaagattcatcttttcgaatggttgcttattttccatttctttcttcaactcattaaaacttaatatatttgtgggacagggtctttctctgttacccaggctggagtacagtggtgcaatcatagctcactgtagcctcgacctcctgggctcaagtgatcctcctgcttcagcctcccaaacagctgggattacaggtgtgtactaccacacctggctaatttattttttatcttttgtagagatgaggtctcactatgatgtctaggctgattttgaactcgtgggctcaatcgagcctcctttctaggcctcccaaagtgctgggatgacaggtgtgagaygctgcatcctgagcccctttttttgtttgttttttgttttggcgatagagtctgtcacacaggctggagtgcagtggcaccatatttgctcactgctacctccgcttctggtgttcaagcaattcttgtgctgcctcctgagtagctgggactatggatgcatgccaccatacctggtgaattttttgtatttttagtagagatggggtttcaccatgttggccaggctggtcttgaactcctgacctcagtgttctgcatgccttggcttcccaaagtgctaggattacaggcatgagccaccatgcctggccccatttgttaatttttaatgtgaccattagatcttctgttttgctaatttctgacgttgtttttctcctttctaaacacctccttgctccatgttgaattttaagcatatggacagtggcatcattagaaagtttcccatcattccctgtcatgcacaggtgatagaagaatgtattggtgcttcaaactgattattactttttacctccttgatgaactcaatatattattamgagagtggctcagtttcaaccctggaggcatcaaaaagaacaagttctaaataacatcctcctttagaatgcagcatattttaactgtgtctctccatcttgcacatcaccacttccaagctccatctctaactgtacatatgctctctgtgtgtatgataatactgctttccccgtcctctcttctcctctctcctctctttgaatatttttttttttgtgagccttaggaacatgtacactggtcccgtagagtgacacaacaaaagcaggctcttggtgtagtcaggttttgtccttgtaaatgacatggtacaartgcatgcggtggattaaaatatgttcaccctgacagaaatcttttagttgaagtgaaaaagcctccgtcaattctgattgcaacaaaggttgctgctgcgagtgagagggacttgccaagactgcaagtttttcaagctctattctggagatacgtttgttacttggttctcagctttgacttggttataatcttgtcttggcttgttctctttccagaatacactasttttcatttttctttggccttttctcaagatttatgaaagggggtatttagctttttgtctggcaaatagcaaaggctgtttgagttccctaatcaataattgtaaaataactagaaattgatctatgccagctgtaaacccatgcatgcatttattttttctttttctttttctttyttttttttttttttgagacggagttttgctctgtcgcccaggctggagtacagtggcacgatctcggctcactgcaacctctgtctccagggttcaagtgattctcccacctcaacctcctgagtagctgggattacaggtgcctgccaccatgccttgctaatttttgtattttcatcggagacagagtttcaccatgttggccgggctggtcttgaactcctgacctcaaatgatgtacccacctcagcctcccaaagtgttgggattataggcgtgagccaccatgcccagccccatccatgcatttctattaatgtctgctatccttgagaaactgtacataaaacatttttgtccccacatcactgaagataggacagaagcaagtgacagtcagacaactgtgtattaagggtatgctcttacagtgctcacagtttgatatatggctgtggggctgtttctctagatttgtaatacatactttgcaggtgaaagtttctggaatgtgagtatagcctcatttgggagttagagctcatttgggagttaggtgtaggtagaataacattgtgatttgaggctactgccaggttatgccttttcaaaaatagacttttcactcatttrgcatggcctcccctttcttctctrtttggcctgaaattcttaatttccctctctctcaagatagaattaagggcaagtgtgctggaagtgtttaatttggcargaccaccattgatagacacatatgttgcccgggcaaaaaagatgctggttaatatttggatgagaagggtacatgttttcttcctctcccagttgtggtgatacctgtcagtttgtcagatactattttgctaccttgtcactgtggaaatttcataagacctaagcttccaactggccagggcactgttattttgggaggacttacctgtgctcacagattatagtaagacacttattcttaaataacttagaagtaagagagaaatagtggtcttgggataaagcttgaaatgtactgagtggcttcagaacaagaatggcctgttgccgatggactatattaatacatctaaggaaaagatgtgccaatctttatttttcagtctttaaaacatggttttaaataaaaaccaagtaacaaatgtatctccagagtatttaatatcatgagacatgtttacagtgtgctgtttaatagaataaaaatcatgatactctttaatacctgtacatctccatggatggaaaccttcatagtaagattgttttttcttttccttttttttctcatacttctattttttttattatcacagcaaggtgtgagaatttttttcttatacttgaaaaatgcttttctgtgattgctaaagtctctgaaatgagtaagtattaatttacaaaatacatttcagccattaattattatttagaaaagaatacatgtatagaaagaaagaagagattgtaaaagaccagcaatggttgtgttcttctcctctgccctggtgtaacaactctggcccttgtaggtctctgccttttgtggagatgtttataataagccctcttagcctcatgcccgtcatacattcaggccgtaaagcttatcaaatagccatcctgttatgatttagctttccaggtacttggtctgcagaaagagtatatcttagcaggaggtcccacatatgtgttcttttggccagattttattttattttaaagcaataatttggcccattggttgattcgtaagtctgtgtaaatttctcagcctgttgacaaactagtcttccaaatgtgcaatactaagttcatccagagtaattctttaccttttgataggtggcctgaagttgtttctagtaatagctcctgtaccacgtgccaactgggcttttcattttcaaaagtttattgaagaaagaaaattgagggctgggcacagtggctcacgtctgtaatcccagcactttgggaggctgaggtgggtggatcacctgaggtcagaagcttgagacagcctgaccaacatggcgaaaccccatctctactaaaaatacaaaaattagccaggtgcggtggcgcagcctgtaatcccagctactcggaggctgaggcaggagaatcgcttgaactcaggaagcagaggttgcagtgagctgagatcgtggcactgcactgcagcctgggtgacagagtgagactctgtctcaaaaaaaaagaaaaaaagaaacttaagaagggtgtgccccagagggtgtgtgccccgggatgcccagtgaggtgagaccctcatcagattggagtggcgcagccatttcccagtttggccccaccattgtattgctattttagggccctagctcctactttcccttttattggacccttttctgggcacctttcgagtagatggggtcaacttaccttgcacaatcactgtacttctttttagaccttgaagaaatcttagtaatcaccctatctaatctctaccttttcttcatgaagaaagaggcccaggggttttgggaataaaccgaaagagtcagaaccagcctccaggtctccaggttccctgtctagggtatatttcagtctttgtggtggttttcagagaggctctcaggattgctgaacagagaacaagaaggcagggatctttctgcacatttgggctggcttgggattagcagttacactgagggtggggaagctctctccctctgctgggtaagccagacacacagagggcatttggggtagatcgctcttcagaagaggcatggagatgtatatttgtttttgtattctctcctgttttctgcctaatatgttgcagttttcttagcagcccttcccaccatttacctaactcctcagcctaagtggctgggcaaagattaatgtcataacttcctagatagtgaaactggtgtcttatgctgtaatctctcttgaatgatgaggaaaaggcctagactatcagttatcttcaagacgactgttacaatgagtgagatagtgagtaaatatctgtagcctctgtgtgttcttacttgaaacaaagaggcagaaatatggtcactgaatacagagaatgatgatcattgatagacctcattctgtgattataatgacattatattgtacttatgtggaattataataaagcttttacaatttataacwtgacttgcctgtcataaccaatgcccattgttttagcaagagtggactttttcttctcgctcttctttatgtctgtactgatgtgtgtttgtgtatgtatttgacttacatttccattgattgaagaattatttgtatagggcctactatatgctaggcattgtggtctatatgctgggtatacatcaaaatatatgtataaaaaatctttgccttaatagagcttacgtttcagtaagaggaattggtgtacaccatgcttgatagattttaagaaattggcttatgtgattgttgggactgtcaagtctgtaatcttcagggcaggccaacaggcttcagattcagggaagccttaatgttgcagtcttgtgtctgaatgcaatctggaggtagaattccctcttccttagagaacctcagcctttctctcttatggattcaactgactggatgaagcctgacaaagattctcttttttgagcaaaactttagtcaggctctgttaaatcctttctgaatagactgatcttaggtttccctcttgtagaatccactttgagcaagaatcccgctaagtcagttttcggaaaatcccccacccttgttatctgaccaccctggatattatcaccctggcattggcttcagcaatgatcctattcagtcagctccttatccttgatgtttcctcttgatacttttctattcgctgatcccccaccttgctccttggttataaatctctgctcttccttgttagaatcagaattgagccaatctcttcccctcactccaagacctcattgcattagttcctccacctattgccatgggccctcttgaataaagtctgctctgccgtcttaacaagtatgatgaacaactttttctttaacaggcccatccacattataaaaggtaatgttttattcaaagtctgaagatttaaatgttaatcacattaaaaaaaaaaaacaaaaaaccccaaaaaacaaacaaacaaaaaaccccagctagactggtgtttgaccaaacatctggatatcgtagtctagttgatggacattaaattaactgtgaaagcaattgcctccactttctagatgaaaaaaactaacaagtactttttgccctgcattgcaaatgatgtagaaagctaggcaatcatgttcgtaatatgcacaccaatggctgtagagtgtagaggtgtttgctttgttcacgaccatggttgtgggtcttttctgcataggtagggaagaacaatagttgattgaggaatgtcttccagcccaccccgcacacacacacacacacacacacacacacacacacacacacacamacacacmccctctgagggaaaaagcctcctttctaccttgacgttgttggtgatgtgccctgccacacagtgtgatagtttgggaccctatgacttccctgggctaaggcccatttagagaagggcctacgctgactcttccccagttgcagttaccgtttttgatggcttcccactttgcaattccttgatgtttttgctcagagaggaaacccatctctgcggtacatggtatggcctccatttttgaggaattttgtggargacaaggtcatggagcttgagacacatgcagtctgtgatcaggcttatgctttatctgagtaggaccacaatgagcctccgtcagggcaagctgtatggaygtctagaggtacaggcagatggcgagggacgtcgagtgcatacagaatggagatatctgctctacttggcccctcagtgggactgctgctgtcctggtggcttttctgggcaggattttgtggaatgttgggaattgtaccmtctgaggaattgggcctgctgctgtgggctccccttgtctctgaacattgtagagtccgtcttttgttgagatgctgaagacagcccaggttgagggctgtggtggccccatgttggcattgtcacatgccttcacctctcaaccactgctccaaaatttgtctctggatggttgcctgaggataatccctgaccctgtgtccacaaaggacgtgggttctgccagccctgacagyttcttccacattctcctaaactgtcaggccagcaaaatgtctagtgtcgtggccatgagcttcctcttgtaacagagccatgtaatcagacataggtgacaaaatgttgccatgcctcgattcattcagtagaatagcagcccatgggttttgtgctcctctgcaccaggtgctgtgtcaggagatagggacacaagatggagcagaatccttgctctcaagaagcttagagtggctgccatatacaccagagcaaggcggacccccatgtgccttggaagcacatggcaggcctgctgctgccctaaccctcctgcctrwccctctgcctgggacatcctcccctgctttctaccacacctctcagccctcttttaaactttgcctttcatttcatcccatagcataaatatctcattcttcaagaagccttcctgatttcctaacacagaaatgatcacaatcttctccatatttccaaactcttttatgactcttttatggctagggcaacccgataatttatcatccaaactgggaaagtgaaaggaggcactgttaattatacggagacaacacacataaactgggatgctccaggcaaaccaagacgtatggtcaccctacttatgacctttactcctgtttgagtaaaatacagtctgttcaagtatggccatgttcaaatgtgaagtccgtccttggggtgggagaggcagaagttatttatacttgcatttccatactgggatttacatgcaacaggagctcactaacacttcctgaatggaatttatgcagttcaccatacatgtcctaagttgagcagacctgctgggacctccaggatagctggcagggagaagagaatcagtctgaataggcagagctggggtcagggaggctcagctgtggactggctcctttgagttgtccagtagtccagtcttggtataatggcaatttggtcccatgctgggctgcatttggtcaacctaaggtcagatctgttctgttatgtgagcatgaagtcaggatgtccctcagggcagtctggaaggtggtggagctgtggttcctgagtagacataggagcctcgttgtggggagaaatagagcctccccgaaggtagacaggtgacaggctctgtttctccatgctgtggctggcaccttcagagtcttcattacatctcaatacctcctgccaatatattaaattcacagcattggagaaggttataatcacttagtaaggccgcggaaagttacgtggagtgaaggactctataaggctcattttatagactagctatcactgaggaatttccttgatggatgacattagttcatggacttttacatataaatgaaggacttgccgtttaaacagtcctttcactggccagagtaggcagctattggcataatgaagtgaggtattgaatataatattgagtttattaccacatggttctgaaataagtaaataatggatacatttatttctactttatagatggctgtgagagacctctttagaacacttcaaaggtcttttgaaaagtgcagtattttactgccaccttccctgttgtcataattctttagtgccttgrggccaactcccattggaaaggtggacacttaaaatccttttgtaggtaatgagcatttggttttactgcagccaataatttggactccagtggaaagctgttagtacaaacttttgagcctacaatactataacactttttatcagacacgtatgatcagctaactctatatggcctatgtttatagtatttggtatgaaagtgaactgctcatctctctattcaagactggcttgagtactttcctttctttagttaaaataactcaggcttgatattagttccttagacaagattgtttactatttgattctttcatacacttcttgtccttcactggctcttatgaaatctgtagccaacttttaaagttgcgaattttgtgccaacctcattttctccatcaattgtggatgcaggtggaaaagaaagagctgtgcagttctagcatcgagaggctcaagtctggccggtcattaaagtccctctgccaaacaattagagagtataaatgccccagtggattcagacttacagggtgggacctaggcatgtgtatttttaaaatacaccattctaatgcttaaccctcgatgtgaaaaatggattaaggacatgaaagaggcaagatgtcattctcctcttgctgctggttggcagcccagtagttgggttggctttggtcttgcctagcaaacctgctggtcagtgccaaggcctctgtgcccatatgcactttcaagcttcctccacattgtatgacagtgaaatctgtattaagcatgtatgtagcagtcatgctcttcatgtttttaaggaaaatatttctactcatctttcctcttgggcctctcccttgatgccacctccttcctattaggtcttagagaagagagcactggctttagagacaaaagacatgatttatgggctcttcaactaatgagcttgtgatgtttagctagtcacctcacttacctgagcttcagtttcctctcctctgaaatcaagatggcattttcatcatagctttcttggtaggatcaaatgaggcaatgtattaatataagcaagcactttgtaaaactgcaaattctatatttcttaataaatatatttttgatatccagtcctatagcttagcgacagggatatgttctgggaaatgcatcattaggcaattttgttgttgtgtcaacatcatataatgtacttacacaaacctagatggtatatcctactacataccctacatacctaggctatatggtataaccatgcacagtcaccgttcagtatgcagtctgtcactgaccaaagtgtagttatakggcttcgtatatgtgtttcccacagtggctggatcagtgcacctcatccaaatggttgatcaacaaatattcccaacaggttatagaaagaagrttctcagagtaatgatgtgtttctattgcttctttctaaatacttcccttctccttgcacccctccctgtaaagccagggactctatttcttgattcattcctaggaaataggatttcttttgcctacagttagtatctagttttggagacccactagttgatgtgtggagtttcctccttggccttttcaacagtttaattctgatcacgttcttaaaacaatatttcactacttctgattttcctaattatcatgcagacaaacagtgggggatcatgacattagaattagtgagtggcttatgatttttgcctcagaaagagaaactcttgctgtttttctctccccttgagcaacacagcagtaatgaatgagcaggtccggagtactttatgatagatggttaagggtgctgtgcctcagccaacaggcctgtttccctagcatctgtcacaattcagagtcattagcatacctttaatggtttcttttcaaaataatttctactagggcatttagaatgcatcarggaaaaatattgagttgtagagatgaggaattttaaatgtagacaaatggttttcattcccttggatgtaattttgataaaatcaagaaaccacatagcaacctactatggagtataacataattcacagcatttaatgtgctatctgggaattactttttcaggctttctaaaatagttaatgaaaaaaaaccttctttaaaaaataacaaatttaatgtaaaaaaatgtttaaagttgctgtttgccagcacccttaactccacaacagtcttcctcctggtgtgtgtggatggcccgttggctgtcttacatactctgtcttatgatcaatcagggaatcaatgtgatttgcatcttataagatgacaaatgttttgtaaggtatatgccatttttactagtactggtaaatattaggctcgttatttatttagttgtgagggggagatcttcagagaagcaaattaagccacatctttttcctaaaatgtcaaagttgagtgagataaggtctctattagattttttataatgcatttactctattttggactggggggtacactgtacatgtttgttatgtgggtatattgcatgatgctgaggtttagcatgtagtcgatcccgtcacccaggtagtgaatgtagtacccaatagttagtttttcactatgacttatttctttaaaaaagccaaatgacctctttacttttgaaacatgcaaatcaatgtatacttttctcacagttatttgaataatagttatatttactaaggatgcwcttttttaatatctactgatatattttttcatatttaatgttttacaacagaattatgaagagggcagaacacaaagtatcccatattcctaaacacaaytgagaacctcctggaggaaagctgatgtggtcaggtttatacagctgaccattggaarggccagagcttctaacttgtgtctactttttgtgtctaractagccattctgtgctactctacaatgatctttgtagccttaccaatattataattttcatactgcactcctaactcctttgtgaagaggtggtatttttttctatatttttttcttggtgattagraagcaaataatttgattttcacaagtcttaagacatattttattaactttagggtctgaatattggtttctcttatttgtttgaaatactgacactatatgagggcatttattctttgctaggtgtgttacttttaaaaattattgggttgtttaaaattcagaatctgttcattgaattgaagaaaagtatttttccatttccagagtacatctcgtacatttttgcattctggaacaattactgttatgctacttaggcaaataaacataggctcattagaagatggaacttgtgattttaaacttcattagtatgtatttttgttcatttctcatccacagggtccaagaaagctcagtatcttcttgttccgggcagtgggattgagtaggggagcaggaaataggcgtttgtcctctctcttttaagatgagtcctgggaggcgtgcttgtcactttccttcacattctgttggtcagtactcagttgcccatacatatccagcatcaagggaagctaggaaatatcttgtttttccctaggatgatatgagccatgcaaaaattcagaggccctgttatagatagatatatgaagagttagtatctgccacagttatatggtcttcaaaaatgatatttgagctttctgatgcaaagccaattttcaaaactatttagatatttaacatttcttgacaactcctttgcgattgtaaatcacattgacgttttgattatatgtattcatttgaaagcactaaatactattattttcctagttattgtggtgctaaagagttgtcagtaaaatctagaatctttaaataaattttgaaaagggatgacggaccaaatggaattctaattacttgatttcaacacatttctctttcatttgaatcttttaagagaaaagtgaaaagcaacattatccttgagaatttctctctcagcatctaagcagccgttttaattacagaaaatgtcttcaaaatctgttttgccattttaaagttttggctgtgaaaaagtcaattgtcagtgtgtaatggtggaaaaaatatcttaaaaagccattgatatagtatgttcagtagacatgtgttacttgaacactagtagttgattttccatagaaactttttcctcttgagtttgggtatcgttgttggtaataaacatccctgcagaactgactgcgatttcacatgaattgtttaaaaataaaccaaaattacacattatatattccctctcccaaaggaatctccttgggaagctgttacgttttctactatagctgcccttatcgaagtttcgrtcctaccctcccttctccttctccgtccctcactcttccaccattttcttcccctctttcttttctttctgtctatcaagagttgcatgaaaaagcacatctctttgaccagcctccaaggtgataaatcttcatcagctgagaataaatttgatttttggaaacagccagcagtcagagtcaaggtcagtgggtaataaaactatagtaacattttgagttagagatggggagtgactgtaaagtagtgagcccatttttcttgagtttttggaaggcaaagaaggaaatcccaaaacaggaaatctcagtttatkgtgtatatttgttaaaaacaaaagaaaacaaaacaaaaaactagtcttgtttgataatgacattgcaagttttgtatattatttatttatttttgtatttgtgactttttccccccaatggttgtgtctttcaactgactgtgggatccttgtcacacttttattttatgttgataatccttttggcattttaaatgatatctgtatgtcatattgaaatacagtaattaaagtggcacaacataggaggaaatcaaatttcatttaatgtttaattacataaattgactacctgatagatttttttttaaatttggagtttaacatttgaaaattggcaggaaggttttaatgcttgttttaaacatagtcatcatctagatctgtactatcaaatgcaatgatattacttattataacattatcaaatgttatatgtagtgccatcaatttatattgttttcaaagtgtaacttttaaaaatagagatattcagcagttatactaaacatttgagtctttcaatgtctgttaaatgtaaaacttgatatttattaaaagagaattttaaacttagaaaaacagtggttttcatttctgtatttcctttgaatttgtttggtatctcattttttcaggctataatttagaaactttttattttacatgcttactggccatcagaagagttttttttctttactccaacttcatgtgtaaagttttaaaataaagtgaagatgttagtgaatttgttttgaaaggaaggaaggaaaagaaattagtacaaaagctaaataggtatgcttagatattgagataaagtgcctcctgtttctggttatttctactacatggcttatttcattcaatttttgtttaataaaattatgccttcaactaygataataataaatttaaagcattaacagtagtgattagctaattataagaaagttattttattaagatatctaattgtctacttgctttaaaaataaccatttattttccgtaaaaagcagtaatcttcattagattttctagtatctgtcttgtaaataagtactcattggtccactttttgagaaagaggaaaggtttataactgtttagcagaaaagtatggtggtttgtgtacattttctggtagaagagacaactgtcgaagctcagcagcttggcaaatgttttagggtggtataaaagttactgtggatttgaacattaagaaacaataagaataaatataaaatttagatatttcttctgattaaaaacattatctaaatacattgtaatataattcgctcatttattcatccattcatttggtaaactatcacatatttcagggtataatctcagtaataaagatgcaagtttgcataaaaatagaatccatcactgtggagctcagtctgatatataccaggttttactccatatttataaaattataaaccratatatttatactctaattaaaaatggaatatatttttataaaattagactaggagactcatcatttttggatataaatttttggagttaattcttartgacctgtaacaataaaagttkaatgtttgccattccctactgagtggagctccaaatgacatgaaattccagttttaactcagatcttgagcaaactgagcaacaccatagaggagctcttctcagttatgttcctgccctagtagtttaaaactggctgatttttattctatagtatttatagagtacctactatggaccaggcactgcttggtgcttatttttatatatcaggtacatttcaaaggtattaaaataattttgaatttttcactgttctctttctctttctctctgtctgtatataacagtgagaaatgtgtgtacattatatgtatatgtgtgtgtatacacacacacacacacacatatataaaggccaagtaaatttttagttaaattgaattattccttaatggttacgtgagaatatcttatcaagtctaaatatagtaatcatcagtatgattttttatgtttgatgtaataagaatgtgtctaattttatgcattttataattattgaatgtatctttggacagtgtgcatacagatagttctggttatcattttcaataaaaatgtttatctgaacttttgtaactctgccctctgaagattatgcttcatagaatttctcatgttcatgagcataattgctaactggtgtttatgtagattgcattgaacaatctttaggaagaaaaaagcacattataccattttcttttcaaatttaattgagaaaatcttgtgagcacctcctgtgtgcctagtgtcaatgcctacattttagttgagcttcaagatttatctaagtatcttagtttttctttttataagttcttttaaaacttttattaaagcaagatgagtgttattaaatgggttgcacaaatgaccactaactcgtagtaatgttaccttatcagcttactctcatatgtgttttcttcagacccctcttttggtcttttccattctcatgcttcctacctatcacttgtaaagaagtttgaggtcatttaatcacatctaaaccattttaacttttaatagacaataggaattcattttggtgcttggcaaccccattgatatgtacttgtgtgaatatgtttatacatatatgtacaatattaaagaaatctcatccattcttttatatttatttaccacaaaaataaagttctggaataccatgccttacttgaaaagcattatttctgagtattttcacatttatttaattaatygttttaatgttaggtagtgctggcttaaggggaacctttttgaaagctgaatttttaaaacaatgaaaacccaagaagtcttcatgatttttaatggcaattttaaaaaagcactctcattaatgtcaggaacagattaaaatatgcattctttatatttttcaggaagtactaaccaatgccgttagacaagagaaaaaagtagaagggaaaacatggaaaggaggaagtaaaatttccattatttttagattgtatacctgcaaaatgaagaaagccagctgacaaacttttataagctgagagaattcagttaggtaactgcctataaagtcaataaagaagttctttatgtactcataagtaacgagaacaaagaaagtttagagtaggctttcattttggaataataattttgtaacatattgacagttatattaaaacaaatgcaaatgtttattatacaaaatgtttattatacaaaaatttgcaccagtagatttgaaaacgtaaaacatccataatcctaccactcctgatgactagtgttaatactkgctgtttgattcctgtttttaccatgcatatatacttctggggagtgtatggataggatggaggaggtacaaatttcggctcatattttactactatttatacatttttttttacaacaatgtaattattttattacaacaatattttttacagcaataaaaatgtaatatttctattatagcaatgtattgtgactatttttttcatattactaatattccagctattcttttaatgtatattttggatatttgaccatttttccatttttggatatttgtggtgttttcttttttttttttctttatccttttttactattcccgacaatgctaaraaraatgtcttcttggctaaatcttagccaatctgcactcctgctctctcagatcactcagccctgctagagtcttgatagmggagcagttggagaatcaagggagatgatgatattaaaaccaacagtactgtgttcctaatttttgggttgccagcagttgtaaggcaccctgtgtcaccaagaagtcagcaattgattggttaaaggggaggatttgagaattgtacattgattgctaaggagcaattaatgacttgatattgatgacttattttctgtttttgataaatttctaaaagcaaatttgctgtttaaagagtatattttaatgttttctttctgtacatgcatgctagtaggagctcatgcccacacagagaaaactttctctcttgaaagtttctatcagtttatattcctaccagcaatatgtggtgggaattacttgcctacttattagcattgggtgttacaagttctgttgttatttatcagtttgaaagtgaggaagatttcacttttatctgtggttcttagatgaagagacagatagtgaaatagagagacatcgccagacatatgtggctaacctgaattgctcattcataactttccttttcagtaatgtcttaacatattttttataagaccccctcattgtttgcatatataagttttacttttagatagtcaaatctgtcagtcttttccttttatagtaactatatgcttagagtggtttgtctccctttaaaatttatttaagtcatcactgctttatttgtacttttgttttcaatttttttactaatgaaattttaattcagtcttgtgtttattttggcatgtggtatctcaccagctttttctaaacagttttgccagtagtagctttttgaataagtaatttatctattctctttagagttgtcttggctattttatattaagttctcatgtagaattaaggctgtttctggtctttgaattctgtccaattggtatatttaccaattcttgaaccagcacaacattattatttattgtatatttacactcaaaaaatatttgtcaaggcaattccccagtcatgactattaattttcaacatttctttgctagtatgatttatctgttcttgaaaacgaacattagtctcttttcattaagcattttaaatactcaagtctctttgttgttctttgtgcatttagatacctttatgcagtatctggaatgtatgtataaattgaaatttttgtgcttctaatatttagatatagtaggtagtttattcatgaaaaggtctatttcttagagtatgcttaagttaagacaaaaaataggatcttttcatgcttattttttatcctttattttttcttctcattgttggcttgggttcctttctctctgtttgcaaccagaccctttattacttgtgcatggttggacatgctgtaagcaatagagacctcytgcagcaaaccagatacctagtggtaggctgcacatgggatgtagcttttcttattaacaaaccacgttagtttattcacctttgaacttattgtagccaactcttcttcatttcattatgaacaaagagaattacttgtgtgctttttcagaggacatttgtgttatatgtttttctccattcatgttttatagatgttgtcayagagcatcttcatgtctgtaataccagtctagatcccatcatattatttttagctcttcaatgtatttcttatggatatcttcttttaatataaaaacacaggagaaacagaaaattcttccaatgtataaagccgcaggattcaataatgtaaaattacagtgggttctgttaraatcttcagagaattgcaattattaacactgagtaattttcttctttcttaacttgtagttgttagagaacaatttagaaaattgatgcttctgtcaaaagtctggatgggtaggatacaygctcagtgtggatatgacaacattaagaactccacaacttttactaactatgaaaaaaagaatatattttatactccattaaactgttacacatcatcaataattacatcaacccgtgttcttgtctgtatcaagggtgataaactagtcactgtagagagtttttctagtgactgtaacagtattcccctttcctcctgcccgtgtgactttctgccccttccctctctccaccgctctttcttattagaagtgtgttgtctcctgaatgtttccagccaatgaatataggcctagaattgtatagggacccagcagggatagttcaggaagtcacgtgacttagagtgatttgytttctagctctactgctttctgaatatattcctttgggcacagtccagtctttgtatctcagttttctcatctttcaaatgagcataggtacttacttcagagaactgttttgagagtttgaagagatatgtgaaagtgctttgaaactgtgatgattatgttaaattcctattgctatggttatttttgacaatgttaatcaggactggcagacccacagacagattccacaggtggacttgggaacccaagagctgttgttgttgatctcccatcccgtcctgtgcttttcagaaatggctccgtgcctccctgactgcactcctgccccatcagatcactcagccatcccaggctcttagcagaggagcagttggagaagcaggggagatgatggtattaaaacccaacggtattgtgttcctcatttttggtgttgccagtaatataaggaacccagtataaccaggaagtggtaaacgtggagggtttgagaattaaacattgactgcaaaggaggataaaaatatcagaaataaggtggtggtgtttgaagtgtcagaatggcatggctgttatggtgggtggctgatggtcttagtgggggtattttgaagaggacaaggaaagccattgttgtgagctgaagtgtgggtccgttgagaagtagggagcacctcagtgtcatgtagctgaggatggcctgaggattatagcatccatgtggggcctaggcagtaactgcacccttgcagggaactaccctgtcatgaagctgtaagatatcaagtgccttgttttaagtattatcttcaaggataactatgaatccaagaactgttatcatcaatatttagctatttcttaacattggatatagtctcaaatttgaggagagaaatgcaaagaactgttgcctcaccataacctttttgttacaattgaacacatagatcataatgctttagtgggtagaattgtgtaagaatgaataaaatcaggcacatataagatcggaaagcatcagttttacagtattttgagaggaaactggccactgagaaagtggcttcttgggttatattggaatttggatcttggatgcagagtccaagatctaagatttcccctggactcttctactaaaaatgaaaactgacagggcgggtggaacaataccttaactcatccactcctgcatggtaataaaacttgttcagtaaagccatgtactttccacctgatgccccatgcctagctttattgacacctgtcaaggatgtctttcttaacaagctcacttatttccacccaagtcaatggaataaactcttagactgaagtgaataatggaggcttgtgattgttagaagccatcacagcagtagtggaaaaaatgactgctgaaagccagacgttgaaggaagagagaaaatataaaaagtagaaactatattaaagtgcttcagtggtgaatattcctaaggacggccatggtttattcctacaacaaaaccaaacccctgaaccgctccaccactttcaatccaattgcctgtaaggatgcagggaatgaaatactctgaggaaagatttcccttacagatggccacaaaatttaatcagggattcacagtgtatcaagggataggccttggttatatagaaaatgcacttaaatggaacaccttatttcccagggatgccagataattgagttatacctaaaatcttgaactgtctgactagcacacatgcatacacatctagcttctgtgtgctgagaggtgttaaatggtttggaaactgtaattaagtagctgaaattgtgctgcagaaccactataagcattgcctcatgtagtatttcaaccttaagtgctaaaatttcatctgagtagctgtgactaatctagtctttatttgtaacacattcaaattaggaggtgtatgttcttgtccaygtactttctcattagcactaatattgctaatgggagtgacaaatgtattatgttttttccttcgatcactcacgccttttagataactagctttttagaggaggtaattttccttgtgatacatttatggagctctgtgtttaacagatttactcaaaagaatatgtccgtagggactgtttattagttgataggctccggggaaaacaagtttggattaatcagtttgaatcacagaagaaattgtgatggcagttagtgtaaatgggaatagcacatactcatttgttcctaaatgtctttccagcattttccgcctagtttatttgaacttggaaggttctttcctaggctgtttactttgacacttgaacacaccctcttcattcttcctttccaaattttcgtttgttcaaaggactccttaatgtttagagagtcactgaacagtgtttggtacagtcataaataacaaagaagatacattctgaaaaatgcatcattgtgtgaatactagagagtgtacttacacaaccctaggtggcatcggctactacacacctaggctaaatagtatagcctgttgctcctaggctacaaacctgtgtagcagattcctgtacttaatacaattataacacaatggtaactctttgtgtatctaaacatatttataaaggtacagtaaaaatatagcataaaagataaaaatggtatacttgtatagggctcttaccatgaatggagcttgcaggactggaggttgctctgggcaagtcagtgagtgatgagtaaacatgaaggcctaggacattgttgtatactattactatagaatttgtaaacattgtatacttaagttatgctaaattaagcttattttaaatattatgctacagtgctgcaacagctatgagttactgtgtgataggaaatgttcaactccattgtaatctgggaccactgtcacacatgtgctccatcgttgaccgagaccagttttatatggagtaactatatttaaaagtgtaaagccatcttcttcttttaaagaatactgatttcattaagggccagtacattcggttattgttttccctccaccttcttagcaggtactgtttccttgtaagagatcaagaatgacactcaccagggatagactacctgctgctaccaagtgtcccctgctcccaaacatgcactcaacttcacacccagtggggtcagtgggttgtgtagacctcgcagccgcatctcctcttggagcactcttctcctcatctccccagggctcagagatctaaacgtcctgggaaccttctcctttcctgtttgcttgttgccggtgtcggggacacactgcaggtttaaagtgtgagcccagtggaggagagctgtcagtttggactgtggcttatggggatagctttcttgcattccaatttccattcgataggcacttttccttagacaatattataaggagtagttagtttacctgggactcctgagttttgatggtgatgtactttagctgtgtattgaattaaataagaacttgcctaggctgcctgtgttgatttccaaaattaaatttcaagtgactctggaaccacccatttccaagttgtgtactgtttcagtcttttcttggtgagttacttaaggtttttaccccagcttttgggaatagatgtattacgtgttcatttgggtgcagaggaaagaatattgactttggaatcaagaaactagactacgaatccttattctcatttgccttactttgagcaagtcatttaacctcaatgagccttagtatttccatctgttaaatagggtatgattcatagctacaatatgtaccacacaacatgattttgagcattatatggtataatgtagatgaaagtgccttgtaagttgttaggaagggatgtaaatgaaagatacaactatgtaatatttaataattagaacaatagctgtgtttggcaggtctctaaaatatcataaattttcataagttgttgaaggcatttgctggggttttaaaattcctgccattttatagaaacacttcatgtattatttttaagtaatacaggtttttaatgaattaattttcttaatggctgtatgtttgtaagtaaaacaccttacagtaataaggtactttgaaaaggaaatgtcttttaacaaatgaaagatcagttcagtctctttatgtagcacaggctgaaataccagccatcatattaaatcttaatcagtaacaaagtttcactaattacaagagctggtttatatattgggtaaattgctgtttgtaaacgttggattatattaactaacactgctaattgccagccacagcctaagtgtaagattttctgaaagcttccattagtagcttgaagtaggcactgctgcctaatatttcagtcagtgaggaaaggcaggtaatgacattatgaatacaattataatgcaggccaatttcttctaaaatgcatggaagtattattactttaccaggagtctttgaaatatgatttatttaatgcattccagcccccataatattaagatataattgagatgtgaagtttaaaaaattgtatgcagtcagtatggtacatgaatcatagactaaattgcttataattttaaaggcacttaggggaattgtgaaatttatataatgcattcttatgtttggaaaaggttataagaacaatagtccagttattttagtatttcagtcccaaaaataggattttttgagttgctattaaacctaagatagctgtatacatgagcaaatccaaatctttctatgtccagttctcattcactactttttgtgagttttttctttaaacctctcatatttatcaaagctgttgagtggtatataatttctataaaggccataatctagtttttataaactgtacaactgaatgaatgacagcaacataaatgttgccagcatgtttaagaagggaatcagttaaatggtacttggaattttgatgattattgctttgaaaagactgaaaatcacaggtcttggctttatagtttaattacttgcttaacaattgctagtgattcactaaatcacaaggcttccaaacaaataacatcagtaactctgctrtgcctgagcaactccaattttcttgacaatggctaccaaactgtgtttagcctaatataaactgttagtttaactgcaagcaatgggggcttcaagcatgctattgatgagatgccagcaaattgagccctttgccactggtgacacttgtgtcaagaataactttagcacgttttatcaagaccagttggagaagcaaatatagtaattatccacatcctttttggatattaggtttaataataatgagtgctgtccagctttccagagtttctaattaataattggttcttaagaacacagcatgtggtttctcacagtttgaataagattgggaaatagggcaagcttaaggtcctgcatacttttatgggcctgatagaaaaggcagtttaaaagaagagcaagttgtaggaagacattcaggtgtgctggtgtgaaaatttaatttgtgcctttattgacctctgctccctgaccttgctgtgtcttaactttgtggcatttccatgagtacactgctcttccttcttgcccttttgcaaccgcaagcttttgatttcaaatggactcttccagaattagatgaatttctcagtttttactttggtagcagctacagtcttttgctcacttgaaaatgatcttatcccctgttctttagtactttatcattgaaataatggaaaataagcatgttagacctgcatttaagaggggacaataatgcctgtcatttatcgggtgcttactcatgccgggcactatactaactccacgtacgttcttaaattgttaaagcatgaggtggttgtattcttgtgcctatgcaatggttagaatgtcccttctaaaactcacatcaaaatttaattgccattgtgagagtgggcctctcagtgcactcgtgaatggattactgctgttatctcaggtgtaggcagttgtccaggcaatggtctcctgatgaaaggataagtttggcccccatcctctctctgttttgtgtgctcacttgctcttctgccttctgccaaaggataatgcagcaagaaactcctcaccaaatgccaagcagatgctggcgccatgcccttggactttgcaacctccagaaccatgagctaaacaaacttcttttctttacaaattacccagtctttggtattctgttacagcagcagaaattgactaaacaccctatgatagaaaggargcttagaaaagtgaagtgatttgtctagagtcaccagtcagtttggctccagactcatgctctgggctactatgccaaaccatctctttagtataaatgtgttttcttagtataaytgtgaacattaccagttcagatataggcactatatgaaatatgacccttcttggtatagatggatatttacaaaaattttaaaattacaacctgcaagaatatattttacatcctgacccagagtacacacagattttaattcatacataggaagtactactacttgtgatttattgttttctgccttcttaaagtttctattttattgtattttcatattaaaaatgctagtgtgatatgctaaaatgatataatagtccaatartaggtagcaacctccagtctgaaaaatcactgagagtcagtgctggccttgtagggttcatgtggctgagcgaaatctgtgttccactagttttacttttgctcatgtgctgcctcaggtacttgtacttctaattttgttagttttctaattttgtgaggccttgaatagttttgccagtaggcatttgtgagtgattggattctgaggcaggattaataattttcctgaggctgtctcttgccatttcatcgtggtcctttgggggtccagtggagtttggattacacgagtatactcagaacttgtctttccagaggcttcctccctttttttataaagctcttttattccaggcatgttcattatggcaactgaaggaaactgaagtacaaaaatattatttctccacttgtatcttttccatattgtgcgggagatagtataagaaatgtgttataaatagaaattgagaagatgcagaatagtctcatctttatcatcttgtaccccttgtcagacctaccaaagtactggctaaaaggctagactaaggttattgccccatgtgtctttgcctagaatgaactagcagtgtaggagcggcatcacctagcgctcttttgaaataaggtgtccatgtcatctcattcagtcctttttgaggaagcaaacatttgttgagtatctactccatgatggccctgtttcaggctctagagttataatggggaatgtgatacacaggccgctgctctcttggagtgtgtattctagtgggaaagacggtcattaaatacgaaagcaactaggtatataactatatatttggtttcagaatcaggtaagcatatgaagaacagcgatgtggggtcagatgatagagaactgtggactgcagcatttccctgcttatctgtgtcccaccccatggattgtgaatttctctaggatatagaaatcctccagagatcctcaatgtgtgagcccaggaccacgataggattttcatttgtgaaaggcctgtaactcagtgagaggatgtttcaaggaatagaaccaaatgcggtgtgtagagcagtagcattggcatcacctggaaacttatcacaagtgggactttccagcccatcttggacctactgaagcagaatctgcaatttaacaagatccccaggtgaatccttaggcaaatcagaagtttgagaagtttgagtagtggttctcagccttggctgctgtagagaaggagagttaggtccagtaagtccctcccagtgaaatgctattcagctaaacctttaatctgccagggtggaaatcatcaggtgccccagctttaytcacttctgcaatacccattaagtttaggctgaaggcaaggcaacttcttctgtacctttgacatccacccacaacccagataggctacctgaaacaagtccttcacccattattattaagaaatcccactggcacactctggtcctgtatgtgtgtccccaggacctggcacattgtctcttcttctgctcagacatgagagcccttttgccagtgggcccctttgcccagggattcttttcacctttcctgtgcctgagtgagtaataaagttttctgttatgtactatcattggatcagatgacatctagttttttaatggtgttttttgttaatcgagtacatttatgagattgggggtacccaagtttgggctaagtcagactatggatcatctttaacagaaatcttggttctcagacatcactcccaaccagtgaaatcagcatctctgcaaattgggacctagtatttttcaaaactctccagtgattccaaagggcagctgagattctagagggaaaatctattttatgttgttagggccatagaacattttagaagagccttatgataaagtctggctgatgttttgcacatagtcattgaaatacatacttctcgtgatgtgtatggcatgctgagcacaccatcagaaatcacgtggccccttcttataaaactatggcagaactgagagcagcagagcagagtaaccagagttaaatttgagtcaccataatgagattaccattagattctgtggaaaatgtgttgcaacaaatatgactcagttgataagtgcaaattgcattttgcccttgatgcaaaataactgttctgtttaacgttcaggatgtttttgcctgttgttttcatctaactcagaacggagtctgcttaacaaatgtatgaaactggtcaagacctcggttttccatctgaatctgaaggtgacccttgtttaaaacttcatactctgggcggtctttttgtgtcagccttgctttttgccattttctttttcagatgacrcaaaacagacaagatcagctgggagcccttcaaagccagctctaaatggaattaaaagaaggtattctgaggcaggaaatagttgttagatgaagggcctcatggggaatgattttgaggtccttagattttatgaagttggataagtcagggctctgagtcatggtttagaagaggagctcaggtggaaaaattgaaaggaggtctcctcaattttgtaggatgtaaaaatgagaaaatttagcaaaaaaggtttatgtgctaataatgagcctgatttgaaatattggccttccagcactttgatatgtgtctatcagtggtctgcctttgacgtgaaggccctgtgtgcggcagcttaacttgtgaatcctcactaaaggggaacagtgggagacggcagcctcagagtgcatgaatggcagtgattggctggcaagttgcgtaggccaataagcagtgccttccagggtaaagacctagggaagcgccttgtttttgctttgtcttagtgtctgcatgtgtttgacaagtgaacaataaaatgtgctgtttgattccacactgtcttgattcttttctgtgtccctcctgcmatctttctttttcatgtcacattacatgaggctcttttcacctctctctcctgaccctgagttctagtgttcattgctctctctcacccaggatgtgctctaattggcaaaactataacctggtagcagcagttcactattttagtttcctaattggtgtcaggggctgctggcagagcccggccatgttggattgattgatagatcagctgctgtgagtgtcaggcttccatctgaccaacaggtttattgcttttgaaacttaaaaattaatatggtaaatatatcctgcagtgtccatagtgggtctgaaaaaaaataaactattyatcattcaggagcacttccaatgttacctgaaggtcccttgggtttgcaactcaaaattttgttctatttctgactcacagctggctgttttcttgctttcatgatgcagtgtaaagctgcattatatttcccactgcctgctgcacagtgggtttcttcttttcagaagtaatgcagacagggtgttaaatgtgtgtgtcggggtagggggaggggaggcagcatcgaacccattcttcctacagaacttaaaatttacaagctcatttacactggtcagtcagagtgtagatagttaatgttgaatcagaaaaatgatataaattctttttcaagaggtatttcatttaattgacattgatattgaagatgtaacttagcatttaggcatctgagtaatcatcatcgaatataatgattagtttacccacattaatgcctaaaattatacggaaggctaaaaagtactgcattttaaaatctagttttaatactttgattagcgctttatgttctagtataagaaaaacaatacagtgaccttaacgagatcagctgttaccagtgagcaaaccactttcatgtttttgttgcttctagttcctgtagaaaagtacttcatcatttatagcaatttttcttttgtagaaagataagtttgggtcaatcttcaacaaacattgtgcaaaatgtcttgataacaatactgtcttatatttgtttgcattgtactggttttccaaataacttttatgtatgttatctcatgtggtccttagaaaaatccaaagttaataattattatttaacatttattgatgaggggaatgcgaatcaaaaagttcagtaactggatggaaatcactgctgcaacatacgtgagtagatcgtgacttgatccctacttgtcactcttgttactccacttctggagtttttccacaagagtgtgctgccctctatgtggtgagtgctgtattagtgcttccggggttacaaagcaacctcaaaacttgaactctcttgggtcttaaattctagttagaagactgatacctgcatatagatagaagcacaaagtgcaaaagggctgagtaattcaggccctggagatgggactgggccataggggtgaatgaggagaaaacctggtacaatttcttagaagagtaagtgtcagagctgcaaggggcatagggatttgaaatgtgtctggcatccatcttgagagaaaagctggatcgaaaaggtatagcgatgggagaacatgggttctactttaggatgttgagtaacttaatgttgcaagaacttagggtgctggggtgagggagggctgataacaggacaggtgtggagggtagagaacagccaaactgcctctggtggaattgttgctgggcaaaaggatagcggggaagaaagggcgaaatatgttagaaatgtggtatagccttccaaacaagtggaaacactctgcattcgaggattgttcatgggaattcaaatgatgagattatatgtgggagacattgctgaggttggaatgaaattaagagtgggggccaggtgcagtggctcacgcctgtaatcccagcactttgggaggctgaggcgggcagattgcctgaggtcaggagtttgagaccagtctggccaacatggtgagacccactctctaccaaaaatacaaaaaaattagccgggcatggtggcatgcccctgtaatcccagctactcgggaggctgaggcaggggaattgcttgaaccagggaggtggaggttgcagtgagcggagattgcaccactgcactccagcctgggtaacagaacgagactccygtctcaaaaaaaaaaaaaaaaaaaattaggagtgggaggttaagaaggaggaagtgagttaggcaacaccataaagcttactccggcttgaagactgataagaatcacatttctgtttaagatttctgtcacttaggtttattttgaaccagcaaacaagcaattccaagggtatgtaatgagttaaggacccaagtgactggataaggctttctcttgccttagtttctcacagagtaaatccaaaattctgttgtcattacagccatcatgcaggaaataatatgccatattcgtggcaatcagaaccataggttctgtgactttcatatgttaagctgaggaaagacgcctctcagctctcaagcatctacccctttaccataaaggaaagcttcctgtgcccactcatgaattctcttcctgtctctctgggcccaccatagccctggtcatggagtatggcaagaagtaaaagatgactgcagtgtggagctcagtgactagcaagatattgacagctttagattgggttaaggacaagttatgtttcatattgctgtgtttgaggtcccttcaggatattcttgtagctgtgttcattaaataagttggaaacatatgtctggaactagggagagcagccaggaatagagagagttatgggaatccttctcaaagagatgaagctctgggaatgggtgagattgccaagaaatagtatgtggagagaagaaagaagacaagggcagaattttggagaatacttacctgtaagcagcaggctgagaaagagttgcatgggagactatgcaggagccatctgcaaggcagatggaggatgaaccatgagtgttcaagcagccaacaaaagagagagagagagagtcaagaagtgagggatccgtcagaggtgaagtttccagagacagccagtgaaatgagcctcagtgagaaactggttgaaccatcagttgctatcatttgtaacatacataataaaaaatagtgttgaaatcagaacccaggtttcaggtggttaaaaaagaggaaaagggaaaagccaggatagttattattctatgaagattttaagctttgaaagaaaggtgataaagattatgtaccttgaagaagtagtttttttgggtggttttccttaaaggtattaatatgtttgagagtcgagggwaagaagccaatggcaagagaaggataaaaaatgtaagaaagaggtgataataagttgatggagcaaaatctcaggatttgaggagggagtaggttcgagggtagaaatagtccttggaaagagaaggagaaccctgcttcagggtaagagacggagaaaagcarggatgacctgagcaaatttaaaagggagggaggattcctcctgaatggcctccattttctcaattaagggatttattgatattttgtatccttctacgttaatgctgagtctatttattttattttattttattttttgatggagtcttgctctgttgctctggctggagtgcagtggcatgaactaggctcactgcaacctccgcctcccaggttcaagtgattctcctgcttcagcctctccagtagctgggattacaggcatgcaccaccatgcctggctaatttttgtatatttagtagagatggggtttcactatgttggccaggctggtcttgaactcctgacctcaggtgatccacccaccttggcctcccgaagtgctgggattacaggcgttagccaccacacctgkccccatttattctttagagtaggaggctaagacagcccaaggggtacacagtcagataagacacttgtgatgcaattctattccagtgtcctgagaagtgcatcttcattgctaatcagatattgatattgcttccctaagttaattggccccttcctggcacatctttcctaacttcagcgttcacccaggcctcatagaattctttcactttttatcctttatccatgatgtcactctcttcatgttacaagtcttggctggcctgtccccttcctcattctgactaggaagatgggattccctctgaatcaggcctggactccagcctccaactagagtccccagcctactctttagctggggtttagtggactctcttctggaacctggctcggttctgtgcctcgatgagagaaggaggcttgggttgccttatggggcctatttcacaactatataaatcaattttttttgtatgaataaatgaatatgttaggagatccttcagggtaaagatgtctttaggagtaggttgagatacttcacaggtaagatggtcccttttaaaaaattaaaaggaagtcttaaagacgtctgacagatttgttttctgtaaggttagttttttcttgctgaaacctacttatgagtcctaagattgtgttcctccagtgcttatgaaatctgttctgactttctgacagtggaaatggacatctagttccaagaataggcttaaattaaagattgtcaattttaaacagtttaatagatatgtaaggaatggagctattttaacagcgtctttcattttttgaaaaataacacatgctttagaaattcaagctgtttttaaccaatcgcttccatctaacttaacagcagctgttgcacactattataaaaggcctgggcgagatacagtgttgaaaacttggtgagtctgagatttgttacatattttatcaagttacctgctgtccctgcatttacagatatgctagattgtttgatgtctacttttctggatgaggagcagatgtggttgacggctgttaagttaggaatgcatgcagaggttcccgagacttggtgtgtatattcaaagaacagggactttctcatttagcttctttgtgcctaataaacacagctaaggaaggaatcagaagcattagtagtttgtagaacatttatggttttcagtgaaaccactttctatactgcattttgggcaatgagctaatatgtattgtatgggcttgttacagtgggctcttaactgtttgtgggtctaatctgggggcatgggtttatatgtaatctttatgaagacattgcaatagcctgtgctccctaaagttccctcagactttgaattctaatcatagctgtattccataatagagagctgcttataaaaagacatctcagtagagattcttggtaaacaggatggattctgatgttttgttaaaacgaaaatacctatrcagttacccctctgtatccatgggttttgcatttttaaattcacccatccatggattaaaaatatttggaaaaaaaaacaacaatacaacaacaaaaaatacacattaaaaacaatacaatgtagtagttatttacatagcatttacattgtgttagatagaagtaatctagaaatgatttaaagtatgtgggaagatgtgcctaggttatatacaaatatgatgccattttacatgagggacttgagcatctgtggactttggtatctgaagggggtcctggaaccaatcctctgcagatamcaggggatgactatatatcaaaagtgcagcttacagaatgcaaatatgtacattatctcatttgcgcctcacaaattccttttacggatagaatacttccttttcagtctctagactctccatgtgcagtctcgtccacacccaacaggccatcagatctcagccatcagatataaaccagcagctccaggatctatattctaatgctgtacttttcaacatgtaactctgaactagtcttcccttcccactgtcagcttcttcagaaactggtgttctctttctcagtgattgagactgccatctctgtccgaaatctagctattctccttgctacccctctacccctttccaaactctactgataccagtaacttataagttgggattccaaacttgctgtcttggacattgttctggccttcatttggcctgtactgcttcaagcatatcccaactagtctacttgcctctgtgttccacattgcctctggaatggtgtatctgattcctatgcaagaaactccgtagtggcttgccatggtctacagctaaatctggcacttcagaatggtagatggctcatcctcatagtctgccttgcttgcttttgctacttcatctctggccatttttctaagtgcagcttggacttcacctccctgaaccattggtaggtgctgaacctactatagtatttcaggctgccatccctccatgctttaatacctttccttgtgaatatacatttgcattttcccccatccccaactcgtttttgaggctcatcttttggaaacgttttcgttatgaagtttgttgttgctctgtgtttgtgctccacttctctagtggtcagtaagctcttagaggacaagtacgatgtggtattcctctctttttctagctgggatatatacttgtgttatagctggggtatatacgtgtgcggtgagtgcttgctgaagatcgtacagatatgagtctgcacaaatattaattaaataaccaaatgtaagtaacagaaactaaataaaaaccttacattactgtcctgaaggtgtaacttggggatgaagtggggatggggacccgtgtcccgtgtaaataargcatttaattaagtgcaattttaacatttaaagttggcacctggacaaatttttactcccaacatttacatcttaaaaagtagtaaactttgctggaaagtggtagtgaaatttctgtcattttgaaataaataccagagtcacagtagtaccaggttaatgcatgatgtttcagtggcttgtacttgcagctttgcactataatcaggttcttttaaaattagtcttacttaaatgagaaactgtctccctcctttttttttcttttttttaaaataagagcctctcccttttctaatggggacagcatccttttcttctaccatttctcccattcctactccattattggtattatctcataaggattgttttgtgttttgagaatttattttttcctcaaagctccctcacctatttcctccaaacagacagaattcaaagaaagaatagcccttctttcatccattataaatgatttttcatttgagcatgtcattttgcttttttgttccaatggagatcaaagggatacaggttcacccccagtgttcagcagttcttttcagttctggaccttaaagaaatgggatctggttgaatttgttgcagacttagatctctctccaggcatgtggcactcagatgctgggtgttgctgcatgccgagtgctgtatgtgtacgtgtgttttaagacggtgaaagagctggaaatttggtgtttcatacattttgatgcatgtgccaaagatacacatcttaaaggaatatatttgtgttgaaatattacttgtttctatttaagctaagtggggagtcctttaaagatctctatctaagaatatctgctccacagtttgaactctggcatcatgaaaattttgaatgaatattctatagttgctaggctttacaaaaaagaggtttaaaaaatattttacttctttactatgaccagaaccagtgagacccttttaaatgaactctaggtggtttatagtctcaatttcaagtcgtggtagggcaagatgaggagagattaatttttacctatacttaaaaccaagaataatgaattggactttaactgtgagacactgacacattaataaattaaaaataatcgagctttttttaaataccctgctttgtacttcattctgtgatttatgtatgtgtgtcatactattattgtgagactagtgtgagatgttaggccaaaactgtaccactactgtttgattattattagtcttcaaaatttccataagatgcatttcatatttcactatgcagtcctttctcattcctagtctcatcattgtcacctaatcttacccttctgactgatcttactctcatggaaatgccaaaatttcttttgcctcctattccttatttctccagctgtggtcaaagtcccatttttcttctagttgaattgaatggctactccaagatttataagacaaatgttattcttattgttctgatgaattgcatagtttattactgttgtctacaaaggaatgtaatattctctaaaaatctaagactccattcacttattgcatagagctaataaattaaacaattcatctatgtgttaatttttgtgcttaatctttctcattccttctctaaatcaagttgaacttccatgtatctgtttctttttaatgttaggatagcaaagtgtttacataaggattttagggactaaagaccaaaaatatttctggctgctgggaaatcagattggtggtggggtctatcttcaagtttatttcccattgacaaggcatatttgaaaaaatatgtttatttggattaagaacttgggttctgatttgttgtactattttatatgtaattttatggctgaggatctgaacgtacattagaaccctcatgtaaactctcaggtttataaactgatacccctgttgctatgaatttttttgaaaaaatcttattcaacgtaactactatattccagctggttgtacgtcccaaaagtctggtcattgtataaatggaattatttttattttcttccctctgaatatttggcatatttacttttatctatgtctaatcttatctcttatccatatggaaaggcgagtttgaagtgtccagtcacacaaatctgtctgtctataaatagacagccatactttatccaactgtgctgaaacacatagacatttaaaaccaaatgaaatatcaacccaactttcggaaaaggactattcatgtcctttttgaatctaaattaaaaaattattagaagggcctattggtgcatttgaattttgatcaattttggtttgaattttcagtcaagtttattgtgacattgttgggacaatatctgttgtgacatatatttgaaaggtgtatgctttgtgcctataagagcaagacaatattctgattgtcttgaattcctattctaagtgactgtttcaktctggtgttccttcttggccgttttcagatcctgcatgttggggaatgagtaggtttttcacatgatgattgtacatgtaagttttaatgctcagcacaatcatggatggataggtttgatgaatcaacatcatttggaatgaagtttcctcattattggccaagggttgtgatttagaaaagtaagaagtagttgctttgctggtaggttgccccatacttgaaatacagggtagctatttgtaagtaaacgtaagacaaggttgggagtcttaactgtggctaaaccctgagagtgaataaaactatataaaaattgattaacacacttggattatgaagtcaaataatcagaatagtttcttgcccaagtgggaaatatgacttacgcctttcaaagccacaatggacattttgatcaaagtttatcagtagtatctgctagtaagtttgcttaaaaaaaaaaaaagtatagagaggaagagaagcagggatataatattgaggcctcttttaatgagtaggcagaatatgggaatggacctggcctggactcacatgagtgagttgcattgcagtgggatactggcagtttttaaaactctggtgttctatttgrtgtttggaaatggtgaactgagtactgatgattaatgagcacagggattagtggtgatattagtaattttgcttggcacaggtcacatttaatgcctatgaacagatttttgaggcaggagaggtttggtcaacccccttcttccttcttaagggtccagtgcttgtgctgtacccgccctttgtcttcatgtctacccacaggtctcaggcagcttcccaggcacacccatgcttacctgaagccattgcctccttttccacgtcctacctcctgcctaccaagctgggaacagtttttttcctttactctgtccatttctctttgtgagcttaagaaagctggtcaagtctagctcagctatacatcacatcaaggaaaagctgtagaagtgaggcagctcttctctgcacttcttatggactgtttctagccgtgaatccttgggtagtcatttgctcttgttaagtctttctttcctcctctgaatagagatgtggcgtaaagggaaggatttctcaagtcctctgaaaatataaattctttgtctgtggaaatcataagatctgtagggaaattagacttctcaccaacccagtgtcatcatcctctgagacgtggtgataagaagtgcccttcaggctttgcaggctgccttaggaccattttctaatggaaaaatgcattcagaattccaaacacttgccttagaatttartcctcagaaaatgacttaatccttttttgtgttttgttgttgttgttgttgttgttgttgttgtgtgtgtcatatatttctgttttgtatttaataaaggtctcaagctcttctttatttcagtrtatttacctatcaattgggattgttgatacctccttcaaataaatattgggtttatttactgtttacttttaggatgagcstaatatgcagagacttgcagattattaatcttattactttgaaaaagaactgtttcaaggggtgaatactgaaacttgtcccagtacttggaattttcttgcttttattacatttcctaaatgaaatttcagagcctggaggaaagtagtggtgtaagtatatttcaagtatatataattggtttgaattctttggtagagagaaatttataaaattatagtatcattatgagtgtagtttaackttttgcttaatgtatatatagaccctcaaatcttttttaaattggagccataatttactcaaatataataaaagagcgaaaatattgttcagtttacatatatcagtgttttccttctcttgttctatacttaatgatattccatgggttttgcttcttcctggtggtgatttatcttgaggaaatggggcatgatagctggaaaataacctctatcaattgccattttatccaaagcaatgcccgttactgtactccttccccagccagtactggaggtaagtggacagaaaataagtgatgtttagaattatcaacaaagaagccgagctgtctcagcatgtaaggtttgctgttttcattacaaattataaggccaggttttttttttttaaggcagtctgtagatagtttttttctttgatctgagactacttaaaaaatacagatgcatataaacaatacaacaattaagtgaacaatgattacatgcttattttgaggcatagcaagcctatgattctaagtgaagtaccaagcacctgaacttgtattggatgggccatttgtttacttgcttctaaaacacacaaaagcattctgtcagcatctggaaccttcatgaccatttttgctttttcatgacgacagagtaaacaaataaacaacaataaataaaacaagttgagacagtatttgtcttgtgtgtgttcggtcattcagcgaatgaatagtgtatttaaatcatctgtttctctgatttttgggggacttgcatgtcagataagcatctcctttgtattgctatttattttcttccccaaagtgttaggaaggccaggttttctagttttgtttgtttgtttaagcaccatattctctattagagcaggggccagcaaactttttctgtaaagggccaggtagtaaatattttaggctttgcctgccataggttctcttgcaattcttatctctgtcattgtagcgtgaaagtagcgacagaaaatgagtaatgaatggatgggttttgttccgataaaactttatttccaaaaggcaagatttgggccatagtttgttgatgccagcattagagtgayaattcttgttctttgtgtattcatttatacagccctgctccatggactactcatgttataataaagggatagagaagggcatgatgacgatgtgcgttcccagtgtgctagctgtggctctacccctttttctctcacttaagaaaacttcccagaaacccgagaagtgagagcattttcccccagggaaaaccttgaattgtgtaacatgtaaatccatgggaatcttcagcactttattattagcatcagattttttgtcagactcctcacagctgtccaacatacaccaacttgtagctatatggtcttttagaagtggtgttagagggctagtcatttggagttaacggtttgggtcccaaggagcacagtcgccaaagctgaagcaagacaagacatctttgctcatccagtagtgtatcatgggccactcaaagcttagtgtgcacgaaagactctcatttgttgtttatagaggcgtgtgactaaactgagcccaacagcagtatgccttgtgtttcatattcttagatcttttcctgtctctatctcttgcaagttagaattactacagatgttgaaaacatttgactggatttagccaagttgaaagtatattttataatattttggtgagggagttagatcaacttgtcgtagattactatttggtcaaggaaaggcagacaatttatgtggggtcttctaagaataaacccaactatggccgggcacagtggctcacgcctgtaatcccagcactttgggaggccgaggcgggcggatcacgaggtcaggagattgagaccatcctggttaacacgatgaaaccccgtctctactaacaaaaatacaaaaaattagccaggcatgctggcgggcgcctgtagtcccagctacttgggaagctgaggcaggagaatggtgtgaacccgggaggcggagcttgcagtgagccgagatcgcgccactgcactccagcctgggcgacagagcaagactccgtctcaaaaaaaaaaaaaaaaaaaaaaaaaaagaataaacccaactatataggattagagtaaaattaatgatgatgatgattcagatacagtataagctcttatctgaccttcacagaatctacctcgtggagaaaacagcttcccattccctcataagacttgctttgcagtgtccatggcacattgatgctcatcactggtagactttctgacactcctgtgcgtttcttatctgttaagtcagctgcttaccaagtcagttgtgcttgcttattcacctatttgccagtagtttctattacataattttattaagtgccatgtcagctgtagctgtttctatgaaaaataagaggaatgctttgggaagacttgtaaaggtgatctacttaaaaacttgctcttgaattaggtataggcaagaggactgtggaggattagggggaaatctagaagggttctgcactcagattgagtcttttaagtcttttagttctcactgacctttaaagaaaacagttgaaaatgtagataatctgcagagaactcagcagaaccatactggaggaaaagggctgatactcatrtgagacaattgggaaataatttgttacttagatatgttattgcaactttattgtgaagtacatacatatctttttaattgtttttcacttactggtctcgattgtatctgagtgtttcacaaatgtgtcacgcactgtgccagggctttacccaaactctcttatttaattctcccagcagcccattgaggagggtccgatggttagcttcattttactgatggggaatctaaagcctgggtagcccatgaagtcttcccatggtcctaaagcaaataaatgctagatctgagattcagtttccttctctccctaattatatcatccccctgccagcagccaactcaaggcttttcaatgctatagatttttttgaatacagtggtaggtgagatcttaactcattatgaatcactaagccagtctttattagaatcaaacctgggggttgtcacagaatgaattagctttagtttagtgcagagaatatagacaaaatgacttaaatcttcaccgtgttgtccctatgtcttttctttgctgcgttctgatcttttctcttttgtttgctcacatacctgcttggaatggatatattgtttttacctcttaaacatgcttttakgtatataatttgatgctcaaaagatgagtaataggaaaggtttttttttttttttttttttgagatggagtctcactctgtcacccaggctggagggcagtggcgcgatctytgctcactgcaagctccgcctcccgagttcacgtcattctcctgcctcagcctcccgagtaactgggactacaggcgcccgccaacacacccggctaattttttgtawttttagtagagacgggggtttcaccgtgttaaccaggatggtctcgatctcctgacctcgtgatctgcccgcctcagcctctcaaagtgccgagattacaggcgtgagccacctggcacccagcctagggcaggtatttttaggtccatttttttaggtgaagaaactaaggttcaaaaattaaaatgaaccacaagagtttagagtttaaatatataggaaagatccacattgcagttgaaaagttgaataaagaaatgtttggctgtataatacagatacttagttaaaagaggagagggttgaggggatcactttttyctactatgtgcagaagtatgatatagaggattacgactggctcttttctagttatgtctgagtatgggattaatttttttttttgtaagaattcaatttcagcaggggggatttagtttaaagatggaaactagttcccccttagatggaaagtctgttgtttaatctttttccatagggttgtatataacagttttagattctgtccagattcaaaataataaactagacagcagggtccaaagttctrccattatatctaatgattgtaatttttaaaaacaacaatgcagtcataaacttggattcagtctgtaacatttgcatgcactcagactttattataaatgcagtaatcttcccttacccactgaggattccttccaagacccccctgtggatgcctgaaatgcagatggtaccaaaccctatatgtataactttttttctccatacatacatactgtgataaattttaatttataaattagggatagtagccaggcatggtggttcacacctataatcccagtactttgggaggctgaggtgggaggactgcttgagtcccagaaatttgagaccagcctgggcaaatatagagagaccccatctctaccaaaaataaaattagctgggcatgatggtgcacactggtggtcccagctactcaggaggytgaggtgggaggatcacttgaagccccrgaggttgaggccacagtaagccatgattccaccactgcattccaacctgagtgacagagtgaggccttttctttttaaaaaaggcatagtaagagattaatagcaataactaataataaattaaaacaattataacaatatactrtaataaaagttatgtgaatatcatctctctcactcaatatcttattgtacagtactcacttattttcggactatggttgaccttggataaagggggaactactgtaattttctaccatgttcttttcattctagagcaaataaaggatggtgatatgaaacaaagtatttaggtaaaaagaggcttctcaataagatttcatttatatcagtttgtaatattgcctactgagcaatttagttatatttctaattctgtgaaagagcactttcatggtagacccagacaacagtaaaggaattaggatgaagagtggaactacacataatggatttaaaattagtagtgtggatttttaaaatcaaaatggaattcagagatgagaagggttgtttaaccagatcattgggaaataattagaaaaacagacagtcagtagacacaagaaacttggaaatctaccttcagtggggaggcatagtcgtttgctgaaccatcacccatatgtattgattctgcagtgtgtgatcccagaacaatgctcattttgctttaccaaaaaaaaaaaaaatttttttattaaaaaattaaaaaaaaaccaaactcaccacaaagcacaatattacacacaccaactatgtcatgtccttagtacccattgttccctgagttcacaaagttaaacattaacgaagaagttcaaggattggctaggtagcaataggagcaaagattaaaagaatgaagaatgtatctgctaagtcagggataggaaatcttctctcttaagtactatgaattatcttgagaagaaaagaaatcagagcacaagtaaaatagttggggtgggattaatgcttagggatttttggagtcagaaatttgaaatgctcaattgacctattttgaacttcaaaacaaaacaattcacatatgttttagctcactaagtgcaagaacaaagagtgaggcaataaaattgtagaagaagaaatgagcaaagaaaaaaagatacaagagagtggaaaaaagtttctggtaagtggaaggatagataagggaggggacggatatggggaacagctcaaaaggaaagaccagagggaaccgtgcaggagtgagaaaaatcatcctcatctgccctccacatgccacttccagaactttcttatggttcccggcctgtgtttctgccccctaactgggctcagtctgttttaaggtgtttcccagttgtcctgtccctgaccccatgtttccccaaagtccgttcctccttaccatagctcgaaatccttgcygctctcttccagtggatgaccttgagagcttgttgaggtaaataggattgcagagtgtttttttgttgatttggtttttttttttttgagatggagtactgctctgtcacctaggctggagtgcagtggcatgatcttggctgactgcaacctctcctgcctgagcctccctaatagctgggactacaggcgcctgccaccacacccggctaatttttgtatttttggtagagacagggtttcaccatgctggccaggctcgtctcaaactccggacctcaggtaatctgcccgcctcagcctcctgaagtgctgggattacaggcatgggccaccacgcctagcctctttgttgaacttaatattattcttctttattttcgctttctcagtgaagctttcttcctcatcgtttccaagttgttgtgtttcggtaatctgattatctgtcatttcagagtccctgtcctcccactgagccacatgcgcacacacatctctgtcaggcacccctgtcatgtaaggcacgttgggtctgccagagcggcaccccttgttccaactttcaggtttaatgcttgagaacatttgaaggctgttgtctggaaaagataagtgtttttatatttctttgaattttaggagttgtctaccacaacaaataaactagatcacactttttaagttcaatacttattatcctcattctgtggaaaaaatatattttctattaatcatgtacataatagtactaattatgggccactttggctgaacacagttttatgcttaggcttacataattaaggttgtaatgttatttctggatctttgaggcattagtagagatcactgatgaagtaaactgacaaacataactccttttctttggaaaagatggatgctgtctgctaaactaatcaagttatagagccttaggccgggtgtgtcggctcatgcctgtaatcccggcactttgggaggccaaggtgggcggatcatgaggtcaggagtttaagatcatcctggccaacatggtgaaaccccatctctactaaacacacacacacacacacacacacacacacacacacacacacacgccaggcatggtggtgggcatctgtaatcccagctactcgggaggctgagacaggagtgtcacttcaacccaagaggcagaggttgcagtgagccaagatcatgccattgcactccagcctggaagcctgggcaatagagcaagactccatctcaaaaaaaaaaaaaaaaaaaaagaaaaagaaaacgtttacagagcctttttctgttgataagtacaccttgaaatacctggctccgaagcacccattggctggatttgctgcctaacagtgtgctgtctcagcgtagttgcttcccagtgggtcccattggtgtcacgttattgtcagtctcttcagtctatcttaaaagcctttctttccttccctctgctgctagtaacctggcctgagccccctgtggtgcctctctgtgcagattccgctatcattcattctccacacttgttcatcctggacatgatgtggtaagaaatcatggcttcagaatcggtagacctccctgttgcaggatgtggatatttggtgagatttttcttggcatagccaatgtaaagaagactgttcaggtactcttgtgtgtggccagagcctgagtgctgcctatgcttccacctttagggctttgtgcattctattccctctgcctgggggacctgtttttttgcctgatggatgaattcctacccagactcttggattcatctctaaatttacctcccttagggaagccttttctgactccagaggcataatttccccttctctaaagttccatgcctcccttaatcatcatattatattgtgacttaaaaaatttatttgtctccccatttgactttgagatccttgaatcagggtttggttcatcattgatagtacctatcacagtttccagaggttgttggacttgggggatagccacatttttggcttcgttgaagcagaggaaatggaaggtggattcccttcactttggaatctcaacattctttttctctggcctccttcagcatgtgtccttgacacagttggggttttgatttattgatgttctgggtttttcatcacatggtagacagtgtcatttgttgtgatgttctagttggcacagtgcatgtgggctgctgagcagaaccaagtattgtcattgtggcagttacagtttttatttaacaaacatatagaaaatttaagcastttacatattaaaccatttgacctcataacatctttatgtgggaggtactgttagtagtcccatctttggccgggcgcagtggctcatgcctgtaatcccagcactttggaaggccaaggagggtggatcacttgaggctgggagtttgagaccagcctggctaacatggtgaaaccttgtctctactaaaaatatgaaaattagccgggtgtggtggcgcacgcctgtagtcccagctacctgggaggctgaggcaggagaatcacttgaacccaggaggcagacattgcagtgggccgagatcatgccactgcactccagcctgggtaacagagtgagactttgtctcaaagaaaaaaaaaatcctgtcttatagatgaggaaactgacacacagagaggttaaagtaacttgcccaatatcacatagctagtaggtgggagagccaacatttcaagccaggaaggagctctggctatgggctaacatgtaatttactcccatacttcactgccagcatcattttacctttaaccactagtagtttatctgtcttcttatttcagagaagggaggatgtctcagatcagaaccttgggccaggcaacagttactaaccagaaattgtttccattatattttccctattatcttccacttagacagttgaatctgattttctaattatggtagttatataaagacttctcataattattcaacttttgaaatagagctaatttaaagaaaaatatcaagtgaatagcagtaggtattaaatggtggcctatataacaaaagtcctgaaggtgatacattacatattaatggataggatattgtgagtagttgcttacagagggtgaagaattatgaatagggcagctttctggtttggccgatgtaattcacgtttgttgtgtttgcaaaggtaagggaacctaaagatggaaaacttagtagcaattgaggggataagagggcatagaaaggacatgggtagacatgttaatgttccattattaacctacattgcatgtgtattcaattattcagctccgatttggtttatatttagtgatctcactcataccaagggggttctactggatagcaaagttttatacatttgacttgctttgggcaataaacatggggacagatgataaaagaagggttatggagagccaaaaggcagttgctatgaagccatcacaaaagacactaaaccgatggggagcagagcaaaggtttgtctggaaaatacaagttaggctgaagttgggatgacccaaggtaagttttaaatataacggtacatgctacttgtattttcccaaatcactacttstgcacttctacaacaaacttctgctttctcacaggacttttatggaaggaagaaaagtaatttgaatcccttrggcctttttataggtccattgtcagcgtcttgtgtctgccttgacccatttgcattctggtggttgctgggaacagtaagataacctatgaatagtccttgtccttccagtgtgatctgaaaggtctttgctgctctgtgcctgaagagaacattgacaggtagttaatgatgttctcgggttgcttctagctctttgtagatgggggtggccagtcatctcatggctacttccttgactgggaccccttcccatattgttcctattagtttttaattccaagagggtgggctgctctctgtccttgctttagtgttgatgtgttcatttagacactgggcatgccttgtgagtctactggactgtgtttgtggaactcccatctcttcttgcccttttaacccttattcttcatgactgagaatgggccatgcttctttttgagcctaatctgttattgcatctgctgctcttaattatgctccttttatgcccttaattactcctcttggttttctgttagtttttcttctccttgtgttactctttcacccttagcatatctgacagtcaggatagtactgtggcaaactgtcagccagctcccgttgattggtaatgcttacgtagtgagctgtgttgggaaaggttgtgtagccttactcagactcggtagggtcaggaaagacagtgctggctgagcaacgtctgctatgagcatgggagtcaggagcagtgacatccttgcctctgtcttccatgtcttagaagcatataattgctagcccttttctgatctgtaacgtgctgctgtgttcagtttgagaaagttagagggggtcagcttggatgaagagaaatggaaatagttaagctgcctgcttagagctatctcttggcacaagagagatggagaaaatgacacatagaagtgttcaatattaaactgagagacagatatacaaagggaaactgcagaaatatactttgttctattcaccattctctgtcaaaaatctgcttgaattcccaatagtttattagtataagaaagttaaggaataaagagtatgcatttagttaaacctacttgtgtctgtcaggagcctgaacaatacaggcaagtataggagccagggcaactctttctgctctcctagacatgcatcaagcatgtggggggcacttgttatggagttgcaggcactatgctggactctgatcatacagtaataaaaagaaataccccctgcccttggcaagttttaccggtacaaatacagttgtccctaggtatacacagtggatgggttccagggccgcccttaatatatccaaatctgtgcatatttaagtcccacagttggccctgcagaacttgtggatagaaagtttatgcttaggttttgtatcctgtgactactgtattttggatctgctttgagttggaaaaagtctgcttataagtgcacttgctcagttcaaatccatgtttcaagggtcaagtgtgtatgcttggtaccagtttttcatgggaaagctcatacctgattattttctcattcttactccagcctctaagcaataacactttgtacattgcctcatgcataggagtttctctgtaaccattgctgaatgaattgtgtgctgtaggttgcaagtgccatgaagtttctaaaagaaaatggtcaatagagcctggtatggctttgtagagaagaagataaaggtagttgtgttaataatgagagagtagttgattaaaaaataaatacaacatcatcttgaccacttattggctgtgtaactgtgccaatccctttcacttctgtgaccctcattgtgctccactgtgaagttgggagtgataattttggcaagatttgtttattttagcattcctctgctatatagtattgtaggtgtattagtctgttctcatgctgctataaagaactgcttgagatttgtttttctgttgttgttgttttttgtttgttttttgagatggaggctcgctctgtcacctagatgggagtgcagtggcacgatcttggcccactgcaacctccacttcctgggttcaagcgattctcctgcctcagcctcccaagtagctgggacgacagatgcgcaccacacctggctaatttttgtgtttttattagagacggggtttcaccatgttggccagactggtctcgagctcctgacctcaagtgatccatctgcttcagcctcccaaagtgcggggacagcgtgaaccaccacacctggtcttgggcaatttataaaggaaagaggtttaattgactcacagttctgcagggttgggaggcctcaggaaacttaaaatcatggtggaaggggaagcaaacatgtccttcttcacggtgtggcaggaaggaaaagtgccaaacaaacgggggaaaagcctcttataaaaccatcagatctcatgagaacagcatggggataactgcccccatgattcaattacctcttaccgggtccctctcacaacacgtggagattatgggaactacaattgaagatgagatttgcagggggacacagccaaaccatatccctagacatagctttgagaatttaattaagacctagcattattttgagaattaaatgatataacaaatatgagataactttataacattctaaagtactacacaactattagttattattcttctttgttatttagaagcagctttccccagactcgtgagttcagggatctattcctttgygtctgtcttccattttgttcaagtgtccacaggaccctaaatgagcctgcctggcctggacccagtacttacaagggcttatgcttgtgactttcttcttcgggtatcttagcagcttgttggagaggatggagtctttatcagaggagagtctagagttttaacctttagaccatgccttaaaaaccaagggcctcagatatgaaaggatacttataagaagaaagtgcaggttactttgactcatattttgaagatggcatactaaacaacatctcagtgaaatatctgaacaaatattaaaattaagacatttaaaaatttatatctagagccagcatgatttttctaaggtttgggactttatatagtagcctcttatttagggtaaaggacttaaaatttgcaaatttgaatttttgatggaaggacattggtacttttgtcaagttggacacaggaatactcccagttacgttttcctgcaccgtggcagcatgattctcttaaacaccagattctgaaccgcagaccaagactgatggttaaagcaaacaattcctaatacctcataatgatttgtcccaaatttccttctcttycattaattatattttccttaattaattaattttatgttagaatagcgtgactgatctcttaaatatatccgtggcctatcttcaaattgcctagtttcggtggtgattctatttggagatttttctgtggcatagtcatggtatgtattgtgttaattcttgtacatttccctgggtttttgrccgtggtttgtttttttcagttctgcagttcactgccctctcactagaatttatacctttcctttagaagatatttagaaagggctggtagaaacatagctgtcattcagcacatgcaggtcctgttatatcacacttggatcctttcaacaggccctttaatggtttccctactggcattctcccctctttctaatccatcctacataccaagattaatcttcctaaaatactgtttccaytgtgctcaaaaacctttagcggcccccccatggcctacaggatgaagtccagacctcttagccagttaagtcttcctacagactagttctcacttattttctggccctcttactgtaattccctcttcaactgataggcttgctgaggcctcctttcttcccttctctgtgtctctgtttcttgtcccctttcttgcgatggcctttgaccctatctctgcccatccaaatcctactcatctggctttcaagttctagtccagttgatgaaatcctttattttcctggcagcatttactgtccttattgtatattatattctattatggttgcttgtgtttacaagctgtgcactgccctctaccccaatttataagttcctgaaaaacgtggcatctgtagacaggaatggattcttggtagttttatagctctgtgtgtaaatgggagctttaggattgtggtttatgatcattgaatgagatgcaatagacaagttatttattgtagtctgtcctgtcttgttcagtgactgagggtcttgtacaacacaggttttcattgagtgcttattcaataaatgaatagatatattaagtttattttgttcttcaggtgtgtaaattattttagcatttaacttaacatgttagcatgtatatagggtatggtttatttcctctggtgggaagagacacattcagaatgcctgagagtcatttatgggtgatcatgaattgtgtattctgcttagatcaggctttgtgtttagagctgagtaagttggtgtcctggccattctacccaccaaattgcaaagttctccaaagtgttacaggagctatttggatagtagatcaattaatagttttatgttacgtttcatctccggaggatgcaggctacctcaggtgacagaaagctacaggaggacaaaagatagctttctgcaaagacctgctaggcagtcttttttttacaaatattccagctggttgtcagctcttccttgatcatgtcatcattactgccgtattcatctgacaccagacaaaaagaaaaaaggaaaaagattggggcgggggttggggagggaattccttcagcgctaaaaccagtcttgtcacactgcaggggcaccgtgtttggttttaataatctcatgtcattattagtagtaaaatataaatctgtttcttagaactttttagaaaagaattttgaaaaggttatgaaatggtactcaatgctcatctttcaggaaagaggtggagggggtgttaacttgctaactgtcattacactgcttgttttcagtttcagattaatagcaggtggtatgcagttttcaaagcaaacaggcttttttgttcggttagaaaaagcactaattgtttactgtagcctagaatattttgtgcaaagtgacaaatggcaaggatcacaaaacatttaacatttaaaataaattgatagctggctaatattgtaaattttttaattaaaaattttcttaaattgatagataacattgtatgtatttatcatgtacaatgtgatgttttgaagtatatatcatacattgtggaatttttaaatccagctaattaccaaatgctttatctcacatagttataatttttgtggccagtgcagttaacatccactctctttgcatagtattgtaaatgtgtaaaggatcaagccagcacttcagcaaaatatttctcttaccatactaattgagttacgtgtcttggttatttatgcttaatatatttgtctgttactttccgtgaatatattttcatgcagctattttgatttctggcaatatccttttgtccactctgcagtacagtactcatctcgattagtaaatgcctctggagaggaattgcatcttagaagctctgcagatgatcagcccatccaaatggacggttaatacatgcttttaaatacgtctctgtgtatgtggtggcaggagtggggtggttggtgatgttatgtttggaataacatattaaggatttctatttttggattcttatttacaggtaagttttttttttctttaattaggcatttttttcccctcaacttttattttaatttccagggtacatgtgcaggatgtgcaggtttgttacgtaggtaaacatgtgcacaggtcatcccatcacctaggtgttaagcccagcatccattagctagtattcctgatgctctccctcccgacagccccccagcaggccccagtgtgtgttgtttccccccatgtgtccatgtgttctcattgttcagctcccacttataagtgagaacatggggtatttcagtttctgtttctgtgttagtttgctgaggttaacgacatccggctctatccatgtccctgcaaaggacatgatctcattcctttttatggcttttttaaattagtattattatactttaagttctagggtacatgtacacaacgtgcaggtttgttacataggtatacatgtgccatgttggtttgctgcacccattaactcgtcgtttacattaggtatttatcctaatgctatccctccccctgccccccaccccacgacaggcccccgtgtgtgattttgttccccgccttgcgtcaaagtgttctcattgttcaattcccacctatgaatgagaacatgcagtgtttggttttctgtccttgtgatagatagtttgctgagaatgatggtttccagcttcatccatgtcctggcataggacatgaactcgtcctttcttatggctgcatagtattccatggtgtatatgtgccacattttcttaatccagtctatcattgatggacatttgggttggttccaaatttttgctattgtgaatagtgctgcaataaacatacgtgtgcatgtgtctttatagtaggatgatttataatcctttgggtatatacccaggaatgggatggatgggtcaaatggtatttctagttctagatccctgaggaatcgccacactgccttccacagtggttgaactagtttgcagtcccaccaacagtgtaaaagtgttcctatttctccacatcctctccagcacctgttgtttcctgactttttaatgattgccattctaactggtgtgagatggtatctcattgtggcattgatttgcatttctctgatgactaatgatgatgagcattttttcatgtgtcatttgcaggtaggtttttaagaatattgagatattgcttagtatgctaactttaaaatgtgagtcagaataatctgtattctattcttaactcatgactagttagctttgtgatcctaaaagtgtctttaacttctaagggccttggtttctaaggtatattcctgcctctgccttaaatatgtaaaaaaaagttgtgggttttttttttttctagacacaaagtcttgctgtgtcatccaggcttggagtacagtggcatgatcatagctcactgcagccttgacctcctgggctcaaatgatcctcctgcctcagcctcctgagtcactgggactacaggcgcatgccaccatgcccagctgatttttttttaaatcttttgtagagatgaggtctcatgttgcccgggctggtcttgaactcctgacctcaaatgatccccccacytcagcctcccaaaatgctggcattacaggcatgagccaccatgcctgtcctttgttcaagtatttttgatagctgagaaatatggcatcagacgtcactcatgtttgtcattaagatgattttacatgtaatatactcacatgcagtttaaaaggcttaagggtgggaatctctttcctctggtctggaatctgatcagttagttcctcagttcgaatacttgcgaagagctttctagcatctgatcaaatgatgccttaatgaaaatcctacccacagtaagatgagttttaagtcagaaaggcaatatgtaattaaaacaataactatagccataagcaggccggatacccatgccaggtagttaagaatattctgacttccccagaaggcaagaccaaacgagaattatgaggttgtttttgttgttgttgttgttgttgggttcaaacctagagatggatctgcctggtgagctctcctgggaagagtcagaaattctgtgttcatgagacagctcttccagcttgtggatttcaggcaggtcacttttctgcaacttgtttccttaactgtaagataaaaaaataaaaaggttgtgtagaaactgtactacagttggccctttgtgtccacggcttctgcatctgcagattcaaccaaccaaggattgaaaatattcagaaaaaaaccccaatataacaactaaaaagaatacaaataaaaaataaatacaggataataattacttacatagcatttacattgtattaggcattataagtaatctagagatgctttaacatgtatgggaggaggtacatagtttatatgcaaatactatgccattttatatcagggacttgagcgtttgtggatttgggtcttggggagttgtggaaccaatcccttgcagatactgagagacaattgtacttgcttcacattgctgtgcagtgaggctttctagtgtgattatatagttacaggtctttcaaggtgacaaaggatgttaaaaattgtaagttgacaatggtgatcatgtctattcctgagtaccttgacagcaaaactctggtatgacaggagtttctagaatttgggattgtggagctctctgcctcgttttggtcttcccataccagagtattgttcacaaatagtgatgtgaacaagctaagtctttttttattattttttatttttatttattatactttaagttctagggtacatgtgcacaacgtgtaggtttgttacatatgtatacatgtgccatgttggtgtgctgcacccattaactggttatttacattaggtatttctcctaatgctatccctccccactccccctacctcacaacaggcccgggtgtgtgatgttccccttcctgtgtccaagtgttctcattgttcagttcccacctatgagtgagaacatgtggtgtttggttttctgtccttgtgatagtttgctgagaatgatggtttccagcttcatccatgtcccagcaaaggacatgaactcatcattttttatggctgcgtagtattccatggtgtatatatgccacattttcttaatccagtctatcattgatggacatttgggttggttccaagtctttgctattgtgagtagtgctgcaataaacatacgtatgtgtgtgtctttatagcagcatgacttataatcctttgggtatatacccagtaatgggatggctgggtcaaatggtatttctagttctagatccctgaggaatcgccacactgtcttccacagtggttgaactagtttacagtcccaccaacagtgtaaaagtgttcctatttctccctatcctctccagcacctgttgtttcctgactttttaatgattgccattctaaatgagatggtatctcattgtggtttttgacaagaaatggggaaaggattccctatttaacaaatggtgctgggaaaactggctagccatatgtagaaagctgaaactggatcccttccttacaccttatacaaaaattaattcaagatggattaaagacttaaatgttagacctaaaaccataaaaaccctagaagaaaaaaccctagaagaaaacctaggcaataccattcaggaataggcatgggcaaggacttcatgactaaaacaccaaaagcaatggcaacaaaaaccaaaattgacaaatcggatctaattaaactaaagagcttctgcacagcaaaagaaactgtcatcagagtgaacaggcaacctacagaatgggagaaaatttttgcaatctacttatctgacaaagggctaatatccagaatctacaatgaactcaaacaaatttacaagaaaaaaacaatcaaccccatcaacaagtaggcgaaggatatgaacagacacttctcaaaagaagacatttatgtagccaaacagacacatgaacagatctgatcatcactggccatcagagaagaacaaagctaagtctaaaccagccaggcctgaggactgagtcagacaagaggaccccctgcctccctcctgtggcctttgcctttgcctcagggtggcttctttaatgggcagatgatggcatgtctctcttcagtcacctccatcccrgcactgaggtggctgatttccatcctatcttgtgtgcgctgttgctttctattcagatgactcgtgctttgagcgcattctcttctttccattgctcccttctaagacttctttccctttttaccatgtttaggcctcaggttatcatttgttattcccaagatcttatctcttaacttattttccttgattagataagccggaggctttgtacagaggctgaaggttttcaagaattccctcactacgggtttggggaaaactgggatgttgtaaagggctgagtgttctgttgtactttcattaccagtgacccattgtggaagatttctttagaaagtaatttttatcccttaagtgattttccaaattctatttttctttttttctctctctgttttttgttttttgagagggaggcttgctctgtcgcccaggctggagttcagtggtgctatctcggctcactgcaacgtccgcctccccggttcaagcaattctcctgcctcagcctcctgagtagctgggaccacaggtgcccaccaccacacccagctaatttttgtttttttagtagagacggggtttcaccatattggtcaggccggtcttgaactcctgacctcaggtgatccacccgacttggccttccaaagtgctgggtttacaggccaccatgcctagcctccaaattctatttttcttagaatatagtagagttgcatcttaaggatttagttttaaaatcagcatgtaaggtaaacatttcttttgttcaaaattattcttttgagtccagcactgctagtttttttttccattctgggtcagtagttttctttagttgagcactagatgaaagtgctggctttcatttaaaggtttgtgaatgaatcttgtataagttcaaccactagagttccattcactgggaaaagatgctcactctgtgagggtatgtgggagatgagacagatcaagaggagagctgatgtatgcctccggtctcaggctttcttgtggagtaagtggagccctgggtactactgaaattatctctctccctccatcaccttgggcagttgagtttgcataagttaaatgtccgtatgatgtaattgtaccagcttctgtaaagaaacataaacaggatgaacatgcctgattattttctggcctttctcatttttatatagaagataagaatgagtgtgatttggttagcagcaatgagttgaggttattttagaaaagtggccccttgcagccccaatcttacctatttgagtttgccaggtggtatgaggttcaggaggcagcccagcgaatattgctaaggcttaggctctgttctagtagttgcaaacccactgctggtgccaagtcaggcagagaaggaacgctgctgccacacagtgtctgcccctggcatccaggtgtcacatacacacggttatttccaaatgttgtttaatgtgtgcccctagcatcctagcagtttggcagaagaacatacacatttattgaatttcctctggcctagctgcttagtagattccaaatgaataatagaagaaatgttgtggtaaatgtaacgcatgaaatgtgggtgttagaggggtcttagatattatttagcctatcctctgaattgtacagataagagacagatccagaaaggtgaggtgatctgctatagaccatgagttagctgccaagatggaatggaagctttaattgtctgatgcctattttgttgctttttctacttgatagaacttatggatcaaatagtattccataagttcaatcggatttactctgcctggcctgcataagtgaagcaattctaaagggaactgatacatacaaacacatgtaaacctcattctctgctggtttacattctgtttgaagtggaagttgatgtttgctgtcatcattttgttttgtgttaattaacaaatctgattatgtggcggccataggagcgtgccctttagctctatgtttaagagaacctgcctcaaagggtgtggtgcagttagctgacagcatcgagctgctgcacctttgggatccaccatgcgctctggggctccccatcagcctggctaagattttcccagagctgcgtatgatcttccttccttccctcctgttgctggtgtcagacctgcagcacagtctgaggctctcctgctttcttctgctccttytytcctccacccttcccacacatgcccccataatcagtctcttgtactttatgtcttagtgagaggtgacagcgtgctggcagtcctcacagccctcgctcgctctcggcgcctcctctgcctgggctcccagtttggtggcacttgaggagcccttcagcccaccgctgcactgtgggagcccctttctgggctggccaaggccagagcccgctccctcagcttgtagggaggtgtggagggggaggcgcgagcgggaaccggggctgtgtgcggcgcttgcaggccagctggagttccgggtgggtgtgggcttggcgggccctgcactcggagcagccggccggccctgccggccccgggcaatgaggggcttagcacctgggccagtggctgcagagggtgtactgggtcccccagcagtgccagcccaccggcgctgcgctcgatttctcgccgggccttagctgccttcccgtggggcaaggctcgggacctgcagcccgccatgygtgagcctcccacccgctccgtgggctcctgtgcggcccgagcctcctcgacgagcgccaccccctgctccacagcgcccagtcccatcgaccacccaagggctgaggagtgcgggcgcacggcgcgggactggcaggcaactccacctgcagcctgggtgcgggatccactgggtgaagccagctgggctcctgagtctggtggggatgtggagaacctttgtgtctagctcagggtttgtgaatgcaccaatcgacactctgtatctagctactctggtggggccttggagaacctttgtgtccacactctgtatctagctaatctgatggggacgtggagaatctttgtgtctagctcagggattgtaaacgcaccaatcagcgccctgtcaaaacagaccactcggctctaccaatcagcaggatgtgggtggggccagaaaagagaatataaaagcaggctgccccagccagcagtggcaacccgctcgggtccctttccacactgtggaagctttgttctttggctctctgcaataaatcttgctactgctcactctttgggtccacactgcctttatgagctgtaacactcaccgcgaaggtctgcagcttcactcctgaagccagggagaccacgagcccaccgggaggaacaaacaactccagacacgccgccttaagagctgtaacactcaccgcgaaggtctgcagcttcactcctgagccagcgagaccacgaacccgccagaaggaagaaactccgaacacatctgaacatcagaaggaacaaactccggacacgctgcctttaagaactgtaacactcactgcgagggtccgcggcttcattcttgaagtcagtgagaccaagaacccaccaattccggacacattagcatctgcattccagaagacctgaaccgacatagtatacaggtggatttgaagttatttttagtgtagtgtgcaataatggttgcagaaaatctttaaaaacaaatctttatgttgaatagggctgaaaattgctacaaatgtttgattagtmattttttacattttcttctcttaacttcaagccagcatgagaagaaataaagtcagagcaatgggaagtacactgctgtcaagaggcaggagtcccagaaccaattctctttctgaccttcaagaattcccttagcagacaaagagcttggagcctcgcttacttcctagaaaatgaactgagtgatctctggatgttttcttcagctctgaatgtgaaacagattgcaagaaaagaggttgagtggccaattggtcccaatagtgtgaacattaagtctaaatttaaattgaacaaatacaagttagtacaaagaaaaggaattcagaagttgtgcggtaattgtctccatgttgttgtccaatttacttgtcagttcactgacaccaaataccttggtgcagatagtgcagtttaactggcgtctctatgtcagagtgcttctgagatttttaatctccatggtaaaacaagattatatgtaagtgcctggaaatggaagttttattccccacaatatggaataagaagatagagatatttgagtataattgcaccttaagttatgtaactcaaaatgcttagtatttcttcccactctgtactcacaacagctgtggtttagagttgagaccaccctgcttttaccagtgatggtagcattcagtagttgataacgccaatctgtgctgcagctgcctttaatagtaaaaaccccttcctgctctaagtccatataatcacacagttttatagaatatggcctcttttaccactttttcctctttcagtgctaattcttagctttgaagtttttaagtttgctagtgatactgtgacatacagtccttaatttgttttatagaatgtagctttttggagctgtgttttatattcagttgctgaatttgattcaccatggtcttttaggcttgttagctgtttatattcacttgtgtctttcataaacatgtagtagctgaagccattgtcattagagaagataagactgcttgtgttagaattctgaaaccctagccattcatttgagttttgattcagcatttatttaatgtttcttatgggttggggattgtgacgagtgttcttgttttaaatggatgttgggcggagagcacagagcatatgccactgaactgatgcagtgatatgtttcagcacctttcatgttgaaatgtcatgttactttgtaacatgaaacttgtaagttataatggaatcacaatatgccttgttctcaggaattatatataaaatatttaacaacaggtatggcatagtcactgcccaagcagaacaaatgttaaacaaccagaaccagtttgtgtcaatggaatctcagccttgcctgatctgaacataagttaaatggattcaaagtcttatatgtgatagaagctttgattctagttttaccagaagttgtagaaaagaacgagcttttgtacatattttatatattttctcactggggaatgatttcattacattacaaagatttgagccactctcattgcttttgtaccttacgcctttgcaattcaacccaaccaccagatgatagataacacaagcagacccaaccccaatctacaatatgtacagacatttattgaacaaaactttattagaaatccagtacaaaatgattcatatgacccgttttgtaaaactcaatgaagttgcagttttctgttcttttaagtattttctttgcaagaaagtttcacctgagacagatgaggctttttgtatttgatctcaaacaaccaacaatcctcttgtagtagtctgttcttacactgctaataaagacatacctgagactgggtaatttatgaagaaaaagaggtttaatggactcacagttccacatagctggggagacctcacaatcatggcggaaggcaaaggaagagcaatgtcacttcttacatagtggcaggcaaagagagcttgtgcagaggaattcccctttataaaacaatcatatctcatgagacttattcactgtcatgaggacagcacaggaaaaaccttcccccattattcagttacttcccagtgggtcccgtgcatgacacgtgggaattaggggagctacaattcaagatgagatttaggtggggacacagccaaaccatatcacctcttaaacctgtggttttccacagaaggcgattttgcctcctaggcaacatttcgcaatgtctggagacattttgcttgtcacaactcagagtagggggtagtgctgctgggctgtacggattagaggccacgagtactgctaaacattctacagtatgtaagatctgtctccataacaaagaattatctggtccaaattgttgatagtgccaaggatgagaatctttgtcttaaacacatggctggatacagagctttttagggatcaattctgaggtaccactcctacagtaaaagctagaggcctcattggatttctttaacctgttcatgcagcatatgtaggagtgtctttataatatggcagctaattctgatatctttgtgagagctctcattttactgataagaactcatatctaacatttatcatgctggttaatggaccattttcaccaataaaatcccatttccagcagtcattttgctaattagcaaaacatcactgttgattaagacatggatgactgaagcccttctagtagcctcctacttttygagcttctaataagaatacttgctgattgctcctggattgtgcattcctgagtaacatgctggcagcacctaattcagagcttacataataatgtacatacataataatgtacacataaaatcacactgtatatcatgtggtagtttgaactaaatcgtagacattaggacagatttccttcccagaagctgtacctacttactttgtacaaactcttgccctcagtgcagttcatttgattcagctactgtgtactgagtgtttccttgtggaaagtacagatctagcttgagccaaagatacaggcagagaggaggaaagcccttctcttgtctcagagagtttacagttaaggagaggagtagtgggtaagtaagcatgtatcatacaaggtaaaagcaaaaacaagtgccataggaaacatattgaaaggttttattagctgcaaaagtaggagaagcagctagggtatgacttggcaaagactctggaagtaatatccaagagtggtttggaacatgggtgcagggctgggtcagtgcatggtratgtggtgattccgaagagtcaacatgggcacccaagtcttctgtctcctcactgagtttcttactgtgtcatagtgctaataacatccaaattatgaaataaaactagaaaactggaggagtaaatgtatagtttacaattgttccctctctctcaagctatagaagaaagtttataaaattggttctaatttcatccagcactgcattttgcttcttttgttaagcgctatgatatacataaaagttatgagagaacttctgggataatttaaagcaaaacaccaccagatcactttctattcaaaatttgtgtactccaacaacctcctgtctttattcaatgttggctttactttttaatttcaaaaatcattcatttttggctctgcattcttatttaagagaatagcagatatacttttgcattagtccattttcacactgctataaagaaatacccgagactgggtagtttataaaggaaagaggtttaattgtctcacaatttcacatggctgaggaggcctcaggaaccttacaatcatagcagaaggcaaaggggaagcaggcaccttttttacaaggtggcaggagaaagagcctgtgaaagagaaaccttcagacacttacagaaccatcagatctcatgagagcttgctcttgatcactggaactgctcgtgggaaaccgcccccatgatccaaccacttcccaccaggtctgtcccttgacacgtggagattatggagattacagtttgagatgaaatttgggtagggacacagagccaaaccatgtcattccaccctggcccctgccaaatataagattctttttacatttcaaaattaatcaggccttcctcacagtcccccagagtcttaactcattcaagcattaacccaaaagtccaagtccaaagtctcatttgagacaaggaaagtcccttctatgtaggagcctgtaaaatcaaaagtaagtaagttacttccaagataaagtgggggtactggcattgggtaagcgctctcattccaaatcagagaaattggccaaaataaggaggctacaggccccacgcragtctgaaatccagcagggcagtcatgaagtcttaaagctctaaaataatctcctttgactccatgtctcatgtctagttcaccctcatgcaagaggtgggctcccatggccttagatagcttcgcccctgtgtttttgcagggtactgcccccatgctgctctcatgggctggcattgagtgcctgtgacrtttccaggtgcactgtgcaagctgtcagtggatctaccattctggggtctagaggacagtggccctcttctcacaggtccactaggcagtgccccagtagggactctgcgtgggggctccaaccccccatttcccttctgcactgccctagcagaggttcttcatgagggctttgcccctgcagcagacttctgcctggatatccaggcttttccatacatcctctgaaatctaggtggaggttcgcaaacctcaattcttgacttctgtgcgcctgcaggcccaacatcacatgaaagctgctaaggcttggggcttgcaccctctgaagcagtggcctgagctataccttggcctcttttagccacggctagagctggagctgctgggacycagggcaccaagtcctgaggctgcacacagcagcagtgccctgggtctggtccaggcaaccgtttttccttcctaggcctctggacctacgatgggaggggcttctgtgaagtcctctgacatgccctggagacattttccccattgtcttggtgattaacattcagctccttgttaatcttacaaatctttgcagctggcttgaatttctccccagaaaaataggtttttcttttctaccacatggtcaggctgccaattttccaaacttttatgccctgcttcccttttaaacataagttccaatttcacatcatctctctcaagttcaaagtttcacagttctctagggtaggggcaaaatgccaccagtgtctttgctaaagcatagcaagtgtcacctttgctccagttcccagtaagttcctcatatctatcttgagaccacctcagcctggacttcattgtccatatcactatcagcattttggtcaaaaccgttcaacaagtctctcagaagttccaractttcccatatcttcctttcatcttctgagatctccaaattgtcccaacgtctgtccattacccagttccaaacttgcttccacattttctgtatctttatagcagtgccccactaccttggtaccagttaactgtattatttcattttcacactgctataaagatactacccaagagtagttaatttataaaagaaagagatttaattaactcacagttacgcttcctgggaaggcctcaggaaacttacaatcatggtggaaggcaaagggaaagcaggaaccttcttcacacggcaagccagagagtgaaagagcatgtgaaggaggaaccgtcaaatgcttataaaaccatcagatcttgtgagcacccactcactatcacaagaatagcagggggaacctcccccattatccattcacctcccatctggtccatccctcaacatgtggggattatggggattacagttcaagataagatttgggtgcagacacagagccaaaccatatcataccccaaggtggcaaaggacatgatcagttggctgttttctgtatgttattagtatgaagaaacttaaaatgtcgatcagggctcttgaaactctgagaaggggaagacaaaacaagcaccaaaaccagctgccttgatctaatcctgggtgcttgggtttgagttccagacttcagattaggaagtctattggaagaatgggcttttgtatttcatctctctggtctatgttcaccttatattaggtgttatagtgttagtggacatcagtgcagtttaacatttccagctgggatctgcttatagctgatgtttatgcctccaaatagtcattgaaaagtatgataataggttggacatcatttaagttcacctaggtgagttaccctactgaaggtcaccctctgatatggtttggaaaacagtgctggaagtataatactttgtgtattaatgccacttggtaaagactcattgaaccctatgtaatttctcctaacaaaagcctagaattcaattaattgaatacatggctactttaattattctgttaacagctaattgatattcacagtgatcatgttttacagcttctaaatgcaatattmccttacaagtttatggttcggcctcctttgatatttcagttctttttctgttttatgtcagcatataattttcttaggttcgtatatattgcacctcatatgtagttttgacaagaaataaagctctttttcctactcttatttgctcatctgcctatgtgagttgtaaaacagattttgcctaccatagattatccatattatagtgaaagattagtctttctcagttctttatatgtatgcttcagattgttaaaagatttagaatgaaaggatatatggttacagggatgtcctgtttatattgttaagagagttgttgccttttctaaatcctagtaatctctggcttcatagtcttatctcatggaaagttgagtaggtacctgctttgttttttaccctgagctattaaaaatggaatactgacatttcaaggaactttgtcatttaaaatatacaagctttgcccatagcacagaaccttgccttaaaatgccttgtgcttgatatacaaagtaacagtacattatctgtgctaagtggttgtgttgtcaccgagttcccaatgccatgcagttggtgccacacttgagtccccaggagcaaccagggctaaaagggcgtagtaatgccgaaaagtgtgtgctatgaagatttagcctggactattcatgggaaggtaaagtttctatcagcccagtatgttatattcataatcccagttttctcttgtataaactttattatagcctttgttgtaaagccccttcaagtctattctgaaaagagacaagtctttaaggaagtaaacatacgtacttcacttttaatctagctatcaacaccaagttaagacatcaaaatgttcgtgttgggttccttaaacttgatttccatattttctttgtttctcttgaattataggatattctagttttccataatgatccacttaagtacattgtgtcacattttccagcccagttacgttatcccgaatctggcaagatctgaaaactattcaatacatatttcttctaggaatagcaaatagtagatggggaaaaatgttttatattattttttcccaagatatggttctatatcaataaataatgttgtagtcctctttgtttttatttgttcatttacagtgattctctgttagagagctctacggagtttcatttccttgcagtaggtttactacttttttaaagttgaatgtgactctccatcctcagcagctattagcttagtcaatgtattctaggcttatttaagtttcaggattcatatcgtgtgacttttcctcctagcatcatattaactgtttcaaagcaatgtgctattaaagtgttgtggccatgtttcttactttgttattcttcccagtggatctcaaactattgattctgtttgcaatccagggaaagatgtgtgctgctggcctataacttggtggtgttgggtcttaggaaatattgccctctttggtctttagtgtacacatctgagctttggacatgttattttaaactttttcaaggatcatatcttagaaaagtgagtgagcatatagctgtacaccctttatttaggttgtaatcagctcttcaaaattaaatttgttgattgatgcggtgtcctcagcaggctcaagtgttgaattctcttagtgttttctaaataatgataatggaatatccattatgatttyttttgcattttaaaaaatctcactttgtgaacaaagggaacattacctagtatgagtgttttaatagccagggtagataatgccatacattgaatgggggagaaaaccaggtgctgatacattcaggatttagtaggtaatacaatttccatgctatctataactgttcaagttgttaaattttttgaattgttaatataattatttaataggttcactcttttagatgccctcagtgctacatttccatctcatagtcaagtgtaaacatatggaatattgatgtttaaaagattttttctgatcacagaagtactaactgttcattataggaaataagaaacagtccaaataatatatcccactacatatatcataactactataacatcttaccatactttacacttttttccatgtccatataaacaagtactcaaccttctctgtccctcccttctgctcctccctcccccatttctcatgcaaaattaggagcttagggcacatgctattttatgacgtgttttttttctcacttaatattttgagttttaaaaaattaattttctgttacgatatcagctttcaaggactcttactgtttgattatatggctggatcaaaatctttataatcaatatcctattgtcagattatatcttatttacccaaacatctattgttcactcttagttgttgctttaaataatgctggttgcattttcttagaygtaaatactcttatattttaatatttgctaggattgaatgcctggaagtgaaattggccacataagaagattaatgataataatgatttatacacacattcacacatttatagttattattataaattttagtatacttaatttatattcatttttaaaatttatgtagttaaattcattctttctgatatacagttctatgagttttgacaagtgcatgtaattatataaccgccaccacaatcaagaaacatattcatttgctcaccttaaaaaatttcttccttttgccccttgactataaagtatgtttctttttaattctgaacatataaagaagcaaaaataagaaaatagataccgcccataagtctaccagtctgctgtaacctctgttgacattttgtaaaatatccttctgcttttttgtttgtttttgtttttttatttttgttttttctcttcgtcttccttacaaaaaaagaggttatactgcctttatatagctttttttcttttttcttttttaagtggtatactttgagtacatatttcatttagccattggattggtttgtttttatttctctgcaattctaaacaaccttgtaatgaagtttaaacaaccctataatgaatatctttgcatatagtacttgagtaccataagtagagtttttagatctggtacataggtatattttaaagacttgttaattttatccagttgatttataaaatgggtataccaatttatattctgaccagcagtgtataggagagcctattttcttatatccttgccaatattgagtatttttattttacatttttgttaattggtagatgaataatgacaccatattaccttaattggtattatctgatttgatgtggggttgggtttttctcatgtgtttattatttgtatttttcgtgtgttgatttctagtttatattatttgtgtatatttcttttgttgtttttcggtggggagaggagtgggggatgaggcttcttttttcagtgctctatatgttaataayattaactctcccagttacatgttgggatttcttttcctgtttttgttacttgcttcttctttggattttataatgcttttgttttatgcagtttcttatgagtctattctttttcattttctttatttatattttgggtttttatgttgaatttaaagaggtcttttctctttagattatgtagtcatgtatattagatttgaaattcatttactttttgtttcatattcttaacagtctaataaaatttttactatgttgtaccagggagccatagattatatacttgtatatgaatgtactttaatctaatcttaacattgtatttgtttttatttattcatatgcttccaagcagcatgtacttttcattgaaatcttctattcaaactgtaacagcatagtgacattaaaatgtgtctcaagttaagcatttcctttttattttttctccattaccttctttggcttgcattttaaatattatccatcagattttgtgtgtgtgtgaaattaggaaaaaacagtacttatgttgttaaataactgtttattttatttttaacatgctgcaggatattgaagacaaagtaagtagcaaaacaataacctataaatgtgcaagtagttcacctaaactaagcagatagttgagtagacaggcaccttgacatctgaaacagacaatacttgatcatttagcaaaagaattttggtgaaatagcacaaggatgggaatgcctaaatatatacttgttaatggatggctggatgcatacaattaaagaaatgtatacactttacatattaaaagtaatatatatactttgtttattaaaagatacacacaaaaaatatatatatctatatatagtgtgtgtgtatatatatgtatatatacacacatatatacatatatacacatatatatacacacacacactttcttataagttgtagtcaggcatatattcagcattcactgagcaaaaaatatgttgaaaacaaaatctaactcagagtgatataggaaagtctcatccctcagagataaaggccaattaaacataatattcaagataccaacattagtttaagaaatgcatttttttttacaaatcttgaaaaatatcggtaagtagccatcttcatcattgtttaaagaaccaaaaatattatacttgttttgattttgttttaaaaaatcttgtaaattgaaagtacaataactaaagcttttaaaattacttttaaatatggttatttattatgattattttgaattattgaaataaacaattatggtagtttttgtttccactcttccataacaattaattctttacataaagggaaatagaacaatgtatgtatttatttgcaggtaattaactgttcttaaacacaagatttatgtacaaaatgttatttaggcattacttttttgttcaaaaaagagccatgtatcttatgcccaggataaaattaaagtttcattgtacaaaatattaatccttgaaattactctttgatagggaagttaaataagagtctgttatgtgctgtattctgacgtttcctaatatatttggacaaaataggacacagctgttacagcgggaaaaaaaatacaatgcggacttcttctttacatttaaatacagcaatcatcatcttaatgtttttctatggcagagacctaatagattgcaaaaatcttcagatttgtattcttatttctaatgcaatttattcttgacttttgctttgctgttgctgctttttcttgatatagtatattcctcatttctttttttaggctaggcagctggaagagaaagaccgagtgctaaagaagcaggatgcattctacaaagaacagctggctagactggaggagagggtatgactattttttatcattgattctattaccacatctgctgttttcttgtatatttatttaraaattaataaattagaacttcaactgcttttcctggttgtaaagtggccaggaagtgaagaagcaaagcaggtagttagttcgtcctctgtaacaatgtcattttttctttggtcactttggaatggttgcgttatttgttcactgatgcattttaccacttgggacctaccgcaaatacttttcttatatgtttagaatctacatagcctccaggtcagacagtacactgctactcttatctctcccagacattgactaaactttagtacactcttaaaaatggtagtgttttaaaggatatatttatcttcttttatcttttctttttttgcttttttctttttgaaatggaatctcactctgtcgcccagactggagtctagtggcatgatcttggttcactgcaacctccacctaccaggttcaagtgattcccatgccttagcctcctgagtagctggaattacaggcatgcaccaccatgcctggctgatttttgtatttttattagagacagggtttcaccatgttggccatgctggtcttgagctcctggcctcaagtcatctgcctccctcagcctcccaaagtgctaggattacaggcatgagccactgcacctggcaggatatatcttctttctgaaaactcagtttcactgcatttgtagtttagaaatgaatgtctccttcaggagaggtagataggagctgaatagcagaagttaaacatgagttaggagaaggaaaagagatayggcgtcaagtcagcatgggtctagwattggacagagatggacaaaagaaggcagtgagtttaagaatgagagtttgagcaccttatcagtgcccttttcaataaagtagattggttatctagattaatttcatacatagaccatgaggttgcagagtaagctctctctcttttgaatgaaaccctccaaattttatttgttgaaaatgttatttgataagaaaataggaaaaaataagaaatacactattaaccctcactcagtacagttatgtatatgttaaatgtgtttgctgtctccatatgttaccgaactgagtacctcttgaatgtagggagcattttctcattcatgtagcagatatttacttaagcaccctggtcttgtgccagcagctatgtactagtgaagaaaatgaggtaaacatctgtcttcatggagcttaaattcaattaaaaccagaatacatattgtatggcaggttatgataatttcgggaggaataaaatgggaaaagagagtcccagggctggggtttaggcatggagttgggtacagagggaagaactctctgttgagatgacatttgggaagaggcctatggtaatagggaagcaagccattgccaaaaccgtgaagmaggcgtgaacttggcatgtttgggaaggctggggggtttgggagcagatgaaccctctggctgctgtgttgggcaagagttgaagcaacagagaattagtaagaaattacggcagtaattcggaaaagggatgactggtgtgggtctgagtgccgacaggggaagtaatgaaatgtggttcggtattttaaaggtagagctgaccagatttgctgatggctttgaacatgagtgaagaaagaataaactctaggtttatggcttttataactagaaggtttttccacaggtgaagattcttaagatatggattgggatgttggtggtggaggaaatcaggagtttgattgtggatatgttaagctcaggacacttaagacattgaagtagagatgttgaataggcataaagtgaaatggtttagagaatgtcagtaatttttcctgtaaagggctggatagtaaatattttaggctttgcacaccacatttggtttctgtgcagctccccacctctgcctttgtaatgtggaatcagagaaagccaactgtaaatgaatgagtgtggctctgttctaattgaaagaccctgaagtatgaagctcatatagttttcacacatcacaaaattttgcttaaatttttttccaaccacttaaaaatgtaaaaccaaaaacaggtactgggcctgatttggctccctcrttgtagtgggcagaactctgatttagagcacaaggctctgatgtcagatgccttggattcaaatttctgacctggcatttccctgctgtgtaatgtggagcatcttatttttcctctcagttgtttcatatattaagtgatgatttaatagtacttacctcacttgttaaatgagctaatactcataaagcacctgtaatagtatgtagcacagagtaaccattcacccactaattgttttacttctatacctagagcattgtacatggcttagagtttgtattagtctgttttctcactgctataatgagctgcttgagactgggtaatttatgaagggaagaagtttaattgacccacagttctccatggctagggaggcctcaggaaacttacaattacggcagaaggtgaaagggaagcaggcacctttttcacatggtggcaggagagagagaatgcgtgcaggggaaactacttttaaaccatcagatctgagaactctctcacttatcacaagaacagcctggggaaaccacacccatgatccagttacctcccaccaggtccctccctcaacatgtgggtatcacaattcaagatgagatttgggtgcagacacagagccaaaccatatcagagttagtaaatgttaaatgagtgaaagtgaaagtttttgaggtgatatacttggcacctgcttttcctcacccaatgacagttttctttgtcatcaggttttactatgttaggtaccttataaacttgcctttaattattgtcaggttcaagaaaaggcactgaaaaatattctcccatttctcatagactcaccaatttgattggtacaaacgtctgagaagatttgtttctggcagattgaacttatctgctcaacaactgctcaacaaataaactgttaggctttttggcaccaagtagaacaagtggtagaagattagatagacacgatatgataagatcaaattattgtgaatatatatatatatatatatataatatattatatatagaatatattgttttcctttttgaagatcagcctgggaagtggtcatcctacagttgaaactgaaatctgagaagcaccagtgagcttagaaagctaaggtggaatatatacactgctgttacttaatactcgataactccacattaagtaaaagaaagaatgttagacaaggagtcagaaggtatgcttttgtcatstggctgttcggcaattcacctaatcccttgtggtgtctggttctttatctgcaaaatggggatatactctgttccttgctcatcttcatggtgattgggggtagatcagatgagtgtgtaaaagccccttgaaagctggaaagagcttaacaaatatcagctgttgccatgaaagaatatttgcttactttccattgtgtataagataacgataatcatakaattaatattattcaacttccttgtgtcttttgcacatttctgtacagtcctgtttttgtttgttactgtcattctcaaagtactcaagttgaattttgtcactttggatttcttccaggaatatgtgagagacatttaggtctctaatgatgaagtattttctaggcgtaatgcaaaagattgtaaagagattttcttctgtattgtgatgrcagtgagaattacaatgtctaactatttctattaggaattctgcacacacttttgtattagacagtgtaaaaatgctgaatccattaattcgtattgtaagaaatgattctaatattaatataatttgcagaatcatctaacttactaggaaatccaggttgcctgtggtttaaaagtggacataagcacatatcttttcctcttttaactaaatgaagtgatgaaactataaagtagataccagatggtgtatcattaatggagagggatgttgcatcaacgagtcttttacagaatcattctgagggagattcctgagataaccttaccatctgcgcatcaactagattaacacagcaattgtacacgttatcactttttgatgacttgaactattcatttatattggcttgatgcagatttcttttgagagtatgaatcaaagtgcactgaacatgtgaagtacatttagttctgtaatacagcttgatttgcctcttggatctatttcaataaactgcttgttaattagataattcccatgtgtgaatggaactccctctacccaggtatttatattggccacttcacccaggagtctgatataattttcttctttcactaacttgttaggagtaataagtgtaatttaactggacactgatttcaccctttttagaatgagttttcaaaagcagcgacactttactgagagagaaggtcaaagccatttgaaaagattttttaagtccttatttcatactcaaatgttgctaagttatcaatggcatctctgtgaacattagagatatcacatttaggtgtcttgcctaattgaaagatacttagagagtattaattcctgattattggtataagagacatagatagtattaattcctggttggtgatttcatgagaggaagttgagaacagctttcaaagagaaggttcttaagtgtttctacgaagtagtctccaagtctcacagggaattctgttttttttgttttcccaactttatttttgtttgttgtataattgacaaatatgtccataatgctttatacctctttatgatagccacattttgtttataatacttgtgattagttatgtgtgtttatcttgtacactcctgaggacacagagctaattttcatatttctgtattttctatttttttcttttgtttttgaggttccataacttgcatatttctgtattttctacaaatagcacagtgaatgaatcctagattttctaagcttatactatgaagttatgtttatgcaattagtgtatagttttaaaatacacacaaatgtttagtatcttcttcactagccatttaaattcataatttaattctatcctgggagaaagtcaagtttaactttgaatattttgttattgtttatagcatccttattaacatgctgatgataacatttactgagcatttacattgtgattggcactttgcatggattgtctcattttatacttaccaacaaccctgtgtggctgtgcgccctattgtttaggtgaaggcttaaagtaattcacctaagaacatacagccaaaatatgatagatctggatttgagccaggttccatgcttaagcatttagctgctgtctagtaccaacttgaagatgttcattctgtatgtaaatcctgctgattgtagcattagttctttgtgtggtaagttagctcttaccagcttctaatacaactttttgggtcctgacgttatgatttgattaatgctacctcataacctaaaagtgttaagcattcaaaaatgcataattttctcccagaatttgacatttcctgggaaaatttgaccaaaaaagaataagtaaggtcttattacctagcgattacagcatgatacccctaagagttattttaatatcgagttgtgcttctttcacgttgaaataagaaatttatagtcattaaagcagcttaaaaatttcttcttgaggtcttcattcacttgctcatactttgattaatactgccttccatcttttcatctctttscatcttctggaaagaaagcaaaccttttttttttttttttttttttttttttttacttttgacaaagtgttctgatagttatttcatcagagtttggatcgttgtgtgttcttcaggaaaatgtgtatttttcaggagtctgttggtcctgtgggagggaagcgaggggtaggaccgtggttatcgtgtcatagagggcagaagccacagtctcccatgggtcttccaggatgaagggccttgtctccccaggacatgttgaagacttgagctctttgataatgtgttttgcatgtataacttctccattatgaatttgaattgatttgctctatggcatccactttgctcttggctttcctaagaatgatggggttttggctcagcatgaagccctcttggcttgaggagctgagggaaatcagaaaatttagttaggtataatacaatgttgagtaacccagtgatgtggcatgcatttgttctttgagaactcctccctacacctccccccactgcatttacaatttatttgcattcttaaatatgaagatatgtttgtaagatgggccacttaaaatattattctatgtgctgtatgtaaaaaatggaagactaattttattaggttagttttccatggcatataatcaaatagatgcctccttgtctataaacatattacctattattcatcatgtgcttactatattgaagatctgctaagtgtataccatccttcaaaattctttcccatgtcaggatctttgcctttgttgttccctgggatgctgtttcccacctctgaatagctgtctctgactcccttacaagttttaggctttcctaatgactatcagaaactagacttctgaaccctgtctctaactgtcatatcaacctatttatttgtttgaaagcactcttccagatctataattagtttactcattatttgttaacttgttcatgactgccttcccagtcatccagtagaagttccacgaaggcagaaactttgtcttagacacacctgaatcccttatctggtgaatcataaatgccagtgtggcatggattgctttcagttttcagacacctctggatttcagcagcaatttgcatacagactgcaggaaatctcacagaattaaaagggagagagaattagataagctgggcaaaagagaataatacaaagagaatggtgaaaaataaattgccattaagaagaaaagtatattactagtttgtcacctgtggagagagttgctaaytaaattctaaggtcatgcttacatcaaatgagcaatttttaaaagtctctcacttatggcagatgacatgtcttttattgcatcataaagtgttgggctcatctgtatgattaattggcttttgattgtgtgtgacttcttctttctcaattagtacctttgcttctgtgctcctctgtgtgaagcttggggaaaaaataatgccaacaatgataataatgagaaatgacaacagaacaggttattgtcagcccagagtgcttcttatgggaagaaattatgtatttttactaccaggtgaagtctgtcattgtaaaatatttcagtgagtgaagctggatcaaccttttcaagggattaatgcaggatggattcacaattagtctactgacatctgagatactaaaatataaacagtcgttttttggagatggggagataacttaaacttggtttatgggattaagaaaccgtttgatattcccccctgcgacgtgctttctaaacagttgccaatgattttaggtgatgtggttaactcattttggccctgcaatgtgacagagtaaatttaacatgagagttaaaaatgtaacttcctggtagatgtgcctacgtgggttatactagtttgcacttgtcaacctagagagatagactattcctttgacactgggaaattttgtactggcttcttcattcatgtggagatcagggcagattccctgtggtttctatagttaccgagagctacacaaacagagatgaggttctgtagtccacaggtttggatgttgaagttaatagaagcctacaccacttttaattgtaatgtcacaagcaacagaggttttattaaagtggcttggattgtgtacattgagttactctcaattttttttatcatcaacaagtaatgatagtttaagtaaatgcacttagatgttaattgttctgtagaaaaatgaataaggcccagtatcagcatatcttttgttaacataattgacacatttataacttaggtgcaaagatggaaccattttacaatctacctgctttcctaaaggaagtttattattgcagatattccaaaagtagcaagcaagatattttttttccctagtttgtgctctggggaaaaatatcaatacagtatagtaggatatgggggtcttatccttaattcattattcaacaaatcctcaaaatgcgttggcttttctgttaacctctctgaaatttcgaatgggaaatgtggtttaggtaaccttgagctgcttttcaaatctggctttagggatatgagacttactttttttctagggtgagctgttaaaagtgcatccaggtaaaatgatccctttaactggagtcagtttttctatgtctaactttagaggaaagatttgcaaatcatgggatcagcacttaatttggggctctatttaccatgtaggctgtcaagaagtattaaccttaaggtaagatgagaacatggagtacaaagctgtgagttgatggcatacagtacagcggtattaaatagcattatccatcctgcttgctacagtaaataggatttcactattatgatgtgtcagggctttcagtaaaatcaaatttacaagacactaaactgccatcctctctgctgagcagctttattctgggatcttgctttcatattaatcctgttggtaggaaatacttgtaccaattgtgcatggaaattataatttaatgatctcttccttttctttattcagagcttagaatggactactgtgctttgcagtgatagccccagggctctgagaaagagaaaatatacagtgcagctttaaagcccagtattgcttttttgtgagtgcttgtaatgatcataagtgctgagatgccaacaatatgggttgcatactttctcaactcttcacatttcctttaccttttgaaaggctacacaataaaataattagattctgtttaccctgatggttttaaaaaatgatatgccacttgaatatgtaaagacaaggtaagaaataaagcattgtgaaatcaagggaaaattaattccacttttaaagattctttacattttaggaaggctcagcaggctgttttatttgaaaaacaattatttactcactttactttctttgagctcctttcttgctrttgataagaatattacagccaggaaatcattatgtttcctgcgtatgagattgaaattggctaaatcctttgaattttcttcacatccaatttcaaagttagtgattgttttgcttcttgacatcttgcttatttataaatttcaaatgtacttcatttaggcagaccagccaatgcgtattttcctattttactgactgaaaaattaaagtacatgaatattaaattttttaaaggaaattgcagtgcttctgttagaaagtgctcttcaatcccagttttatgttcagaccatgagacagctgtgcgtctgtaaggattacgtttcaacacattagcttcagttaaaaagatatatttggtcattaaaacatttgcaaataatattagctcataacatcatcaaatagaagtgcccacatctgaatttggcatataaagcaagtttgcacagtaaggttggcatttaatgaagggaacctaaatccaatttgtccgtgtagactaagataggattttaactttggtcattcttatcagaattttggggactagagggagtccttggcattcaccactcattcaaaaacacatttattaatctcctacagtgagccaggctctattcaaagatataatgatgaatacaaatggcacaaaagcccattggtatctggcacggagctttcagttgacacagtggcgcaatgggcccatggaggctgtgtgttttgtgaagaacactacctttttactacctttgtcccttcaagagctaaagatcatgggattttggggggaaagttagtaggttagagagatccatcaggttaaattatcagatgaagaccccaatacattggttgcctcaagtagttctttctgaaaataaacattaaataggtaagttcctttgargaccggaactcattcccctttaatcactgtgatagtgcctggcacataataaaccttggataaatttttttaaaattaatgtgttcgtccaggaatggggtgggttccatggccaaataattttgaggaatgttaggtttcacaaagctgaacagatttcttttctacaggccttctcagaagttacgtacacttagagcctccaggatgaggatgctgcatgatgtgtttcaccattatacccaaaacatggaattgttctgagatgaatttatcccagtatatcacctgagatttctgtgccctgaataatgctagtacctacattttttttagtccttcttagcttgcatcctaggatgtaaaagtagagtagccgtagaatttcactgttggaattcctaatctgagggcttctgaggacctgaaagcaccctgggattgccgccctttgcaccatgttccaaaagcataggtcaatgagaagaggctgcctcagggtcctaaaggtgcggtgctctgggatagggttttctttctctctgaattctcttcctaatcctcaccctttccaagagtctttgagaaaactgtagcccaaggtatctaatttttgtgtttaggtgtccattgattcaagcttgcattattccaacctcctcagaattgggagcaatgggtagtggggtttctccttgatcttcccatgtcaagattcagcaccatgcccattaacccaagagttgtacatacttgcctgaagaaccaggcgcaggtttcagtagcatgccaccaatggaaagtctgaaccagaatattcttcccttttatgaaatgaagtaggaaggtaattaaaktggataaattactcctgtggatctytacaaatcttcccgcaagtgttgccaagatatggtgctgaaggagcaagtgaaagagatatcaacatcttctgttccatcagagcctcaaggtttctgtgaccctctagaaagaatctataggacttgctattcttttgtgaggaagcagtaaggtttacttacatagsgtagaaagtgcgcctttgtatctggagaataagtttgatgatggtcagtaatcacatgctctgcaatttaatttgtcttcgtaaaacgtttagaactggagttcagagagaatggcatgatcaccacactgtccccttgtgacttgtagtgtttgtataaactctataaaagcagggaccttgtctgttccctgctgtatccctattacctagaccagtacttggcacttagcaggtgcttgttaaatatttgtcgaatgaatgatgaaggcattttcagcgggtcaaaaatgtccacgtagcctagagatgcatcttccaaattgcttagtgggcagctcgtctcaagttagaccttattctgcaggttttctgaaatttaggtgagggtccttttgctccagtcatgctaacttctgctattaatgcaacaacataccttatttatgtaaaattaaacatcagtgtaattactactcctcaagcaagcttttgaaataaattaaattatttgtctaagtgatgttcttatccattacttttacatgactggggagaaggtgaataatgatgatgatgatgatgatatcaattttatccacaatctttaacctaaatagaatgcccaacttcatatattatcccaaaacctggttttgagtgacagagtgcccctgggtactatgcattgtgtacatccttgttccaagattgttgggaaagaaatagtaatatcagtgtcagtaccatcaacgtcatcattaaaacatccaccatyggcacccgcctgtagtcccagctattcgagaggctgaggcaggagaatcacttgaacctgggaggcagaggttgcagggagccgagattgcgccactgcactccagcctgggtgacacagcgagacccgtctcaaaaaaaaaaaaaaatttaccatgaattgagggattattataagctaggcagtgcttgaaattagttaacataatactgtattctatccctagaacaaaccattaggggaaggtatttctttgccagscaaccagttgatttgttgagtctgaaagacattgagtaacttgacctgggattcttagctggtgcacccaggcctctgtcttcctcctcaccaatggcctctccctctgtgtcaccagtggtggactattaaattttcactttcagtctcatatgattccactccccttttcatcctccccctcttcatttttatttatttatttaatttttgagacagaatctctctctgtcrcccaggctggagtgyagtggtgcgatctcggctcactgcaacctccatctcctcagttcaggattctgctgcctcagcctcccgagtagctgggattacaagcgtgcaccaccatgactggctaatttgtagagatgggatttcaccatgtctgcccrgctgatgtcgagctgacctcaagtgatctacctgcctcggcctccctaagtgctgagattacaggcataagccacmgagtccggccctccccctctttaaaaagatttttggtggaggtgggcctgacattttttgtttagaaccactagagtcaagtaacagattctcaactgagtttccctcagcaacattcatacttggttttcttccataagctaagcgcccattgttttatttaatagtgaatcttgtttaaagagaagttgaaccagctttattacagggcatgattagatacagttaattagtacggctatagygtataggctaaattgataggaaaggtgctgaaagtaaggaaattgtaaaggatctgtgaactgggtcttattcctctgaggggatgcagagaaaagaagctggccctgtactgtggggaaatataaccagaaattgaagtcacaagcgaagccaaatcagcccaggtaaaggtgatgacactttctgagatggcaactagtagctcttaagtagccttgaaccatggtgtccacagcagcccagcacgcttagcttgctatgcggattgtacctgtggaatcctggggcataacttcctgcaaatttaggtttagtcacacaagtttactgtcactttccattctaagactgagtgtgcacttgtttcaactctctcrtttcaggtcagagatgtttctcctatcctagaactatttgaacttcaacttccccaggctctgcctcaaaattaactttagtaattaatgaccttcagtacatgtaccactcaattaactaccctcaagccagccstacttttaaccttcctcgatggcasattcttgtccatctcctgccacagcattccttcctaggagatctccatgcttgcgttctctctgcagattgctctgcctgtgttgggcatccccttatttttacttttttttccccaactttatttttgtttgttttgtataattgacaaatacatccataatgctttatacctctcttgattatagtcacattttgtttataatacttgtgatgagttgtagatgatgaggggatgttgagcatctactgtgtgtgcagatattatgcatggtaggtacctgtgacacacagtcactgaagcagacacagtttacctgtaacatctcatcactcctccttgcttgctacttcctaatattagaatttctagaacttaatcatagtgtagtttccaccttgccttcatggacgatctgtgatgtgacgtgggcagcggaaatagaagtgagaacggagtagcactgactgaggggttgtctccttgggcaagcagtccacgtgttgagaagatttgtctgcttatctgtttatcctcattatcattaaaatgaaaatgtaactagaactacaacgagcacttctgtagctcaagaaaaataacccataataaattgtgaactgtctattctctcatggtgtagttactctaaattgtggaaatttggcagacgtccctagaactatttgttaaaattcaatagtatgtaattaaagacagagactgccattttgctgttgggtacattaaaaaattatattatgtatcatttggatttgaccctgaacttatttcccaaaagattaatgccagaaagacaaaagtatattttagtctaaatagaggctcaagttatataaagtaactaaatttatggaaatatcagttagactctagctatttaagagtaattatgcaaaagatagttttgaacgaatattcctctagaaatagccaaatggacactgtaattatgatgaaattctgtgcttcaagtcttgccagacaataaaacaagactgctgatattttaagcctatatcattaaaactaatattgatacaacaacctggataatatgtcagtgaaatggaatattttatagatacacaaaagtatactgctccttgaaacgttagcattcatctagtataaaattacacttttttcaagcaatgaaacagaaacctagaggcttgaaaattgtttttacgtggttgggaaagggaatggtggcactatttacctagttatgattatctcatcagataagttctaggcaagtgagtgggtgtttgtctgtttaggttcctgcaattgatttgtgttggggkggccctcccaaatatagacaagtggatatggattcatatattagacctcctagttattggctatttattcttagataaatcatgtaacctgtttgaccctcagatccctcatctgtaaagtggccttcatattgtacttccttggggatgtggagattaaataaaatattatgtgttaatttatacatactaaattaggataaatatcagttatcagcaccagtctctaggaggttgataattatacagctgtttgaggtagcttgttgcggggagaaagccctagaatagagtagagggattgaatctggaaacacaggttgaattctatttgaagtatttatctttttttttttttttttggtgagataggtctcgcastgtcacccaggctggagtacagtggcgtgatctctgttcaccgcaacctctgcctcccaggctcaagcaatcctcccacttcagcctcctgaatacctgagactacatgcacgtgccatcacaccgggctaatttttgtatttttttagagacggggttttgccacgttgcccaagctggtctcaaacttgtgagctcaagcaatctgcccactttggcctcccaaagtgctgggattacaggcatgagtccctgtgcccggccattattttgttatattgaaatgttatattgaattttgccagaaggaatggaattattggctcaaccataaaactgtttttataatatagatacaataattaaacctacaattaagcttatataatctttcaggtttttcagaactctttcatgcatatcattttatttgatgaaatgggatttctctgccaggtatggtggctcatgcctataatcccagcactttgggaggctgaggcaggaggctcgctgagcccagaagtttgagacaagcttgggcaacaaagtgagaccttgcctctacaaaaaataaaaaaaattgccaagcatggtggtgtgtgcctgtggtcccagctactcgggaaactgaaggaggaggatcagctgagcccagaaggtcaaggctgcagtgagccattatgtcgctgcactccagcctgggcaacagagcgagatcctgactctaaagcaagtcatggagggtgggggcagcagatttatcttatatatatatttgctttcgaatttggcaaattgtgtatatcaaagttagaagtctgataatttagtgcacataagcttaggtctttctgtcatcttttgagcagaggctggtttgaatctgcatctgttttgttgaatcaccctagctaatgagtgggaaatttaaaaaaagaacagagctggttgagctttcacttctgcatattcaatcctttggtatgtttattaaattctatggtattgtaatattgcagtctagctcttccagaccaaggaagtaggtacacagagaagaaaccaggttctagaggttgtggttgtgacatttggggatggcagtgttaaggaagtagccagggtgtggggactgtgggactgtaggagaccttagcatcagaggaaatgctatacaggtgccctctaataatgtaatgtgagcatgtcttctggaatttttagttttgtgtttgaatgttccatcagaagtgtctgacttaggatatcagtgcagaacaaggatttgctttttcgtgatgcattttgggtcagtttttttttgttgttgttaacatcgagtaagtacagactgagttatattttccatcttctccattaagatgaaatggacaacaagaggaagcaaacatgaaagcttgggtgagggtgggtcaccaggctgtggtgggcaagagcaaggagccctggggaaagtcgcacagcagttactctccgacagccactgagctttgtgggacagtgttcacaattgtgaatagtcctggttaaaaggtcttttcttgaaaaccaagcttttcatttggattctattccagaggcacaaaacaattctggggtcttggctttggcaaaatgacattgggatgtttatatcaattttctttagaaatgaaattttcatttctaaagaaaaatgtactgggtcagacttaattctggcacatctcatcattttgtgcaacttatgcaagagtctattaaaaggactmaccaaagagcaaaatcaccaaagcccttttcgttataaaactaaaggtctcagcatatgttggccagctcagaaaaccttcacagacggctgtgttaaccttttttaagaatgtaatttttttgactaaattactcaaaaggcattctgagtttagagaatgcctaatcttgttgaaattttaatttcattaaaattaaatgacaaaaaactccagtctttaagtcatcaagcaataacttttcaaaaagatctgtataaacatctaataatttttttctcttgtaatttaaatttatttttatgttcctcccacaacttcccgtcagctttgctgcttctacctaaaaagcaaaaagcaacgaatattggttagttaggccttttaaattattttttatatttgtggatcttatttgtatttttaatcccttaagtcaaagtgtattgtgttcatgactgaagtatgcagttgttacagtataaaattatgggcattataaggattaaacctagcttgtcaattgtgggtgaacgtcttttttattggartatgctacagtgtaaagataaaggcataacaactgttttaaattgtttttctttctcattttctctgtggtacgaaatatggtaaaaatacctgctaacttgccactgtgaacacccactctgcagttaaaacatttcccatagcctattttatataatgtactttctggatcccctcattatccagagaaaatcatttttcttttgagaaaattttttcttttgaagtttatccacatagcataacagggtattggtataagtctttctgccttatactttctcatcattcatttactctaaaattagtaaaagcaataaaattctgtatgtgcatgatrcatattttaagtaacctggaatattgactttaatgtatttctattattgtattagtaactttctttatctgtggacgttttaaggagagagaagggtttgctgatttcaatcaacaatcagcaactgaaataaaaattctaaaccatattttctcaaaaacctacctctgtaagttctgtaagttttgctgaattcaagaataactattctctaatttcttagtctcatctgtaatttagaatactttcaaataattttttggacttttataaagctttaaaaagyaataccttttaaggctttaaggttttaaaaggtatgactttaacaacattttaatgtaatttaatacccttgtttctaacagtttaagacttttgccaaatgtctttttattttttagtgttattttttgcactagtagttgttcatttcataaatatttatttagaacctactatgtggcaagctccattttaggttctggggatatagcagagagcaaagcagacagaaattcctctggttctgtagagctgacaattcattaatgtgaggtagtcaataacaaatatattttatgtcaagtggtgatgggttctatgaagaaaaatgactcaataagaggagagaaaatgatggtatgtgtatggtgggtaggtgtgcgtgatgctgttttggatagcgaggcctccgattagatgctacgtgagcagggacccaaaagagccatgtgtttcatctacctgggggagaagcctgctggcagatcctgttgaacactcgttacctaaatctcttgcattggctccatgtcatttattgctctagtgtattcttcactatcttttcagaaagtgccaggtttgcttttcaagtatagtatctgtcttgccaagtctggcagacagtgcttattttggtctgtactttgttagcagatcagttctatgttgagttcaaatgacactctggtttcaagagtgactctaattctttttctcctagaggaatagtaaataagccttatgaatctggtcagtgagtattgaagtattttaaaaattccttatccagtgaaaatgcatccatgattctctctgtgactttacacacctttcctcaagcctatcccaaacccaagtcaacactaacaatcctaccaagctattcaaaatgaagagtaacatttattgcaagttttcttgtatgtatgtcaatgtgtttgctagcactgcaatgctgagttayttaattaaacctttccagctttctaggagtgttatcctcrtgttttagacaagtacagtgagacacagtaagggtatgtactttatccaaggtcgcgggaatagtaagtggcaaaaccaggaagtgaaccctggcagtctaagctcacatactctctaagccacacaacacagactttttgagaggttgtacttggaatgggattgcattagccagaaaggggctgagtgggccctctggttcagtgttctaccaaagttaaataatatgtgcatgggccacataaatgttttaatatgaattgggtgaaagttcctcctttaacgttgtccatagattggaaatggttcctgtccacaaggttgtgcagttgatggttgttacaggccgaaagaatgaggggtcgtgatcaactcactataccactggaggctatatgagtaaacagcaaactgttctcatgaaagcaggatgttggcaaaatgacaaactgcgctacccagaaggaatgctgagggcagtcacgacccaggcacaagtgtttcttgtgattaggcacatctgaagtctgttagcaataatctgaacctgtgatcaattaagcagctaaccaatcgttacctcctcctccctgctcttgctacccaataaataggaacagtggtagaagctcgggggctgcctttgctcgttagaagcaggaagctctcttcttcttccctggttccccttcctttaaaacagtttcttttgtcttaagttttcatttctaggttcctcccttccttcagtcttgtaatgatggtctcaagcagtaacaatrgtaactgctgtaatgacgatctcaaaatagtaaccatggcagtcggccacggatggatctgtattcaccacctccatggtccctttcctgcttttgttaatctgttcccctattaaaacagagaaggcctgattgctgttatttgcacctgtcatctttgcactgagtccccagtttttgtggtgttccccccaaccaccaccttggggtgaattctccttcctggttttaggtttccagtccccctgctgtcctccaacctcttccccatgattaaaacaggaaaagcctttgttatctgaaggtttctctactgtggacagtctgccgagatggcagcagttaggtacagctaaaaaagttcaagtaactcttctggagctttgggacatatgttcactcctcatccttagcatgggtcatcacttgtttttctcacgccatataattatttctcaggtttagacccccaggtacacaatactgctttccagtatgtttggcataattttattaggtatttaaagcatctttgtaccataatcctccttatctgacaaattgaaattcattttaatggtttcttttaccctatgaagttttaatgaatggggtctatggttggagctcatctttgcaatgagtagagatcgtgctgacattgtatttgaaaatagtgtttattctgggaaggatgttatgcaggataatacaagagttttcagaagtttttatattttatttagggtctttgcaatgtgttgaatcactgttttagttggaaatccaggttcatcatattgccatttatttttttaaaaaattggtacatatctcggcatggaaagaggatggtattctggttcctcaacaagtatccagagaatgtaagtttttatctttgttttagacttggggtacatttctcttatttgtccaagaggtgccagatggacaaatcacagtacagacatacttcatttgcctttttaaaaaaatacaaatttaaagtttgtggcaaccctgcattaaggaagttgattagtgccatttttcccaaagcatgtgctcacttagtgtctctgtgccacattttggtagttcccataatatttcaaactttttctttgttgttatatatgctatggtgatctatgrtgtgatctttgatgttactattgtaattgttttgggacaccacagaccacacccatataaaaagctgaacttaaytgataactgttacgtgtgtgttctgactcctccacccatcagccatttccccatctcttttccctcccctgagaggcctccttattccctgagacgcaacaatactaaaattaggccaattaataaccctacaatgacctctgagtgttcaattgaaaggaagagtcacacatctttctttaaatcaaaagctagaaatgattaagcttaatgagaaggatrtgtgcaaagcctaggtaagctaaaagctgtgccgtttgcaccaaacaattggccaagttgtgaatgcaaaggaagtgttcttgaaggaaattaaaagtgctactccagtgaacacatcaatgataagaaagtgaaacagctttattactgctgtggagaaagattcgtggtttggtggaatatcagaccagccacaacattcccttaarccacagcctaatctagagtaagaccctaattttcttaagttctacgaaggctgaaagaggcaaggaagcttcagaggaagcattggaagctatcacaggttgatcatgaggtttatggaaagcagccatctccataacataaaaatgcaagataaagcactaggtgctgatgtggaagctggagcaaggtatccagaaaatctgcctactgtcattgatgaaggtgactacactgaacaacagattttcaatgaaggtgaaacagccttctatcggaagaagattctgtctagaacttttcttagctagagaggagaagtcagggcctggcttcaaagccccaaaggacaggctgactcttgttaggtgctaatgcagctgatgacttgaagttgaagccagtgcccacttaccattccaaaaatcctagggtcctgcagaattatgctaagtcaactctgcccgtgtgctataaatggaacaccaaagcctggatggtagcacgtctgtttacagcctggtttactgaatattttaagcctactgttgagatctacctctcacaaaaaacattttccatttaaagtattactgctcattgacagtgcacctagtcacccaagagctctgatggagatgtacagggagattaataatttcatgcctgctaatgtccattctacagcctgtggatcaaggagtaattttgaccctcaagtcttactatttaagaaatacgtattataaggccatatctgccatagatagtgatttctcttgaatgatctgggaaaagtacattgaaaaccttccgggcaagagttaccattctagatgccattaagaacattcgtgattcatgggaagaggtcaaaatatcagttaacaggagtttggaagaagttaattccaattatggatggcttgaaagggttcaacacttcagtggaggaaggagttgcagatgtggtggaaatagcaacagaactcgaattagaagtggagcccaaagatggaactgaattgcagcaatctcatgatgaaacttttaatgtttgaggagcaaacttgaacagatgatgagcaaagaaagtggtttcttgagatagagtctactgttggtaaagatgatgtgaatattgctgaaatgacaggaaagaactaagaatattataatacatgaacttaattggtaaagcagcagcagagtttgagataattttgaattttgaaagaagttttactctatgtaaatgctattaaacagcatcacatgctactgaaaactctcccctgagaatgaattgatgtggcaaacttcattgttgtcttatttaagaaattgtcatagccatgccatttggccaccaccgcagccatcaatatcgagataagaccctccaccagtgtgacttgctgaaggctcagatgattgttagcattttttagtgataaagtatttttaaattaagattatgtactttttttgacataatgctattgcacgcttaacagactacagtgtaktataaacatgacttttatacgcactgggaaaccaaaaagtttgcatgactcactttattgtgatagtgtgaaaccaaacctgcagtatctccaaagtatgcctgtattcagttttcctattccagtgatatggtggttgtaaaataaaagtatttcctccctctttctctcccctcatttctccatctctctctctctgttcctctcccttctttccctcccctcccttgccttatttcattcgtttcttctttccctcctttctttcttccctccttccttccttcatttcatccatccatccatccatccatccatccatccatccatccathagcaaacattaagtgctggatttcaagattcatagacatgattcctttttcttaaggtacagtaggttagtgggaaggaatatagggattattttatggtagtataagttctttaatacaatttatactaatcatccagtttaacattttcttacctttctattccttgacacctgaggcttaaaatttggatagaycaggcatcagcaaactgataataatttatacatttttaaatggttggggaaaaaattcaaaagaataattttatgacacaacaattctatgaaattcaaattttagtgtccataaatagttttattggaagacagccatgctcatttatgtgtgtattgtccgtggctactttcgtactacaacagagttgagtagctttgacagagaccatgtgacccataaagcttcaaatatttactctctggccttttatggcaaaagtttgtcacctcctgctttagacatcttttttcccctagaagttcctgaggataattgattgtggacayatccaactatgttccaagacatgggctggggacacaggaaaaagcaacaaacaaggagaacctgtttcccaccatcacagagctcagagtctagcgagtggaatacaatacagagaacaaaatgagccaaaatagatcatgaaaagtgtgatgaaagaaacatgaatacagtgagagaaaataggagaggggttttcagatgaggtgatctaacgacgaaacacttaggaagcacacactcacactccaaagaatagcagaggtagcggtcctgagtgctccagccaccagtcttcctccagttttcctcgggaaatggcaccattacctactcagtggctgaagctcacaatctacgacacatttttggttctcacttttcctcacattccctccttcctctccaattcatcaggaagttctgttgattctacttccaaaacatagttcaattttgtctgttttttaagtctattaccaccataaaccaagcctccatctctcttagctgaactcttgtaatcactcccttgtctgtctagtccatcttctgttccctccaccactgtctattttccagccaagagctatggttttttaagaacttgagtctgggccgggagtggtggctcacgcctgtattcccagcactttgggaggctgaggcgggtggatcacttgaggtcaggagtttgagaccagcccaggcaacatggtgaaaccttgtctctactaaaaatacaaaaattagccaggtgtggcatgcacctgtaatcgcatctatttgggaggccgaggcaggagaatctcttgaacccaggaggtggaggttgcaatgagctgagattgcgtcactgcccaccagcctgggcaacagagtgagactctgtctcaaaaaaaaaaagcttgagtcagattatatcgtttctttgctgaaaaccgtccatgcttttccatagccgttagaataaaatccaaacccattacatgcctgttaaagaagaarggaagccaataaggcctgaacatggggattgtctgatgtgctggactggatataagatggtgtaagaaagaaagatgattcctgtatctctggcttcagcaaatgtgtgaaagatagaaccagttactgagtctaggaagaccaagaggaataagtttgttcattgaaacaaacaaaaaacaatgtgggattgtgttctctctctctctctctytttctctctctctctmtctatctatctataaaaaaaaatctgtttatttttgagatcgagtctcactccatcacccagactggagtgcagtggcacaattttggctcgccacaacctcctgggctcaattgatcttcttgcctcagcctccagagtagctgggactacagatgcgcgccatcacccctggctaattttttgtatttttttgtgtagacatggttttgccatgttacctaggctggtcttgaactcccgggcccaarcaatctgcctcactgacttcccaaaatgctgggattacaggcgtaagccaccgagccgagccctgtgttttaatcaatttaaattttaggtgtttctgatacaattgatttcaataaaacatttggaccattgagtatggaatcagaggcaaggtctgggctggstatatagatctgggagttgtcagcccatgaggggagtttaaagccatgagactggaagagcttcgctaagagaccaagtgtaggtcaaggagaaaagtggaccttgarcagccctgaggtctgaactgggggttacttcttaagggaagasaagagtccagtggaattcctccacagggactgaaggggaaggaggcaggagttgtgctaatttatccagggaagcagttctccatcatctttagaggaagtgggaatctgggctggacaaaagccaaagattattaagagcgtcttctacaaacaaagtctctggctaatctaaatttaattctggatcttgtaatatatagtttaggagttcatttaaatttaatttacatagggtgaaaataagctttgacctttataattsctgtatcagtaaagtcacaggttcattgacttgttagccaatttttcctgtgttacttttcttctggttttgttgttgttgtttcagtttgtaatatacagatttaagaacaagtgtctggatatccacaaaggcatcacagacagctgacatgtggatctgcttttgtttgtaattaaaatgggcttaaatctcatcccccttacactaagtaaaatatataattagaatttttaatatataataacttttaaatatctcattgtaggttcagggaaggtaatagtattcaattagaggctaaatgccacctcctacacaaagccttctaattgttttgtatagatggtgatctcttttcataaggcattcaatayagtgatctggaaatcagtacgttaatacagtgatttgcaaatcactgtactgtagctgttaagcatattacctctggagctcggctgcttggatttgaccctggcagtgccacagacaagctcaaatgacctggtaaattatttcattttggagggccttagttttctcatctggaaaatggggataattgtaccaacctgatggagttattgtcaggtttgcatgagacaatctatgtaaagcgcatgtcctgggatcagatttaagaactatttagaaaaaatgtctgtattaacacttagctaaaatacgccactgatttgtaaagatattattattagcatttatacctttcttgtcctcagagtgatttgatgggatatgggcaatattctaaacaatattaaatcaggaaggctttagttttctaacatacaaactctcagagagctraagactaaaaatttatttttctttgtataaccagtacctggcacaatactaggctattcatgctttgttgaactgagggctaaaactcagaaagttgatatcagagaattaggatgattggggcaagggctggcacacgccatctgcttgaggggttgtgttagtggctgtgcagaactttccattgcatcattacttttgttttttgtcaagaacgaaaggtatataataaaagttggctcaagagaagtgaaactaaagagaaaagaggaaaaaagtgaagatgccaggtgctcatgcctgtaatcccagcactttgggaggctgaagcaggtggatcacctgaggtctggagttcaagaccagcytggtcaatgtggtgaaaccccatctctactgaaaattcaaaaatcagccrggcgtggtggagtgtgcctgtagtcctagctactcgggaggctgaggcaggcgaattgcttgaacctgtgaggctgaggttgcagtgagctgagatcgtaccactgcactctagcctgggcaacagagtgagattcagtctcaacaacaacaaagtgaagaaagaattgaaaaagaatcgaagaaagccctactctgaatgagctcaaatgcgtctcagcatagaggaatacagacaagtgtgccagttcttcttgtggagaagcactgtcccagaagacgggagttatcctgtgacctgctaggccaaataggcttttggctggactaaagtagttgagcctctaaatgactttactctccttcagctccgattctttcaacacaggggtatctaatttctaaaaccagacccagtgggattgagtggcttgcccaaggtcacaagcagtcaggcccctgttaggaagtgccccctcccatccagagatgttcagctctaaaataggctgcctaggccaggcgcagcggctcatgcctgtaatcccagcactttgggacgccaaggcaggctgatcacctgaggtcaggagtttgagaccagcctggccaacatggtgaaaccccatctctattaaaaatacaaaaattagctgggggtggtggcgggtgtctgtcatcccaactattcagaaggctgaggcaggagaatcgcttgaacctgggaggctgaggttgcagtgagccaagaccacaccattggactccagcctgggcaacaagagcagaactccgtctcaaaaaaataaatatataaaataggctgccttctgagatttgccagtctccctgtcaccagtagtgtttcaggcacaatgagaacaatcacttgtcggggatactgtaaagaagattcttggraaaggatttgatgacctggaaggtctttacacgttaaagttcaatgattctagctccagtttcatggatttaataagacagcctctcttcctagctccttttagaaatggatctttgaaagccttttgttttatgttctatttaaaatagcaattagctttgcatcgcaggtactttacagtgcaccatgtgtattattcttgtggaatattagttcaccagatgatagcccacaattctagttacatatgaagtggtggtgtggtgaaataacattgcagctcctcactaaaccaaaaactscagcaagcttgtcrcagagagaccctcattttcccagctgtcaacctgactgatattttaatttttttgccctgtagaaaacttcagtctcttatccaatagataaatgagtgaacccccaggaaatgcagcagaatgtttctgtttgccaatgcaatgaatgcagaagctaataaatgtctacttctatcaggaggaggcgtgtaatgagtaaatgatgagagaaagaattcagggaaacaaatgatcaattcagtctaagatgacaaacaatttcctaataacttggcctctagttggagagagggcttcaccaggcaaagagaatgcctgttgaaactaagcctagcacaaggccatttacattcagctgctgatggatttggtctggttacatttgggtcacactgagcaataaggcgacrttcagacacagcstggttattgcagacttttctttgccctgtaatgtctatgagtgtgtactaggaaaaggaatcatttcagagcctaattcacattattcaccccgattccatttatgtttcacatttgtctttataataaaaatctttttcaaagtaaagatctagtctctttctcttgaaatgtgttcagatcacaagggtcacacaagaacctcttttgtgtagagtgaatatgctgttctttaaagacttttgtagacctcagctccctaaatccccagtgtctgcctttgtgggaactaacagaacgcatatgctttgtctctcatggatgggtgcattcttgcttataggtcttgtttggaaggacttggacctacactaggcagaatacacagtaaatgagatgggccttggaaggagacttgcagcccacatggaagatgtgagaaagtgacatcatgccagactgaaagatcatttgatgaaatgcattttattatcaccccttggtgggatctttctaagaacaattctcagaaaagccacgtggcaaagattggctactaaataccagcagttttcagggacagattttcatgaatatttctagaagactatcagacttgtttactggtcctctatagctatctttttctccccatcccacccaccctcttcttttttttctttcttttttttttttaaacaaatatgacacattctggtgtatttcagtaccacatgaatgaactgctttgctgcagttgaggggtaaaacttttaggtagagtttaatgcaggaaaatgctaaggagccaccaaatagaagctggacacaggcaatactgcagggctcttagtgtacttggtagcatataaaatacaccttagagactccggaatcctgcacactgccttctgagggagagccattatacctgcaagctaagacttttcaatgtgcctctattcacatgcatatttctctgccaagtctttcaaaaaggcctttcctttgaaatacaaaaagataaacacatctttgaaatagattgatgrtcctttgccacttttgagctttctccaattcatatctgagattattaacccttaagactgacttttctgttcacctgtgtaactttacgtgtgttgctagcactagagaaaaccatgtcacagttatcattaacatctcagtttgtgctaaaattgatgaaaagaaattaaacttcagatatgtgtatcatctgcattggatcttctttttcttgggtattgtggtttggttaagaaataaatataaaccctccatggtcaacaaaaggcatgacttagtgaagtactctgtagggtaccatctactgctttgtactgaaagaactataatattttaaacctcaagacctaaggccttctagctctggacttagggactgatttatttctggcacttaatatcttatggaacaccagcaaatgtgtgaccttgtttaaacacaccattcctggtaggtaaaataaagatagtggcccctaactttacttccttcttggctggtttttatcataaaatcaaacgatatgaacataggaaatacttgattcctaacaatatttgcttttggacagtccaagactcaaccagctctcctatgctttcaactcttgccctgttagaattgtgttcccttgtataggaagaatctccagagcctcccttctttccagagacttttgaatatgaatgttagagtacatctcagtagatcataagcagtggaatcacataactaaatttaaaaaaaaaaatctaattcaggtcctaggaccttactctgtagaagttgcattcagtaaatacttgagtgaataaaaaatggacattgacccacttaacaaatggcagaagaatttcagagataccaataataaatagggctttaaccttcataatttaaaattggtttgtcccccaacccccttttgaaaattaatccccactctctcatctgtattgaccttgtggttgcataggtttgtactgtgccaaaagggtagatttttgtttttacttttttgttctagaggagagttggtacagtttggaaaatcataagaaactgttgcgtaactgtccttattcttatatctgttcaccaagggctaaaacttaaaggaatttaaacatttcttctctccttttttctcttggggaaagggggaaaaaacaaaccaaagtctaagcagccctatcattccattatatgaataatctattagttactttagctattttctgtggctaaatacttgtttttcatttttcagtatgatgaactccacaatgaacaaatttttagctaaatttttrtatacattcatgattatttcacatatttccagacatgaagcctttgagtcagagtacattcgaaaggcatttgaaacatgttgccgtaaattgtaccaatttatactcttactagcaaatgatgagggaacccatttcctcatttactcattgacacttaatgcatctgtgaaatgaaagaaagcaagtaagacagccagtttgatagggtaaaatcaaatgattttaccaatctttgtctttcaagtttttcaaatgctactatcaaggaaatgtatgtgctagacacctgcagtctagcccttccctgtcctactccccagtcaggagacttgaaagaatggtattttctgttaggtgaaatctcagcttagaatataatacaattcatcctagacttctgagagtgcatgatgccagtgataaaagtagatttacaatgagacactgtcttggatagtaattctataccccttgcctgcaccaatcccaagactgtcttcattgaatatagatattaagtgtgtgtgttaaaagagtgagcattgtagttctttttatttttatttttttgagacagaatatcgctctgtcgcccaggctggagtgcagtggcgcgatctcagctccctacaacctccgcctcccaggtccaagtgattctccagcctcagcctcccaagtagctgggattacaggtgtgtgccaccatgcccgggtaatttttgtattttttagtagagacggggtttcaccatgttggccaggatggtctcgaactcctgacctcargtgatctgcccaccttggccctcccagagtgctgggattacaccgtagttcttaatgagtaaatctgtcttactcatttgtgtcaccttttatatgtcaaaaggtgacacagataacttcctgagcatagtgattctttgagcttaaggatgctttgccttgcgtacaccatcagagcacctcctcattaaggcttttgcttgtcactctgcagcggtcagtcggagttgtttcatcttcttattcacttagagagatgtgcacagtctgggatactgagcttgtttgtggcactcatcctttatgagaggtgcgtattttctgtggtgctggaaaggtattacttttgagcaaatagatttgattctkctggaattacagctcakctggtgctgaggagcacagcaagtatcatgcctgtgaaagagttcagaggtttgctcaatcttcaggaaagtttttcttaggtagattttctgaatcagaatgaattatttatgttggcctctattagaatgtgtctatcttttcttgctagagatttgatgcaatcttattttaaaaagtcaggttctaggcaaaagtgggaggaaggcaaactttgtcttggcctctccagctactctcctcaggattcctttctccaccaacacttctccttcctcacaggactccttctgtagtctgtacacttaacttttgttctggaaagcattcttgttcccacctgttggttatgagtctctgtagttaattgataattagctgaagggtaataactggattcactcagtttttctgtcaacctggattccaaaraaataataattcaaggtcttctgattctttatgaraatctttaaaatttgttttctctgtcctgtggttatttctatgattactataatcatattttcggtcaataggatggaccttacaaatttgagaaacactaggttggatgacaaaaatacctccctcccatggcattgacactgtaatatggagctcttgaagacaagaaagacagccaaactgaacctggttatctctgtgtactgtaattggttagctgtttggagctctctgtccaatagcctttcaagggatcttcagccttccattcctaggacttacccctggcctggcccatattagctcttcagcagtagtgcttcttgaatgaatgaattttaggttggcttctctgagggctggagaagaaggtggaatggtaagccaatatcatccaaatcagcatctgttataaatccttcagattattaatataaaattatgaatgaatgcagggctaaagagtgttgctgttaaaggagctaatgtttgtctgcttcatctacggtaaggctgatcatttatggctttcgtcttggcccacagttttcaagaggactctgtgtgcacgtgctcctcctgtagctgagcaagcacaagagagtttgttagttttatagagttcctagtcataggagatgatatgagaccaggggtaaaatggagtgcaagcctgagatgtgttggcaatacgaatgtgacacgttctgtataaagccatccagtggatgtgctattaaatgtgcacrtggcatcacctcattgagcacttcccaaggaaaacttatgacctggagagtgactgtgtcacatcacacagcccttgagagaatgggaggttcctgtgctggttccatgaaataatttaacagttactctagaggtcttgcaagacatcacagtaaattcttgtgataacccttctgataactgtgaaattgctttgtctcacccttgtagaataaacaatgagacatacaaccatgtcaaaagcagaaaggtctcaggtgtgtaatatagaagtccaaaaggtgagtgtggatgactgatactgctttatcacagggagaagagctacaataatagaaggatttgagaccttttattggcattattattaaaaagaataatagaaaaattaataccttatatttgcgataaatgagaagtcccaatctaagcatggaaaatagagaaaggattagagtcactttcccagtaatatttagataactttcatgcatgatgagaatttacttaatacctactggaaatgaaggcatatttttctaataaaaattatacatgcccaggctaaaaccttaaattgttatagaaggctataaaagaaagaaaagtatcttctcacatctgtaacaactgctccttgcagaacatttctgggtatgtgggtgcatgtatttttgcttatcattttataaaatattcaaagtgttttgtacctttctgttttcttcttagacctctttccatatcaaaactggtaggttcctcttattcctaaaggggtcagaataaacttttacaagtagagaaatgaagcttgaattgtctgacacaaatagctagagaaatttaaaggaaataagatcacaactaacttaagaactgaatatgaaggtagatacttcagagaaatatagggctttagagactcattacaaaaaccacttcctagaaataaaaaatttccacatagtgatccagtggcactgtaattctttactaactatgtatttatgtgatttttaaatttatgtccgtctccttcatgataacgttaagtttcataaaagcagggccattcatctgtttgctcagcatcatattccaagttcttggcccagtgtctggcacagacctttagtattaatagaagtaaaaaagtgaacaaataaaaggaaacttagaatgccaaatgagtttttggtgcagttgtttattttaattccccagatgaagaaactgaggcatgaggtaatgtaactaaggttttccttgtgtagtggcagggctgtcaatgaatctaggattcctattctaattagaaaaccaaatcaagaaaaaaaaaaaaacaaaaaaaaaamcctgagactctaattaatgaagtttctaaagctcctggaataaaactagaaatgccagaagcagctctaaatagctctgtttctttatataagaaagagtaaagatggaacgaaagggtaattataaaagcagtttattaattttgccaagscacccaggagataatggggttttcatgaaatgtgacttctcagagatggtaagatttgatgctagagttcaacatggctttgacattttttaattcttcctgttctttgttggaaaaggagagaggcagaaggaaatggagattcctgacaagtagaagtgaagcattactgcaaaggagaaagttgcttccagtgtgtcattgcatttgactttattgaagttattcatgaggtgtacaaaaaagcaaacatcttagggcttacagaggtctattcctgattactttcaccctgtctatcataaaaatagaatggctgacataagaagtagatttttttcttgtttaayaaaaggctggcatggtggcttcagtgtcatcagagccccagacacctattattccattgcagcaccctaacacaggcttttgctctttaaggtcagcttatgtcccaagatggctgctggagctctggccatcacatcaacattgcaggctgagataaagggctgaagagatcccctgtcagcttagatcaactccctttaagcagcctactgggaagttccatataacacttctgcttacagctcagcctcactggcagcaagcttggaattctagttttgtttaccatatatctagcttaaaactagggttatctaaggaggaaggagagattttaagataaaccagtgagagtcttgtttccataaggaatcttaatttggcttaactatggaatgtaataggatttttgattcattagaaactgctaacttggttatttattattgatgactggtgatatggatttgaaaaagaaatagggctgagacaaattatgattcactcatccatatacacaaatgattattagcagaaatttagggatacttaggataaataactaggtttttgagttcagtgcttacataaaacaaatagcaatgctgaatgttagatacatggagatgcagtttgaatccatccgcttgatgattgttcttcaggttcatgcagagttgcataggtaaatgaatggaaatccaggctctttggattacctagggagccaagggttgctggcaagaatggtrttgtgatggagaaccactgccttccacaaggagaaaccaggccctatgccaagtactgaacttacatagtcccactgatacagtcatcctgaaagataaagtcctcattttagatgttaaaaagcgagactcagtttaaataacccaaaccattccttagtgtacctttcagaaacagaatactggatctgatatactgtgaatatgaaccgatgttggcaatttgcaatctatttaaattagctttgatttttctgtctgaggacagcattctcctgggrgcattgagtaaagacggagggtaggggataaaaggagagagtccagtgaagtggactcaaggccataggtttaagaagtttcagtaataaaatattctttaaggtgccagctactctattggagggctgcttttcttaccaagaatttcaaattccttctgcttttctgcccacctataacagacttcagagtatacacacaagaaaggcagaattcaaaccagtcattaggttttctgatagaagaaattttaaaacttctagataaactaaatttggactattactgattaaaaaaaaccatagcttttaaagttctggtagaaaatgtagttcattgcaaagtcaatctcttgattctgtgtaattctgtaaaaagacagaatggttgacaagtcatgaactccttctgaacacctgatgccactgagtaaataactgtttcagagcttctgtgcctggaattgtatctgcgcagcaattaatgcagcattaaattgggtccccaagygcttaactctcacctttgggaaaacatacttgcctacatctagctgattatgtatcatagttcctgggtgaggattataacaaaaactataattaagacttttgaatctggctactcaacaatgggaactgccgttatttgacattggtgtttgtggcaccctggacctctttgttggaattggctgccacctagagtgacacttgtgtttgcttgtgttgtaggaggaagaagaggcctgcagttgttagcagtaactatagaccagtttagacacaggacagtctcaccttcagccagtgtggtattgtaccttgaaggtacaggaccagacttgtttctgccaccattctcttggtgctaaggatctgtggagttgccaccatccttgaayggacaggcaatcgtcttgttcttttcygggaaatagtgtcaggccaccagaatttaaattgtacttcagccctcatgtgttacatagtcatgccctaatctccatatgaagcattctataaaagaactgacaagagccagttacatttttcttatgacctctttgatttgttctttttgtacatgcgaygggtatgatcatactagttataataaaacaagattcagaatctgagaaaatattgcacgaatactgtgtgtgtatgtgcatgttttcttttgatcaaatttagaacttgaaaacagatagttttcaaatcgagcaataatgtgtatctgtgcatgtgcattttaatatacacttttaaaagtgagactttctgaaaatggaaaatggcagtgtatcgcacattcaaaatcctgggccacggccagcccagagaaacttgggaatgatgcccactcttgttgattctcgtttccttccgtacggtctagaaactttgttcttggggatgaagatacmagatgggtaaatcccccccataccccaaattagtttaaggagagattggaaagaaatattggaatacttgcatctaaaatcaaccactttgttttgtacttgattttgtgctgtcacctcagctctctgtggcaggtacaataaatttgctcagtaaacacccattccaaattctttcttccttcttctttaccctagaagtgagaaaacaaaaataatcaatttcctagcctcctttgcagctgggattcccagcctcctttgcatgatataattgtagccgaaggggtggaagtacgaatctctggacctcccccttcctccaccctgaggacatgggcataataactgcaggtgcagtagctaccttgaaccatgaagacagaagtcaactgctcggggtggctacaagggaagacagaagagggggcctagttatttgttgatacacttgcatagttatatcagccctgagtttcccatccagatttcttattacacgagaaaaataaaccccttacttgtttaagctactgtttcgagcttcaactgttactgtactattattgtagttgaacacatcttaagtgatatacatttcctttttgtggtagcattgcaggctgaagtgtttgtcaatttgtagtagatataataaaggtagtatttcttttcatcctcattataacattatttcatttactttagacttgtctctatcccatcctgttttaaatatgagcaacagttgaagtgctgtttagaattgcaggtgtcactctaacattatttctgtgagtttgtgtgtcatgtagtttgctgagtgctctaggtataatgatgaataggacaagatacctactcctaggtatgcttatggagcttatggactaggtggggaccacacagaaatacatgttggtacagtgtggtaagttataaaagtctcttctttgtaagaacacagagaaggagcataatcagttagcttttactatataatgaactaccacaaacttagtggcttaaaacagctaccattttactcacatcctgattctgcaggttaccaatttggactgttatcarctgggctcactcctgctgagttggctgaggtttggctgctctaggctgtcctcaccatagatagcctgtagtctctctcccgcttgcaggctagcctggggtgattgacatggccctgtgcagggttgcaagagagaggcccaggtttgaaactggtacaccatcactgttgtygtattctggtgcccagagcaagacacaaacacagcccagactgaagggatggggaagtaaactccatactctcatcatgagagaagctgtgaagtcatgttgctggggtcacggatatagaaaagagtaaagcatggtggccatttttgccatctaccactgggttctgagagaacaggggagggtatagcaataattttcttagaggatttcatctcagatttttaaaattcaagataatagcatgcccttctttattaatactgaataaaaggtgataccatcaatcttcatcagttgtggaatcatttttcaatattgccaattaccttttgaacatcagtttaaaaaataacccataagaaaatgccgctttgagaaaagaaaagttgcatgccggaaagtacaggattgacatgtggttggacttttctttaatctggcgtttctcatggaccattttaggagattctcttccctcargatgctccatgagcaaatcagtttgagaatcatgaacagtagttctcatcttagagattcacatatagagtaaaaagcaaggccttgggaagtcttggcattaaagtactttggctgttcaatgtagttaattggatttcattagtgataaggtcaaatgttattggtttgatttttttatatgggctggttagttaattccgtagctattaacgctcctgacactggtccactattgtcttcatatttcccatccrtcttaaggaacagaaaaacagaacaggtaagcagtgtgagcaacattcaccaatgtctggttaatggaagaataggcttttgttttacagatttaaatttttattaaaatggcttttttaaaaaaccaccccaccccacactatacagtttttttccccctgttcaaataatttttaataataggtcrcattcctaagtccctggtgctacaaagagttttacatatattaccttatttaatccccagagaatcctattaggtaatcattgttacactaktcctgttttacagaggaaaagtaactgttgaggttaagtaacttactcagtttcacaagggtagggccatgatttggccatctggctccaaagtccatgttcttaaccaccatgctgtactgctaacaatcgcccacctaagtgcggagttctgtggacgacatatgcataggttttacaggaaacgtattaaaaagtatgtacaatggagcattcagtctccccacacagtttgttgcccatgttttcagtaattgatccatggtgccttagattggaatgtgttttaatacagaaaatcaaaatacctattgtttccaatgatgccttgtctattaaaataggtgacagaaatatcttccaaatatagagaattatattgttgttttagatatagtttacctcctaggagcttacttggcttatctttgacaaggatgtgcaagtctttatcagatggttgatagtgctaacacatctaagaggtactgtcattctactttaaatttatgagatctaccttctcaaagagtcttgatggaaaacatgttttatgcttatatcaaacaataagactttctgttttaaagaaagaaattattaaatcacacctttgatatttgaattaaatcacatktacctgccacaaatttacattaaccgtaccattggacaaatcatgtcaagtattttttctgctgtttatggggcaggacaatatgcagagtgaatatgaatgaagatagtttttattttagactgtaaaggaccttataggcacagaagtgatatgttgttacacacaaaaaaatgattattcattagaagatcaccttagaccaccttgtaagatcatggacatctttctttctccacatttttttgttttttttgagacaggtcttgctctgtcgccaaggctggagtgcagtggcacaatcttggctcactgcaacctctgactcctgggttcaagcaattctcatacctcagccagccgagtagcagggactacaggtaccygcaaccacagctggctaatttgtatttttagtagagatgaggtttcaccacgttatcctggctggtcttgaattcctggcctcaagtgatccgcccgccttagcttcccaaggtgttgggattacaggcgtgagccacttcgcccggcccgtttgttctctttatttatctttttaaggtcatcttaatggatttcttccccattccatatactgtaagtaattactcttaacaaatttgggagggaatgtacacatcttctttggaaataggaatgtggttgttccttatttgagcacagatcatacaagtcttacaattcagctattagtaaatgatcagacaaattgatatatatcctactacgaactgcagggttaaccaaagaaaacagatgacattaaagtaacagtcatctataattaataaacaagatagcagcatgtgcaacctattaccatctcaagacaacagagataacaaaagcaacctttctgaaaatagttgtgctcctacctctcagtacccattcagggtaggaacattgtggtgttgctaggcaatgtgtgaagacagagttcttggaggagtttggggtccaccagtgatctgccaacaacattggcagaatcactaatttggagtacctttgtaaagattatagctatatttaattatgaaaagtggttatttgccatcattcttcaaaaacactgattttttttcactttgaatggcaagctaaatactatattattctcgcattgttctagaaaccctgtagtttacaaatttagtgtgtgtattcagaatcacccaagctgcttgtaaataatgcagcttcctggccccatccccagagattcaggatgtggcccaagactctactgtttaataagctccataagtgactctgaagcaggtggtccatagaccttgaaccaagcgctcacaacaaaaattagctgggtgtggtggatgtgcccctgtgatcctagctactcgggaggctgaggcaggagaatcacttgaacctgggaggcggaggttgcagtgagccgagattgtgccactggactccagcctgggcraaagagtgagattccatcttaaaacaaataaacaaaaacgaaagaaatctatgtaccatcagaacactacagtaatcattgctgcaggcaggactcgccagtggataccaaaaggtgatggacaaaactttgagaagaaacagaccatttgtatagtctcaaagtatctcctgcaagatatcaattacaggaaggaaaaatggtagctttgttgtggagaatccccgcagacaccactttaatcaggtaatcaaggtcaacctcaataaaaagatctgttgccataaggtagcccctgaaatcaggcaggagaaaggcatattgcttctgtagaattcttcccagtagtgcataaactcttaaccatgagaaaacgccaggtgagcccaaatcacgagtcactctacaaaatatctgaccagtattcttcagaagtgtcaaggtcataacagagaaggaagactgaggaactgttacagatgagaggggactaaggagccatggcaattaatacaacataggatccaagattaagtcctgaaacagaaaacgaacattagtgggaaaactggaaatagctgaattaagtctgtagttcagttactactattgtaacattgttaaatcattacctttgataattgtattataattatctaagatgtggacataaggggaacctaggtgaaggatagatgggaatcttttgcctattttctgtaactttaaaattttttcacaataaaaatgaagagagtatrtttgcttagtattgtgtatacactgcaacagtttagtattcaagaatatataaaatccccacttagccaaccttttcaggatgtgcccgccctgcccaatacacttttatattctagccaaacaaaatcttgtattgttaacccctttggagggaggtgggagtaatacaatttttgtctgtattataaaatattaaaaaaaawttttttttttctcgagatggagtcttgctctgtcgcccaggctggaatgcaatggcgcgatcttggctcactgcaayctccacctcctgggttcaagtgattctcctgcctcagcctcctgagtagctgggattacaggcatgagccaccacgcctggctaatttttttgtatttttagtagagactgggtttcaccatgttggccaggctggtctcgaactcctgaccttgtgatatgcccgcctctgcctcccaaagtgctgggattacaggcatgagccaccgtgccyggcctataaaatattttaagccaatgtaatgactagctgcacgcccacacctcatttttaaaaatatagcaacccagcaaagcccgtgttcccatactttgtggcatcctgctccttttgtgcacttccaccacaccacatgactgctgccactcggagatcatcagtggaacttggtgtttactattcttgttcattacttttcacttttccaatcttggcataaggtrcatcgtactgatcagatctaccacttttttgctctgcatgtttgtctaattcattcctttactttgtagattttcactgtacgaatacccagtagttatccgttctctcattggaaaacakaatgagtgttttttgttgggttggttgttttttttttkttgttgttgttgtttgtttttttttttttgaatgagttctgtccatttgtaaaagtgtcttctgaggccaaaggagatctctactctttctgaactccagtaacacttatctatgacttttaactcggcatttgtgactttccatgataataattgttcttttctcccatgtcagatggaaagcttcttgagcatctgattcccaaagatggatgttattaggacagtaagaatttaattttctttcacagataagtgaatacttaaataatgaattaaacactgtctacacatagatcttgagaatacttgtgtttattcccttggttgttacatgatgttacctcctggggacttttctttgttggaaagatttatgcaatatgggaaactggttgctgaggtggaagtatggagcatacataaagcctaaagctttaatttgagaactatgtgctaagttttcaagcaacacaggtactgggttttgtgtgtgattgcgtgtgtgtgtgtgtgtgattgtgtgtgtgtgttttaacatcctataggaaagttaacaaaattagtaataattttactgcatttggcatggcaaagcagagaggaactgactaatttgtattatggcaaactgttgcttttgtgcacattgttaataaaacaagtaatacttactttttaccatttagaatctatacctagaatggaattaccctaattattttcctccaaaattattttattgagatgttgatgtactctgtgaaaacatttaacagatttcacagctctcttgcctatcttatttgatttcttcaacagctttggcagaaataagcagggctaatattatcatccatactcgatgggttaggaacactggaagggaagctgggggagattaaagacctgctcaaggtcacagaacagaaccagaaaccagatctktcagcttagtcctgtctctctccagatattacagttccagtgcttaaactaagcaaaagtattaattaagatgttattgcttagccagcattttartagatagttcagtaacataatacccactcaacagttcattagagtaatttgggagtttctcatctttagtgagagtaactattgttagtgattagtaactgcctttttgctacattctttgttagaagggttcaaaggaaggattacaccaaacattgcaaaagagcctgttgtgactggtgtgtattttaagggaagaaaatcttataagtgaaacagataggaaggtgtgacataaccttaagttaagtatctgagatgacaaatggttttttgatagcttgagacctacagaggagttaaaacctctcggcatatagacaattacagttgatcactcaaattgcaattttataaaatgcagcagcagtacacttagaatattgtcttcatgtcagaaatgcacctttgtgcttgaaaatgataaaaaattacaatcgatccttacaactgttctgttcatctttattgatcaggtgcaagaaagataaatcgtagcccaaataagattatagtaaatgttagcatcgtaggggactataggttgatagaaagccattcatcatctcaaatggtgacctgtctatgkctctagccaccctgagtctgctatctaatcacatacctattgattttatctacatccaagaatcctggatgtgactgtcattggacaaccaagattgttaaatgcaaaggggtcactggtgtgaagaggatttcactttcattttttcaccaaccaacaatgatttattaaaaaataaatgattgcaagccatgcatttgaaacctgagtgattagagaatgaaaggtacacaatagactaccgtattgtggtggtgttttgttgttgttgttttttaatgcagtgcattttgcaggatatttcattgagtcttagggctcatggggtcatttaggccatctcctgcaataagaccagtttcagtgtagctagtcagtatggataaattttgctgccccaggaaaggcattactttgccactgcatcttggtttatgttgtttatgtgtccattcctgttcatagtggaaacattttttgttattaaaattatctaaatctgcccccttgttcctactgattagttataaatgttgttgttcttgtggtcacgtggaaatgatagaacaacttaagctccataaagaaaacttttttttttttttgagatggaattttgctcttgttgcccagactggagtgcaatggctccatctccgctcaccgcaacctccacctcccgggttcaagcgattctcctgcctcagcctcctgattagctgggattacaggcatgtgccaccatgcccagctaattttttttttttaaagtagagacgtggtttctccatattggtcaggctggtcttgaactcctgacctcaggtgatccgcccacctcggcctcccaaagtgctgggattataggcatgagccataccatcttgatgacaaaaatattgtgtagaaagaaatgatctttaatatcctagtaggaacaccaatggaataatatataaatacraatgtgtgtgaatttcagtttttgatctcaggcatcctttgatcttacaagggtagattccaaataatggcaatctaaagaatctttccaaaatgttaggaattttctccaaaggatcaaatgataaggaaytgtaactgtgaacgtttactctgtaattataatccgcataccaacaactctactgttatttaaaygagtagctttacatgtgttttataagtatccatgccacctatacaagaaagtcttctactgcttgagtggctgaaacaaggttttatgtgttttttgaagttgtaaatcttccacacattttgtcatcttggatagtgaaacctttgctatcaatctttgtccacagagctcagagttctacagagtcaccactgaacaatatcagaaagctgctgaagaggtggaagcaaagttcaagtaagtttttaatagtattataattatttactrttcttaacaagatgaaagcacagttttagtgctttttgcacagatcatagtttgttatatagcactctagaatacttggaagagttttggggtggttgagatgggggccatgttatctgctatactggaattcagatgccaagacaaaggcatttgatgaaagcttgttacaaatccatgtattttatgaactagggggaaattgaaagcaatggtaatagtattatcatttgtaataatatataaaatagaatgctcttgattatgaaggtcatgttaaattgctactgtattaagggaaacatagaaaccattcacttttgtataataaaatgatgggcatgtccaaatttgggtatctgcctttctcgtggttaggctgttttcatttcttcacatgtaccttgaaaggctttaaatcatagackttacctggcccttgattatgaaggtgatgttaaattgctacctctcttaatccttggagtgtttaaatgaatgttctgtaattgatggatcaaagtgtccgtgtcccatagctttgtactttccctttgctgccagttctcacattaggttagaagacatcattcagaatttttctgagtatataaatagtcctattgtgtaacctctattagtagcacatgcgcaaattagtgaagcaaaaaaagttgttgtgacagctttagttgaaagattgcatcgggctctgacctccttccttgcacatgtttacaagcatttgataaaatgattaaaccctaaggtggaattactactttctgctacagtacaatttgtgtgttaatggatattagtgttattgtaatgtggattaaaataaaattttttaaaaattaaaggtagtttgaggtttatttaaagagccaaagcccttcagccttctgtagtgaactatctctttagaggcagcagagagagaccttccaaggatgggccacaagtctcactattagagattaatgtgagatcttaagaatttagacatattaatagaactggttatagattttttaagttactctacatatattattttaagttaggtgtttatttttctccctaatgatataatgacttttttttaggtggtaaacctttttttgtctctatcccatgagaaccttcgagttggctccccgaatatttctttattctaagacaatagctataaaaacagctaaatttcggatacattagagatcaattttgactagagtgatctgtgaagttttcataaagaagatgactttttagttgagcctttaagaagagtattgagtaggtggacgggaaagatattcagaaggaaaactgtgctctgtagttggtgggtgacaaagcagtgkcttgagtcagaaagactrgtgsaagataaaactggaaaggtcagtgggtcattagctgctgggctgtgaagtttggtcttcattgagcaatgagtcatgggaagatgtttgaccagatgagcactctgatttctgggctcctgaaggaaaagtaacctggcagtggatgtgaggtttagttggagacatgaaaaataagaactygaagaatgagataaggtcagctgtggtggttcacacctgtaatcccagcattttgagaggctgaggcaggaggatcgcttgaggcctgaagttcaaaaccagcctggtcaacatagtgagaccctgtatctacaaaagaacaacttaaaaattagccagttgtaggggcatatactggtggtcccagctattggagaggctgaagtggcagactgcttgaacccaggactgcagtgagctatgattgtgccattgcactccagtcacagagtgagattatgtcttaaaagaagaaaaagaaaaaacaatcagatgggaagtctctacaagtgcaagagaaaaaaaaagttgttgaaagtttagacrtggcgccaggcgtgatggctcacacctgtaatcccagcactttgggagactgaggcaggcagatcacttgaggccaggagttcaagatcagcctgggcaacgtggcaaaactccatctctactaaaaatacaaaaattagctgggcatggtggtgcatgcctgtaatcccagctactgaggtagctaaggctaaggcaggagaatcgcttgaatccgagaggcaaaggttgcagtgagctgagatcatgccattgcactttagcctgggcaacagagcaagactctgtctaaaaaaaaaaaaatcagacacatgaatttgtgattggttggtgtattagtttgccagtactgcaaagtaccacagaccgggtggcttaaataacagaaaggtattttctcacagttctggaggctagaagtctaaggtcaaggtgacgccagggctggttgcttctaggcctctctccttggcttatagatggccatctgctccctgtgtcttgacacagtctttcctcttgtgtctacatgctaatctgcttttcttacaagaataccagtcatattagactaaaaccctcccttgtgacctcactacaatttaattatctcctcaaagaccctcaccccaaatacagtcacattctgaggtactgagcagtgggcttaggaattttcaggacacacaattcatcccctaacatttagataaagggggcaaaagaaccagaattatgaggttagcagattggaaaatcagtggagagtggatttcatagagaaagataggtctggattttagatgcaaaaatctctgtcctgaatctctgcccagctgccatgtcattcagcctgaactaggtttggagtgcgagaggccacgggaagcacaacgttgacatcatgatggctgacctcctgcaagtcagcagggccctgtaagttaggctttgttttaaacagaacctcaacagcatcattctgtcttacctattaaatattattcaagaataattaataatatggccaaactgtgtagtaagaaattggccttggccaaagagaggtctggattttggaccaagctcctgagaaattctaaatccttcgaatttcctagtgatagaaattgttattctcagccaggcgaggtggctcatgcctgtaatcccagcacttagggaggccgaggcgggtggattgcttgaccccaggattttgagaccagcctgtccaacatggtgaatccctgtctttacaaaaaaaaaaaaatacaaaaattaaccaggtgtggtggcgcatgcctatagtcccagcyactggggagggaggctcaggtgggaggatcacctgagcctaggaggcaaaggttgcagtgagctgagatagcaccactgccttccagcctgggcaacagatcaagaccctgtctctaaataaataaataaataaataaataaatgagaggaaaaaaaagaaattgctattcttgctgggccccttggaccatgtggtatcagttcagcctctggggaggtgagtttatcatgtggaccatcagtcaagcagtttaatgaggctccaataaaactctgaacagtgctgctcaggtgagctttcctggttgacaggactccatgggcactgtcacacattgataccaggagggcagcaggtcctaaggacattggaagctttgcatttggaaacccccaggctcagtcctatgcatctcttcctttggctgattttctgtatcattgccctatagtaaaccataactgagtttaacagcttacagtgagttctgagttctttcagtgaattattgaaccattgaattttggctggtttggaccctccctcccccgctctgcaaacttgctgttgatgtgtcagaagtgagagcaatcttggggactgtgcccttggatttttgcgttttgactaactccattgcacacaaaacctaggttttaacacactttgaagaaattctaatagctagttttttagggagtggctttcattatatcgttttttctcccagctacttcctgctaggctgagcttcctagaatgttgtattttgatttgcagtgagttcattagcttcacacctaggaagtgatagtacattgggtataggagatgcttaccatctttgaaggcacagagattacttagtagactgctatttctttttagaaatttggccatctcagataatcaggacttttgtaagacaatatataatatttgcattgcatgacaggggtttttcgcctggtcagattattttcactggctcctatctgtatgaccagcttagcacctgtaagcatcaccttgaggagctctatcttgaacctgaaccggaactcaacagttcctcttaggcaacaagttctgaaggactttgaggagaatttagttaattgtatctgatgaaagtaggattcatttatgtgcatcttggttacaggagatagaagctttttaaagtgcagtgtcaagggcaatattatatacctgatcaggggtcatacaaatcactgtaaagagaaagaaagctaagagcatttgaagctgcccatgactaacaccagcatattaatgtaacctaccaggatagctaatcgaattattttagggatgcttaagatattaactcatacttcagcccctcaatgtatagttttggcagtaaaatactttgagaattaatggattgtttctcctactttatccacacatcattcattcatagagcccctgtgtgacaagccaagcctgaatatacaactaagaaaacaggccaggatcttattactagtgtggaactcagagttcatcagagaaaaacaaaaggaagacaaactttttaaatgatgatctttttaaaaaattcaaagttagttctcctcttttggggtgattacatttccaatgcatatcaagttattaaaaatattacttaccatgatttcagtgggaactaagggattcgaagataatttggactgtttattttcccacaatagatttaaaattttagctctaaaacctaaatcactgagcaaatccagcattcttcttatatgtaaccttaattcaaaaggaataccttttcttttctcaatccaactaaaacagtaattgtcaacacttcatgtcgcattttataacaacttagggtgctagtttctattatatggcgctagtaatgttacagctcatcctaatgcaaattatattttatattaatccttatgctgtacctcataggtaattaattaaacaaagtattattttaataatgttacatgtgtagttcttaacacagacctagcacaaagtaataaatactgcatttgattatcaaaagttatgaaactatgtgctatcggagaaatctctgtatttgtttttaaacaaattctagatgctgctaaacctctagcacattagaaggagttcttacccttatggagctcatactctagccaggatgaccggcacataaagcactcatgatagaatagcatgtaagagaagcctcacagcaatgtagctggagtgctgccggcctcctgtttcttggtcaatgtcagaatcagatctctgtggctacattggagctgatatgccacacctatagaaagaagatgttaccagagtgtttatgcatgtgaattgtttttaaaatagaaaagcaaatatcaagtaaatgtaaagcaaatatcaaagacatgttaaatattttaaaggcaatataggcatggtaaagacaatgtgatagtaaacaaatgaaaagcattttacaggacaattgatacttcattctcattctgtcctttacataatgaagtggcgagtttctattttccataaaagaaagaaaaaatatgcatggaaagtgacatagatctattgaaaatatttttggaatgatttcattagaggtacaactttttaacatggcttcagtttctgtgaaagaagaagcacttctaaagaagtacaagtctatgaacttggaagtgaataccagtaatactcctttgtgtgccagattttagaggggttttcgcttttatccctgaatgaagttgttgaaacctgacttataaatttaggctcatagaagaagcttaggttatccttataaagtattaaaagattagttaccctgtaaaagtagtttaggtgattttagagtatctgaggaatactatgcagaactcatacagataaaatggattttgtaaatattaccatctttaaaggttttcttcaatgtaaaaccctttgactttaaaatgtccttgatttttttttcttttttaggggttgcactttcactggcaatattgtttagtttcttttttggatgtaatattttaatagctatattacggatgaattggtgaagccgaggaagacacgccaatagtatcagcaggtgtttctcatgttctgtataattacacatgtgtatcatggacagttttaagcaatggtgtttaaagatcctgcttaattggctgtaaaataattaaatacggttttgactggcaaatttataattctgctagatgcataagccagtgagcctgaatgtcaatgcaacctcattttggaaatattagattaatagaactaattgtactaaaagtacaaagtttactctgattaatagtcttaaaattcttctagaagtttaatcaggtaaatttatgttacttatctttcttcttaaacttttaattaaaacttatttcaaaagtttgagctattaagttctgtgcttctctttctagtttctctgaagttgagttcttgcaatttgtcagtgactccagctcccttattgagtaacatgccttatcaaaagtattaaaattatatgctgtttcacgtgtatttgtatctgcagctgacaggtatcctgaacatcttctctaacacgtattgatgtctacttataacctactttagtgctgtgtgaatggatctaatataccaaatgtacatgataaatgttttatctctgattctcattgatcagttttgaaatgatcaaatggtgtatctcagtaagacactaattcacattgatcaaattctaaatgatcaagttgacttggtttctgctgaacacaaattgtattaaaacaacattacttgaacatgctgccttctctaatgcaggagttatgttaccagcagttacattataactagagttattgtattataaagatgtctccttcataatgaaaagtttacacaagaagaaaagaatgcgatattacaggaagaacagggcttcaggcaaggatttgggcttttactaactaattaaattctgcatttgtattgggccttttttcccccttttttaatttgaagggctgtgagcaagaaatatagcagctgcagtggtgacattttattccccacggtccttggagccaagtaacatcttgattattcagtaagagacttagtaattgaagaggcaaaattctagataaagtaaatatacctgtaccctttgtgcacaagcctcttggttacaattacgtctttagaagtttcgagttatttgttggtttttgtttttaaaacatcagctcacctatgtcaacttccatagtatatcatgtcccctctggaatttgcaaatgtgctgctggaggaggatttcatttctgaaattgaagaaagatgttaatgtacttatgaatatactttgtatatgaagctaatggcaaatacacatttggctgtcacatggactcggttatttagaacacaaaattcctcaggcaggttatttattatgtctttgacttgtgtcttccatctataaaatgtaaattrtaactgtcaccttctgtagggcatataagctgagaaagtttaaaagttaactgagaaagttgtctttgatccttatctaaaaaatggtcgtaagttgttttattcaactgcaagatagtggctcccattttaggaaagttgtagatgatgcagctccttccgtatctcatcggggatatgtaaggtagtgccagctcccaagctgtcaatctgcctggtttgtttgtctgtccacctcccaccaagcaacaaattagtccaaggaaagtgagactggctttggagcatgccaatatttaacagtatttcttacgatacccatttagaattggttatatttacaaagaaagcttcggtattaatgctttttccccccttctaaaattggagcccttcaaatcagatctgcctggttagttatttactttctttttagttccttgggtgagatctctatacttggtctaaatactattttctaagataatagaagtaaatgtcaagaaacattaacaagagagatttccatctgcattatctctctactccatgactggtcgccacagtattccactcaactcagtggtatcctgcagaaaagggcagggcagatggcaaagctgattgggaatatagggataaaaagggcaggagcaggagtgtacaccaaggacaagagagtattgttaatttctctaaaaagacaatgcaaaatgcagccatctcatgaacatggtcacaagaccaaaagggtcactttggaaacttttttccatcacttcagcatagggtgtaaaggaatctcagctggtgaaataagctgctgatggtgcagccagattggccacgtccttcgtaagtccatgacctggagcattcttctctgttcttgctgtggcagttggggtttrttggtgttgcaccaagcatcttctttcctttcgtataagtggtttatgtgtaaacatgtaaatgatcaaaccattcttgtggcagctcttaggtttgtggccatacactcctggattcatgattcgttctgtgtgagctaacaaatcattctgtcttccccagcaggaacatcagtattgaactttcttcttaatcaatacgatccattaagaatctagtataccctacatggttatatgaaatattaattgcacactgttagttagataaatgaagattctgccaaaatgatagcttatttccttccttgtatcataatattttaaatgagatcattctgagttctagggtacatgatattttggaatttgtttattgatccttgcttacttgagtaattaactacacagctcacagttggaaaagacatttctaactgagactactaggtttgtcctcttgccaattccaactagaattcatttacttgttaagggcttcagttaaaaatcatgctttcaaagataagaaaacatattttgcgttttgagtgcaactaagctacagtgaaacttgtaggaagccaagttaagagttaattgtctgactgacctgccctgttataagatatccagaaagacttctagaaggtagaatttaaattctgtccttatgtcagatatgcaaagttaacaatcttaggacttgagcacagttaaagattttatcaaagaagttatctacacataaaaatggtagctcagggtagtttctggaacattatataggttcagccatagtataacatcaaattaattatgtcttatcactccagagtttggtaagcctatcccagatgctatcagcccttccctggtttcagtcagataattaacttatgaatgtatttagctgcccattcactctgcctggggtaaaaccacatactaaaattgaaaccagaactttcaggatacattgtatttaaacttgtattcttgttgctcatttgaatgtataattaccaagtcaccyctcatggtttcagtcttgtcaagtattcttatttctggctcttctgatttttcttaagagataagcaaacaaaatacaaaaattgttagattggaccttataaaattttaaaattctgcccatcttaagacatcattaggaaaatttttttcatgggcaaaagacttggacacttcaaaggaagatgtaagaatggccaaatagcacatgaaaggagtttctacatcattagataccagggaactgtacatttaaaacataggaatggcaaaaatcaagaagactgacaatactaattgtctggaaagattgtggagaaaccagaactcactttgctggtgggggtatacaatggcaaaagtcctttgaaaaaaaatgttggcagttccttataaatgtaaagcatacacttgctgtatgatgcaacaagtctagtcctaggtatttacccaagagaaatgaaaatatacatctacaaaaagacttgtacacctatgttcatagcaggtttattcatagtatcaaaaactagcaacaatccgaatggtcatcattgagggaatggagaaacaaaacagacagtattccrctcaactcagtggtatcctgcagaaaggggcaggagagatggcaaagctgattggaatatagggataaaaagcgcagttttctactttatattcatacagtagaacactattcagcaatagagaagagcaaactatcgatacatgtaacagcacggatggatctcaaacatcatggtacacacaaagaagccagatgcaaaacagtactwcctatgtggttcatttaaacgatgttcaaaaataggcaacatttgcctgtggtgggaatagaggagatttgattggaaagggacccaagcagcatttctgagattttgggaatattctgttgtattctgagtgatagttttacaagtatatacaggtatgtaacttctaatacaatatgaacactgaagattggtgcattgtgatatacaggctgagcagccctaatctgaaaaccccaaatcctccaagattggaaactttttgcatgccaacatgatgccacaagttgaaaattccacacctgacctcatgtgacaggtcacagtcaaaggcaggtccacaacatgtagtctgttgactgtgcctcaggaagaaaatgaccttcaggctatgtatagtatatatgaaacrtaaatggattccatattttggttggggtcccatccccaagatatgtctttatgcatatgcaaatattccaaattccagaacccaaattcaaaaacacttccattcccaagcatttcaaataaaggatactcaacctgtgtgttaattatacctaaaacaccctaaattaagaaaaaatataccccaaatattgggaattcccagtttctatctgtaatttgtcctagataaaatgcttcttcaatttaatcacagtcttaaatgtaggattcctaatcctatccataatcatatttttttcattagaatttgaatcccttatctcagagtcagggctgttcattcagagtattttattactgtagaaatagagagggataaatcttgcttgtatttcatttatttattttcttaaagaatcagtcttttttccccccattaagttacatttgcctgttgtactctcctcctcttcaacctaggaccttgtaggtaggcttggataaggtttgaaaattacttttgataaagggatttcaaaggcagtatttgtgaatgaawcatttgtacagtagcactggtacttttcaatataataatcatatgcagtaatttgttcatactatttattgagtcctggcagaatgcttgaaaacttgtaaaagcttgcgtcttggcccttccttacatgttgaaatgaaagcacacatgttcatatgttagtgtcgccaagcatccccaacttgctcacatgcctgccttaaattatttcatgtgctttcccattcagtggccaatagttaaattgctgtgttccttttgtgagtgtgtatgtctaaatgctggtaatcaaccgagtccctggaaaactgataaatgtgctcattaaggagagttcttgctcttggctctgtttcacaagtcacctcagctagtgtttctggatgaagctggcaagaaacactgtgcagtgatacatctggctttatactccttttcaaggactaaaacctccttttttagtatgttaaacatgcattgtagggatattgcaattacaaagaagtaagctatttgccaattacattatttacacaagaaaaaccaagggctgctgctgtgtggtgagatttttaattttttatgcactgccatttgctcctcctcttgttctcttgagcatctgagattacacaagtgcctattcatttgtgaggcagagccatctatgcagactctgaagtccaccggctagccactggcatagatctcaacaaagctgactatgtgagagatgcattcagcatggtttatgattggaatgtcgaaggtagcatacacctgttcctgctttcaggatgaaaaatgaattgccaattatagtagacatgttcagacagacgcttcatatggtagaagcttgcttggcctgctttatgctgggcctccaactatgaagccatcagttctgaaaaaggggtgtgttggcaaggaggagaagagagaagggtatcratccttgatctgttaccatgttttgtgcttgtgcaagctgtgggcaggaggtcaatgcctcacacctttgtttcccaagcagagctcttgaacaagatgaagtgatcaaagctgggtgstagtgcattatcacagtctcattactttgcaagctgcatgcccagatgctgctgttttctgcatcaggcttcgctgatttacattcgtaacamctccattacagctcatttgatactgctcataatcaaccagttcttgtcttttcctgatagtgtttctccaatacaaaagacgctagtgtaatgaagaaaattagcattgctggtatagaattcatctttaagacatcctggttaattgacaagaagtgggaaccaaatgctttgtcatgacttaagtcatttgtggttttggtttggttagttgggtgttggtttggggctgtttttgaagtctttgaacttgagttgttggatattgccagcagacctattttgactctttctgtcttgggagttcttttctgttagtgaattccgacaccctgtccttatttgtttggtttcttcccctagtgagctcaatggcatatatctatttttttaaagatattaatgcaacaattttgctttgaagaacttaccatcctcagtattaacacatacattcatcaagggtctctttgatgttccatgttctatgggccctgaaaatacagacatatcagtttgagtccctgccctcagagggcttatactcattgggatcattagctcgactgcagaagcatcaaaacttgatgcaggaattattactaaaagatttgttcgtgaaaaattttgagtatcttatacattccatatggttgttataagttgggaatataaaaagtgaccaaaacatgttaaatgctaacatgaaggtacaaaccataaaatgcagtaggactaggaggttcggaatcccaggggaatctggattgcatgaagaggtgactggcataagctggatcttctcatcttgagattttcttaaggtaagaagagggagaatggccttgctatgaagagggcattgaatagtgaaaatggctgaaacagtgtgggagaggtctagtggaatatgagaccacaaagcaagactggagtcagacttgaagaacttgaaatgcygtattttaaaaggcagagttaatagggcataaagattcaaccaagtgttctacctacttggtggccgagcgtggtggctcatgcctgtaatcccagcactttgggaggccgaggcaggcagatcacaaggtcaggaaatcgagaccatcctggctaacatggtgaaaccctgtctttactaaacagaaaattagcctggcgtggtggcgggcacctgttgtcccagctactggggaggctgaggcaggagaatggcgtgaacccaggaggcgtagcttgcagtgagccgagatcatgccactgcactccagcctgagcgacagagcgagactccgtctcaaaaaaaaaaaaaaaaaaaaaaaagagttctactacttgggaatatttttttctttcacctatccctggtccccataattgtcaccactaggattatgccttttgagttggtcattgtttctggaagtcttctatcaaataatacaatataatattgggtgcatagatgttgtatacgtttattatatgataattagagtttactgcaccaaattaatgactatcactcttaatatactaatgtccactcaaaaataaccacatattagcttgccatattgattgagagcaaagttcagggacttgaaaggacggaacatagtaaagattagttctgattaaaaaggtggggaggagagagttgaggaaagattgggttcataggatgttgcctggggaagtcctagggcattaggcagaaaaagagcctcatcttttcataccaattgaaatggtatatgattagttttcattactcctagctatgatatctttgaatggtgtcctaagaattcacawggtaccaggttctttgtgtcattgcaatgaatgtgtgagagacaaacgtatgtggtttattcagatgtgttttatctggatgtctaatttttaatttatgtctataattctgattgaatgtgcccaaaatagataaaattagctcacttactaggcaaattttctattgctagtccacttgattattaaatgagccttttaaagtattctctctccttcccattgaattttatgaacaacttttctcttttgatatccttcctggagacttactgtagcgaaaaggatatgaaattgataaataatacaggtggccccccttatctgcaattttgctttttgcagagtacaataagatactgaaagactacattcacataacttttattctagtatattgttatattttattattcttgttgttagtctgttactgtgcctaagttataaattaaactttatcatagaggtatgtgtaggaaaaaacatagtttatctaaagttaagtactattcatggtttcaggcatccactagatatcttagaatgtatcccccatggataaaggggaactaatgtattagatttttttctcttttaatttatcaaggaagtattttttttcttgtaacaagggaaatgtaattttactcctcttttcttttccagatcaaccttttaaaagtaaagcatgtgaagttgcagtttgatatttagcctttcacatttatctctatgagtagatatgttaataaacatagattttgttttgttttcacagagtgtaagactataccatacgtattttaacttatatttattatggatacatccccctgggtcaacacataaattcaacgccttcttttaaatccaactcattcttctaaatagctgcatcatgcctcataggattggtctgtagtcctctactgaaagtttctttcaagtgattggttttggttttttgttttgttttgttttgttttgttttgtttttggtggggggcgcggtgggggcggatagtgcagaagaaggctgcagcgaaacaaactcatacctaaaccctaaggaactggtacttttatttccgtaacatggatggggtttgaattgtgactgttccttccaactgtgtagcattaagctacttaactcttgatcttctttttgctgatataggacatgtacatataatacctcatgggttgttaataagggttaatgaaatgtgggtaaaattctgggcatatagtaggtactcaactctatacaggtcagtttcttttagggatctagtagttaagagtcagggcccaggttatttaaccttagaagttgtatcacaatatgaatcaaaaattggcctcccaagacttttttttttaaattaaaaaaaaggaaatcatgttttgtgaaaattataggcttttttgacttgtataatttaaaaatactgcattttggcacaacctttgcagcttttgctgctagtttgtaattccctagaggtgaattgaaaacattagtggcagaactttttccattaactctgagaaaaactacagagcaaaaaattgtcctttggcagaaatgtcaatccatacctcttttgaacatttggaaagtgaagcgctgagaagctgatataataggagaattgaaaaccaaaatgtatacacatcttcaccttttctaacagacgmcaagacaaatgaaaaatacatcctcagaacttgatgatgcaaagaaaataggattgttgctccagaaagtgcattaggctgggatctttaaaagaggccgaggcgggtggatcatgaggtcaggagatcgagaccatcctggctaacaaggtgaaaccccgtctctactaaaaatacaaaaaattagccgggcgcggtggcgggcgcctgtagtcccagctactggggaggctgaggcaggagaatggcgtgaacccgggaagcggagcttgcagtgagccgagattgcgccactgcagtccgcagtccggcctggacgacagagcgagactccgtctcaaaaaaaaaaaaaaaagatttgagtgctaagcttttggccacgttcttcagaagggctgatccattcttattaatgatacatctatttgtacttcatgtcataaaattctacctttatatgctacagtatctaggaagtagacgtaagaaagagcaaatgtttaatatactacargttttgctgtagcatctaccagaaaatatgcttattttctctcgtctgtggttcctggtcttcctgatttctttttaagtttattaggacttctcttcatttttccacgccataatgtcaatataggtacaatgaaataataagtatccacatgttaaaatgtttactgaatataatgtttatagatattcttcacatcattcagtagacctattctagcaagttacttctcattttccaccccacccaaaccccacagtcttagattttatatctgtgaaatggtaataacagagctgttatattggaattaaatgaggtccatttatgtttttagcatatcctaagcagkgaatagtgagctattaataattactgtagtcacaatagttgaattttctgttgggtgaattttgtgtttttttaattgatgctcatcatatgatctaatatatatttccctagaggataattcttgaacgcaataaaattacaattgagtataccaggcctcttaaaagcatgtgtttaaaggtaaatgctttctgtcaaattattaaccaacagttagcagcactactcaaaataataattctgttttaatatgctacatgagaactacataatgtggttagamatacatacgcaatggtatgctcagacaaaatgcagccattgttagttcatgatayagttctcacctaaaaccttgtcatagttttagaatatttttcttcacttgagattctagacaacgataggttggtagtgtatactgaacaaacaagattcttcctaacgtgttctgtagtcacttgctcagcatttgggccatatatatwtttttttttccagaagtaaaaaggacagtgtggctaagtgtctagattagtccccaaaagcccgtttaacccctgcagttcagaaaagaagactagatgttaggggcaataaaaaaaaaaaaaaaaaaaaaaaacactagcacattttcccatgtttgtgcatacatgtgtgtttaaactacattctggatttaaaagcctgggctaactcaatcacaggtgcagccttgtttctatgaaaggagataaattcctatagagagtgaraaagggatgcggaagccatagcaaagagaagcctccctcccttccagtccctcctgttgttttcaaacattttttgttagcagttagcggaatcctaatacccacaactgataatatgctatcttaatactattactctagtttataagcttacttacaacctttgctcattatgaagagaacaatgaagcttatttttatgaatacaacatttaaaaattaggggccaaggatgatggctgcagtcctatatcagtcccaacagccaaagttatgtgtttggttgagtgttacgatgatcctgatttgtggtgataagtagtggcaaataataacttttttttttaacagcttgccttgcaaccacaagatgctcatccatcratctgatccaaatgattaaaagygaaataagtttctgcttcaaagttaaataatcgacattatctaataaatcataatatagaagttgggacaaacagccaaaactttaaatattaaaccacattatgaaaataaccttggatacctcctgggctgatcttttgccatcttttctcatgcacttcagtgttcattcactaaagggagggaaggccttccgcactcacgctttggcccggctcacgctgcccccgcagcacagccacagcacacctcaccttcaccaccttcctcccgataaactcagccttttgttaggacctgtctcatgtgttaattcctctgctttctctgtaaagtctttctagacacctcccttcctactaaaaagccataattaattaattgttccctgtgtgtttatgtcactccagcccttatgacaatgtaagtggcatcagtgttgcctgtgccccatctcccttctcaagtgtgaaccgtttaaggtacaagctgtatctgagccagcttgatgggagcatgcctctctctaacaggtgctcaattagtatcaatatttccatctactaaattgaactcttataaaatgtccatgcttcttaacttagactcctgcagttcagaatggaagactagaggttaggggcaacaaaaaaagcaaaaagaaaaaaaaaagtgcgttttctcgtgtgtgtgcatttaaactacattctggatttaaaagcctgggctaactcactcacaggtgcaaatragagtgtttttactctgaaagggatctaatatagctctgaatttacactagaggaaactgttgtctaaaaactaagaattatagacttgggagtttgaagggcccattgccaaggttatagtctagttaacagcatgtgaatctcattcttagttgaactgaaaccttcttgagggcaggaattgtattttatcctctttatcgatctgcccaagcacctggcatatatactgtgcttggataatacatatttaaataaatgcattcagcaaattaggtgcctgtggctatgttgacatctctgtgtctggcctaatggtttgatttatctggctgttaatggtcttcattacaggctgttaatacagggctgatttttgttggacattagctaattgccagagttcatctctagtacatgccagatagaagctgggcttttctcttgayggtatcaataggataattaagactatagcaaaattcaaaacatgatggagtatttattacattaagacttgtcattaattgggaattccttcagttcagatttctatatagtgtgaatttttgtcaagggaaagttattgatattaaaaatttgttgacttttgctatttttaaggactgttttttttgcttctgttcatgtagacagatttatatattttctagtttgaaatttcaacttgaaaacacagcatcttcaagtcaggtaactgtctatcaagaacaccaattaaatacttcataacaagttttcttcttataaaagcctacccacccactttcccccatgaggtttctattgtctgttataccagtctatattaattataggcattttctgagcaaagcactgatgaaactaagacatagaggagaaaattcctgtgtactttaaggataagagaaccattcctttttctggctcarttaaaactggactgattgtcaagtcccattaacctagtgggtcactaccttgcttgcattagtggcagccccaccgtaatgtggagcagtcttgccacgtcgtggacacatttatgaagattgataacagctaaggttcagtgttaacttttattgtcaggcaggctgtacaagaaactgtctggtattggcttttgctttgatttatgaaaaggttgccacatgaagaagatatcacataaaacagcactgctggcagcagcgttattcggtgcaattgtaaccatagcaaataataactaatggtaattaggttcagcatcatctcttgctactttccatagtttggctggggtgggccctcatagcaatataatacactcccaaaggaatgggtgactcacttgcttttgcttgggttagcacatatttctccaaagctttccttttttctttctttctttcttttatttttatttttattttttttttgagacagggtctcactctgtcactcaggctggaatacagtggcatgatcatagctcactgcagccttgacctcctgggtcaagtggacctcctgggtcaagtgatcctcctgggtcaagtgatcctcctgtctcagcctcctgagtagctgggactacaggtgcagtagctagcagtgtgatgctggttctttaagagagaaccattaagaaattgatttcatgttcagttatcccaaggtgtcagtgatcgagtaattacctgttggctttgcctcaggggagacatgtgtgcacagtctcccccatgaaccccagaggtggcaggagtctgaaattctgactcctgaatatctgcaatagctccaagtagtggcaggtggctcttctggaaagtggcacctagagcttctttctcaattggaccttttgtccctaaggagaatagtcatcactttgcctcattttttttttaatctcaatgcactttgatataatagagtatcttttatgctataaaaactttccttccctttgaaatctttggtctcactagtcccagttgcatcttaatattcaaggaaggcagctgtgttttcctttaagcaaatgtaattgttgggggaaggcatctcagtttatcccatggacaaatacattatgggtaatgccmaaaaaaaaaaaagaaagaaagcttgggaccccaggaaaattacatgaatcttttcaactcttcataaagcagatgagtgctgcccttttctttagagctggcagctgtggaggttacagaccagcacgtgtacagagaaatcgccatctttcttttagttcccaggtaaagacagagaagacagggatgccctttgtgtctcttgtctgtttttcaggcagccacatttgtcatagttgaacctacttccattttgatattccagggttttttttcargcttttgtatgccatttattgaattctggcaagatttggccgttctcggatcttctttatctagggaaatcctttgtgcaaatgtgggaggcaatcctctcaagcaatagaatgaaaaaataccagcagaagcatgcattagttatcactggtagcagaatatggccctggcccaagcaggttgcatctaatagcctcttcttgcctggaagtcttctggttcctggaatggcttggagtgatcaggcaagccgctgccataaaggaggaggcacagcagcagctggggagaatcacatttggcccacaatggcagtaagatggtgcctgggaagccctgctctcggatttggggggagctaaattatgaaggttggatgtgagatggtgtcattaaggactttctggagagatcgtgcaattaactatgaagccaaatgagccagtgggttaatatatggggaaggtactcctaaaatgctcataaaggcaatctagtgactgtcataaaactttcttttaaacagatactttttgaaagggtaaatgctaaatctgaacctcaaatcagctttaaaaacagacatagctaagatcaaggctcaaacattaatagaggccaactcttttactccagaaagtgaagaaagagactgctaagcccagatgattttttttcctggctttgcttcccttttagaggatgtggattgagccagaaaggggcattatctgatctctattattttcagaaactgtggattttgtatggcaaggtgcttattggaagagagccaggcttctcatgaatttcaacttgacaaaatgcccagtctgaactacatgaccataagaaagtgccgaaccaagaaagtccaacccaatgctaaagatagaacactagggaaaagtctagtgcaaggaaaggcaaataaattttgtttcaggcaccaactccaattgatcgtggtggctccctgcagtatttcattgaaaaggattcggaggctatgacagactcagcctgaaagaatgtcaagattgattagtgatgtctgtcactggcttaagcattgaatgagtaggcatttttcctttgtatttgctactcctgctttagaagcatatataaaaatttgttcamcccttgactgacggtgcgtaaaccagaaataggaaggatctggttggggaaggggagagaaaggaggaagagagagaaggaaaaaagaaggacgaaagcctaaaggactgtataatgcaattttcatatcttttctctgttctcttttcactttttttcctaccagcaggtttggtgaaatgaaatatcacaaaacaggactctttattttgttacctcttgtcccagtatggctcctagtaggagaactcgttacttctccctcatttcaggcaacctgagcaccagtgaaactgtgactggcatttgcagggacctaaaaggtaatcagagtaagaacaactggtaaaatgtcctttatgtgcagtcattcctgccatttcctttgtaattaataagagaatatattaacattccattttgcttagcatttgtaatatatgcaaacatattaacctttggtacatttttgaaatagtctcctgggcaaaggccttagtttataagcagggaaataagacttcagtcagatggcctcactcctaaayactggaagaaggaaatgctccatctgttaaacagttctttcagtctaaatgttggcacttataaccaatattggagatctaaaagtggctggatttgatggtgtctgataaaaattaatattataattgatttgccatcacgttgaaatgccttgataaaatgctctcattgctttatttcattatacagtatgtggttgtgataaaaattatctcattatgctattcaatttagataacaaaaccagttattcagaccttaaacgaaagttatcatcctgagcagtacttaagtctttctctttcagggtcttcagtcctagctcatattggagttgctggccataatcctcctatttgacagttgacattgattaaattaggccaacaagtctaaaatttcagtttcatggtctgctgtatagccacagccattacatacctctagtaccatgatatgatatatgatatgacatatgatctgatttgacaaaactccagattttacaggcttttcacataataatttagtaatgtgtaattaacttctgaatggtaatcaatccacacatactgtgattttatgatgtgtaaggcttcagtttctcactcatccttcacaaaggccagtcactcaggcacagggaagacctttaattttatctgggttttctttgcattcagccatggtgcatttatagaaaggagaatcctcctagtccatcttcttccccattcctgcttatgagttggctacaaggccattacaggcagtgctgtcattacctgtcaatttaagaccatttgaaaatgaaatcatcattagcactttcacatttctccctattatttctaaatgtcctttggtggttaaagcttttgggagtatggggtaggggaagggacagacctcacaacatgaataaactgaaatgttacccaacattttagtaacaccggcatgtctaggcctcctccagaagactgctagcgtggcttcacaaaataacatgtatgaccttaaagatacagaaaactcacaaaaagaggctgaaaaccagtttctggcctgtttgaatactggtttaacagtaatagaactttaactgtgtgggtttattattcttgaaacgtccaacttgtcttaggcgagattttgctactattaaggcaaattaaagccgtttgccatcaattctgttgagttcccctcactgcttagtcacaagtagcagccctgccaccagcagtgggtaaatctatgccaagtgtarttacttcaaatacaattccatttattcatagggtggactgttgctccccgtgagcacgtacttggggaaagaaaagatatgtaggtttatgttcattatgtaccccatgctggaggcgtgatttttaacatgagtacagctttttaatcccttcatcaaaaacacatgcagcagccctcctctttctccaccacctgaacactttgtgggtaccttcaagcttcatgagcagttaccaactctcagatgtatcgtattctaaaacttggtttttaagttggctgtttgaaaatagcagctcatttttctttggaaagaagatgataacaaatgggtaggttcccagaataacctgcagaaatatattaacaataaatgtgtattaataataacaacagctaccatttattacaggcttactcagtgccagacactgtgtggagagcttaaacgttatcttactaatcttcacaacaatgttaaacagtaggaaatgaggaaaaatttgcatcttagagagatcaagaaacttgcccaagcttccactgcaagtaagaagtagacccccgttttggatatgcatattttagatgctagatcctgtgtttttaaccatcacagtaaatggctaaaacataagtattgactgtattctagaacttaagtatttattgggaaattggttctcgattccagttgggatgttaagaacatgtgtagtttggccactcttcttcacaggtctgccttgttcccccacatatacactggctaatacggtgctgatgagaagtggagaagctaccccagtggcttctcagggggaaaggtttgagcagctgatggtgtttggcagatgtgacaagcactgggaatactgcccttttggagcttctggtctaatgggagaaataactgatcatccaaataacttgacaatggcaattgtgaaaagtgctgtcaaatgctatgagagcatgtcccatgggaatcgactgtgaggcattggagacaacctcttaaagctgatataaaggctaaaatagtaggcattaggggaagggcagcagggccaatgcatgttaagacgctgaggaaggagctgagctcctttggggttctgaagggaaatctattgtgagaaagtgtcgtagagagagatggaggcaggggttacatcttgtaggacctagtaggtcataatcactattttggatgtatcccaagagaggtaggaaatcttgaagagttagggttgtaacytagaagttgtgagaccagatttgtggtttaaaaggggcactctggttgttgttgttttgataatgaattgtggtagagatgagggtaagagaccaaaaatggaaacagagggactacatgggaggctgttgaaatagtccaggcaagtggttatggtggttcagactaggataatggcaatggaaatacaaagtggtccattccaggccaggcgcggtggctcrtgcctgtaattccagcattttgggaggccgagatgggtagatcacttgaggtcaagagtttgagaccaacctggccaacatggtgaaaccccatctctactgaaaatacaaaaatagctgggcttggtggtggacacctgtaatcccagctactggagaggctgaggcaggagaatcagcttgaactcaggaggcagaggttgcagtgaggtgagattgcaccactgcattccagcctgggctacagcaagactccatctcaaaaaaaaaaaaaaaaaaaaaaaaraaaagaaaagaaaaaaaggaagtggtcaattctagatctattagaatttagactagactacgtgacagaatggatattgggaatgaaagggggaaagggggaggtatcaaggacaactccctgatcttgaagggtctatttactgagatggggaagaaaaaaaataaattggaggtagaggagggaattagttcagttttaaacatgtggtacctgtaatgccttccacgtaaatagcaatagtcagtcacctataagagggctgggctagagatacaaattagatagcgaccaacacacagatggtatttaaagccatgagaatggctgaggtgtctgtggagagaggggagagagaagagcaaagagacctccaggaccatcactccaaggaactccaacattgagggatcagttagaagacaatgagccagagagccgggaggaraaacaggagagtgtagtattatggaagccaagaaactcttttcaagaaaggggcaatttactggaacaagtctgtgctgatcgggtcctataagatgtctactaaaaatcattggatttgaccacttagaggcctctgattttagcaagagcagttctatccaacagttgaatgaaagccactttggcatggatagaaaagaatggatggaaggtaaggaagtggaggcagaaattgaaagggtatttgctagagctgtgcttccaacaacatggtagccactagccacttatgactgtttaaatgtattaaaatttagtaaaatttaacatgcatttcctttgtttgcactagtcatatttcaggtgcttacttgccaccggtggtgtgaccaccatgttgggacagcgtagatttagtacatttccatcactgaagaaagcactgttggatagcactgttctagagaatgccagaatgtggtgagaaccatctcaggagagaaaatcccactagcaggcaagggtgggggaaggtaagaattggatccatgcatagggattgcctttctttggatgagagagacactcttcctccaaagtatcaatagaaaagaagatgggtgcagatccagatcttatgttgggaagatgagggagttatcttttggtttattttttttttctcaatgaaacaacaggccagcacattagccaagggtggaaagggaaaagaaccaggcgagatttttgaggaggctgcagatggcatgaataatcctagtaatagggggagagtgagtttaccaaagaagtgccataacattgtggcaggatttagtgyctgtgaatttatagtgattctagtttccctagttttgtgatttttctccagacatactcaactggagagtagtattaaggggctgtcataaggcagccattcttaggttgggttgtgtgtaatggcatatattaatactgctgaattggaacccttagggagatgtaaaactaatggagctcagcatggtgaatccaatccagacatgaattgagaaatgcattatttggtcctacagtaatatatcattatccctttacgtagaaatcattgagattccacctctgaaatactcgtgtatgagactcatcataatcatttggagaatctgtgtggtagattgttgttttctatacttcgtagttggtcttgttcrttttagtctcagcagcagactagaatgttaagccaatttgctaaatcttgcctgtcctctgtaaaatgcttaaatccgtttatataatacaaagggatatgttggaatttaatgccttcttatggcatcagtactgaatatttaatcagaacaaaaagagaaacatgttagaattttcaaattacagagttaycgtgtggatgcttcacagaggtacgtgcagttcagtgtgcytatacacccgtatgaacttctcacatttattagctataaaatacttcgaaggtgtattttcttctagtttttatatttaatttatggaatattaagtaggaaaatattagcaactacttggatgcatgctgcacttattttctaagaattagtaaataatgttatcatgtgtgattagttgtgtttaatgctagagatgagatattacgaattagcaactcaccttctaagttcttttccttaccagttaccttaaacatatccatttcccaaatagagaccattttctcatttccagggactttcaggagattaaaaggttaacatttacaatgctctgatttcaagactgcaaggcactatgtacaaaattcgtatgttgtttgagcactttttttaaagcctctatgttcaaaccttttgaaatgaatttagttcctatggaaacttatcgctgctgtagatagtgcccttatccaagagaagaaaataaaatcaattcagagaatgattttataattgtataacatagcttgggaatggacattaggaatatgtgcagttgcgctcttcggctgttatactggttcatattagattgtgtttgaaaacaaccttgcaaatgtcaccatctgtccttcactttgaggccagaataggtaatagtggtttaacagaartttcagtgggtactctttcttgcaacatcacaagtaataccttgtgaggaggcaggggatatgataaatattttggaagtaaaattagctttggtagrtggaggagagggagaaggaagaatgctgttgactcctgggaaagattggcattttgcaggctattcattcactagaattcgtgtagatgaacacaaaaaggaggcagctgaggcagatagactatttgaaagttaagtaatagtagtgtatgcttgaagtgataacttagcctatggtaaggatatgggaaactgaggaatgttaaaagtgaaaggtattttaaaacaggaactaacaatctcagtgacttcttgaaaataaagaattagccggtgctgtggcttatgccatatcctagtactttgggaggccaagaagggcagatcacttgagcccagaagtttgagaccagcctgggcaacatggtgaaaccccatctcagcaaaaaaaaaaaaaaaatcacaaaaattagccaagtgtggtggtacacgcctgtagtcccagctactcaggaggctgaggtgggaggatcacctgagcccaggaggtcaaagctacagtgaactgtgatcacagcactgcactccagcctgggtgatagagcgagatcctgtctcaagaaaaataataatttaaaaaaaggttttttgttcttgcgatagtttactgagaatgatgatttccagtttcgtggggggaggggggagggatagcattgggagatatacctaatgctagatgacgagttagtgggtgcagcgtaccagcatggcacatgtatacatatgtaactaacctgcacaatgtgcacatgtaccctaaaacttaaagtataataaaaaaaaaaaggaaaataaataacaacaaaagaaccaaaaattgatgtatgatgatgagctaacaatattgctgttgatgaaaagtaggaggaaaatcttgtttggataagaaaacaaataataaattgaccataaccagttgatacttagagtcttagaaggaatctaaaaggatcgtcagatgtagtccctggcttcagatggctaagattactgattgtatattttatagaagaactgaagactaaagaaacctaagatcacacagctactgactggtgaagagactcgaaatccatttcagtcacaaacagagtcgtaggagtacctctaaagaaagaaaatactttcacaaggaactgtagaagaggagtagggacatagatctgagctttgggaattacttataaataaaagtggaaagcaggtggggagagagcaattaaaaagacagagaaggggccaacttacaatttcatgaatagagaaagcttccaggctttccaaatgctcgtgttacacctcacacccaatggcttgccccatgacttcaataatgtgttggtttctctgtgtcttttctcacaaggttactgagatactaaatcagaagggtttgtgccaaacttgtgctgaaggctgataatgtagggrgcattatgaattgtttcccagcttacattttggtctttgtgtagagtttgcatgtgggatttcatatctgtcgtctttaagttttcaatcagttttctatttagtgccacaaaacgtgtggaaatggcatcaccattaggaattgtggtgcccaggcatctagagggaaaagcaaacttcattacagcaatttctcggaggatacaatatatataaataaaatgccgtatatttttgaayattatttcttgataagcaatatatgcacatgatagaaaatgtaaatattatatgcaaaagtcaatctccttcataactctttggccacctatccaactcccctgcttggaagcaactgctatttgcaattgtgtattttttcagatatattttataatcatttctcagccttttggctaagatcaagtgtaggtatttatgtcaagtatatatatatatatatatatatatatatatatatatatatttatgtgtatgttagcatatacatggtatatgattttaaattaaacttgtgaaatcatgagctcatgcagaataagtaatcmttgctgtctagcatccataaactcttattccattttccattactcattaaccattcattttactgcacgtctgttttggagagcaagaaaggacttgggctggaagtactggacactcagtataagtgtgaggtgaagcccatcagtaaatgmgtaaatatattcctgccttagatatacttaccttatatgtaaaattagatgctgtagtggaaagtacagcctggggggcagagaggacctggagtatcccttgccagcgttgagcatctcccatcatggggtcccctacacctgctcaggtaccactgcagggccaggcagcggggcctcccccaagttcatactccgtctctgctgttctgtgtccagctcctttaggagaaccttcttctcatgtactgcttttttctcatgcgtgggcttactcaccagaatccctcttgctatcagagcactgacccagctggtgaggtttcccacccagcaaaccatttccttccactcctccccatctcaccagcctcattttgtaatatccttcactgtggacacccttcttaggaaatcgaagtgttattycttaaccacaccaggtctgcaaggaccatgccctcctttctgcctgcccttctttgtctttctttcaaagaattgaaaactcactcttttcacactaccttccctgacatcctaacttttaagcacatttttactggttcctctacttgatgggaatgtcatggtctgcttgcagaatgtgtccttgatgaaagtgttttggctctttaatctgtatgtaaatttccatgtgaatcttaaaaaamaaaaaagtctgttagagatgtcactgcctccagctctagccttttcttctctcttcttttgctgcctttccttcatttacttgtctgtctagaatgcctttgtatcccatgtctaactgcctaagccctttccattcttgaagaccctagtgaaattccattatctcatctaaaacttttcctagtcatctccagccagatgtaatccttccctttkgtattttactgttgccagatgtgtccctttaaagcagttcttaatgggctagataggtctgcctgactcagtctcttkgtcttgtcccacagtgcctagtatctcacaggcactctaaaggatatggaattgacctcatcctgccacctccatttcttcttcactgcccactttcttctttaccaatttctacctggcttctgcctcacgctctctgctcagattctttctccagcttgctatggagcacattccttggccatttatcagtcttccttctttttgactgtcttctctgtcgtgaaactctggtctccccagccttgtgatgctgtgttacaccagttctctccacggtcagttcccctactgctccatcttccttccctgtcacccccaggtatggactgttccccaagcttctgctgtcctttctgccctttgcctctatgctccccaccacatcttgcagggcattttgacactgcagctgtagccctgccatcatgctgagctccaactccacgctttagatcgtggtgaggaggtgtcatttccacttgagcttcctgtcattactcgagcatgtttattctttaaatccccaaggcctaagccatcctgtgattctctcagtccttcctcttctttacttccatgtcctctcagttaccacatcattccatccttgctttccatgcctccattcttgccggatcattctcttcatcagcttgtttcatctttatagctgggtgctgctccactgacctctctgccatggagttccacttcyatccatctgatttatttttacactggatccgccttctcaagatggtacctttataacttcaccctctcatttagaaaggccagtggcttgtcawcacctgcaggatagactctaggtgtgctgtctcttcttggcagactgtccatatcccggcccctcccttcttagcactacccaacccttccaaccctctactacaacctgagtcccttgaatatgccagactcgattgagcctggacctcagctcacctagatcctctcaaacgccctctgagtcttacagtcctgcccttcactctgtgggatttttaaagtcccatctcctctcttccttggaacccccccagactaccccttcccccacactgtccacgcacaatagaatggttatgccctcagaacagctgtagtgtatactgcctgtactgtttccttgacacttcggttgccttgtgttacttgtgacctttatgagtgtgtatgtttctcccccagtaaataagtttcttgggggagtatttagtattctctcccctcccctttgttcctgcacatcctttactcccccttcctagtctgtacacagtggcacagctctgatgtccacatgacattctttctgcctcgcagcactgcatccaaggaagtttggcagcatggcctattggccccattttgggatttccctcttccagtagcagtgcctaagcattctcctcttcaagtaaccgatagggatggaaaacagacaaaaggcttgactctacccctcctcccactgctgctcccgccactcttcatttttagcactctgacacttaaagggcaaatcaatatggataattttttttcttcacttgtccctaaaataaatacatttgcaattctttcagttaagggagccagacacagtccttccagtgtgtatctggtatttggatcttgcttttaaaatgtagtagaaaaaagtgtatcacgtaaagtaatgtaacacgctctctcaccacaaacttaaattttggtcttaacctagttttttagaatgtgtcacagtcctcattgagatatgtgacagttttgaaatttttaaaattaaactgttcttgacttctcttggtattaaaagcactctcttaaatttgatcacggcagggaagaggtaggggtactggaatgtatttttatgcatggackactcaaatgaaatttcaccaaacttcgcaccacccgagtcacccctcagctgagaatgagcatataaaattcatcccaaagggcaattctttgtgaaaaattataatcacctaaaaatagaagctccgcatgaatgtgtgcccacttatatttctgcacagaacgcagcttgcatactacccaacagcaagagtctgtgattgtaagctattataatagattgaggaaagtgatataagaaggtccatgaagtatgtatttctccaaatagggaaggattatttctgggagggtatgtttgatgttcccttcagttttctcattaagtcttaggttgattgttagtatcctttgttggaaaaaccttgtagattgccaggcctggtgccctgtcccttggctacattggggactcccgtgttggctatttccagttatctaccttctaaacatgaggttttctgcaggaaaaatgggtgataaaggcagtaccaccccttcaagaacctgaaattaaagttaccttcgaagacaagatgtcatagtttgctttagttcccagccttgaactccccatttctctccctcgtcattcccagtgggtgggttgctgtgcccagccaatccctctgttttttctccacctgccagattcgtgcaggtggagaaaaaacagagggactggctgggcacagcaacccaccaccgggaagagtgkattccttccctttctcctctagttccaatagattattttgcttcctaatatctttctgctttcctcaacttatcccagttcctcctgtcttccttctgttttgggagtgactgagtagataaaggaataaatgaaccaaccaaccctcatgtttttaatcctaagaccaattttgatgaacattccaaagtagcatcatgagggattggaaataactcacaaagcctcgagggtatcmccataagtagaatacattatatagatatttaagaaaatagttatttaaggaaaaatctatgattgatgcattgtatatggctcatgatgaacatatttctgttatgtaattaaacagttgttttacgaagtcaggagagagtaaatgccatgcctttatttaataatagtaataataacgatgcttttcttgaccctgaaacctaattgagatattcaaataaaaagtttggtctgtgttaagattacttggtctcattcacacattgatatatcctttggagattyggatttaacagtttcattccaatacctgtggatcttttgaaaggacaaagagaataatcttcaaatttgcaattattataaccaagggctacttctatgggctgtgattttattctgttcccactatgtgcatgctaggaggtagttctacccagaatactttatataactgctgctagaaaactgcattgttaacccactagtgcttgtttttattacagcgttattatttgacatttgttaagcaataacaatatttcaagcattgttaagaaagaaagggagggagggatggcttatagctctctaaataaaggcttcccacccagacgaaagcgcaatttgttagctgtagaattttgcctgttgagaagactttgtaggcttgagaaaatagcatcccatgagtacatggttgttctaaattatatgtgatctggaagtttatttggggtccttccagattgagttcatgttgccatcagttatgttgagtcaccaaactctgtacaattattgcctcttagtcctggtatcttttaagtaagaattaagtaaaaattttatctccctttttagcgatatgtagcccaaatataagtcaagaacaccaagatatggtggaaagtaaaaattagccaatggcttgtttcttccacctcataccaaatgtctgacttcccaaatccttccacctgttaaacaactaaacaaaactggggaccctcattctttggagacccagtttcctaagttcagacctctaatgaggaataggaactctccagctcttcagttgtgctgggtgagcccatacagtgggatccagctcagggtttggtgcagttggcaagatcccaagagggttttctgtgaagggtagaatgagagctgtggcttgagaagaaaccaggcagcaggggagtcccatcgtgtcagggtgtgttactctcccctgagcaccacagagaagacaccaacccctaccagctgtcacgtggccacatgttrttagagtcctgctctcctaggtttttccaccctgccccccatcatttccaaggacccaatattattgaaaaagaaaaacatattgcaaaattgaaaagttgtttgctcaccttacactttggtatgtttgtacccatctgtttagggtgtatgaggcctattggcataagaactgtgtatctgtgtatatagagtactgttgctcattttagcagggataggtggccagaggtcctctcttttggattttcctgggtttagggcttttactcagggtcctaacactggagtggaaggctggcagtgctttcccctcctgccctccaggtcrcgttccccacgtagatctgactgtggaattgtgaacctgacatctttttccaaagtcaacagtggattaaaattaaaatgttaagtcttaaagtattttcagatagaaactattctttcaaaccttgggtttataggatagaattttatatgctctgttttctagctagccaaagctaaccttttcttttaaagcccaagctgtagctatttgattaaatagtatggccctcattacaggtcatagtctgctctcagtgtgactggttcgttgagctaagtactgagctaggtgatgtccaggttggcattcctttctctggtaacagtggaggctgcttggcattttgtgttgtgatggtagaaaacatattagttaacattcatcatgttagtaatcaaaagaaatagcatctcaaattgtatatgaaaacaaatggaaacaaagcaggcagcttttggagctgtttggaccactttagagagggacttctgaagtgtaattgtggaaatttgattacagctcaaatggaaatgtcattaataaaatggttagcagttattaagaatgtcaggaaagcttaaaattgaatttttcagatcttgcataattagagactacattttactctgaaaacaaatattaggatatttagatttaaggtaaaattaaaaataaaaagttaatatagtacatttcagataaatattttcttccttcatattgcattttacgatagattaattataagtgatgagaaaaacaaaagtgaatgattacatatttttaaatattggcaatgtgcctagtagctttagttttgtgttttaaaagaaaagcagaaatcctgatcactgggtttaacagctaatgaaaagttggtagagaaaaaattaaagtttttgcattgtgctataggaattagacctaaagatttgattccctgactgtgttgtgtgtcggcttttagtgtaaaatatggttttatgagaccacctgatcccatgaaggatgcattatcagaacctgttaaaaaaaaaatagaattctccttttaacaccagccattctcatcttcattttctctctccctccttctttccttcttgttccctctcttctccctctctctggtatttcatcatagtatctgtagaactctctcagcatacttctggttcaggtacagggaaaggatcctttctttgcatgcctagactcgtaatgagtgacttcagtgtcctctagagccttgggagttgtggctgctaactgattgtcattacatgatttttttagccttctgagtggagagtggtgtgaggagtgttatctccacattttttccttctctgaagttaccttattatccttaccattaatattagcagaactaaaaagatgggtaagtagttttcttgaaatgtaaagctcagacccacatcaaagaaggttctaagacttgaaaatagaggcagcagtggaaccaacagatagttttaaaacagataaccgagtgtaactgtgttatagagtcttaagaggggacttctgaatactcccttggctttgtttttgctaaaactgttttcrtttctctttgatcagttaatttaacttacaggaaagtctcctaaggtaataatcagaaatggtagttaataatttatgtccttcaccatgttttttaagcagtgaaaaattagaaacagcctaaatgtgtatctttattcttttctttttccaaagtttctacaatagacctgttagtataaggagaaaaaatacttggatatatatttttttagatgccttttaagtgaatattaacattaaacattagccaaagaatgttttactggtgacaggctacagaatatctaccagaagtgcttcttttgattttgttctggggtcaaatctttgggactccagttctacctttggtactgtcagcaaccccttgggcctttggtgccactgtgtggggtagggagggccaaagggagggcgggctgctagtgcttgtggagatgaggggagagaaagggaagagcagagtaaaagagtataagaaagaaaagaaaagagatgtgcatacatatggtaggatccatgaaaggttcccagtaatttcaagtgaccacaaaactggattttttttcttgtttttgttacatgtatattttcaaaggttgactctattccaccgatttcttcttgctaaacatgtttttgagtaactattagatcttcccacttctttattagtgttttaagttttccaaatctatatttcatccttctcttaccattgtcattcaccatttctttgcctcttccttacatacaaagaaattaacttgtctaatcgtcctttgctgctaagacttaattttccttcctaggtatcttgaaagtctgcctttcattatttttgcctaataggggctttttccatcagcaggaatgaaagcagtcaataaaagtcaattgctgactctatgawtatatggagggtttaccataatgcatattggaaatgttttgaaacctttatcctgaatggaaggtgccatggcttgtgttttatggccttctaatgttagacagcaatctcatttagcattttcccaaagtgaaaacagtgcattagggcagtataacaagctttacagatcaatacagaggcaaacctttacccttacagattaatccaagaaaatgtcccagagtctactcctggagctggaggacaattatgctgatttccattcctcttcccctctttctaccatcaaatcattaatacagattgaagtgtgtacaaaaagaatttcagaggatgactgcacacacacacacacacacacacacacacacacacacacacacacagaacagatcaccaaacaggaaatcaagagccctggaagtgagtagtattgatttgtggtgataaaagtatattttgacacatttcaaatcataaataackcatggactttaacttgcatgactaatagctcaacccaggatacatgcttatctacaacttaaactacctctttctaaggagtccataacatgaggtgaattatcccatcgtgagtagactttttaaaggaaaaaatamactgtcttctttatgacatgcagtgtgtggatgctcatttttacagtcttttcccgtatgttaatgaggaagggctgcatatctggtcagggttgttctagccttccctcctcacctccttcsccctgcttttaaatctgagacacattgragacacgatcagttgtcaacactaggatagaatgtaaccttgctttcctatgagctattagtcattagtcatgtatttgctaggttcagctgatctgatgcttaatcatattttattcgatatttatctagatgcaggtcttgctataattagtcacttagtggtatctgtgcctatactctttgaagcacrgctgattccttttaaatcctgatgttcgtggtaaaggattagggaaatctgtgtccagaaaaattcacagacatctgaagtttgaaatcttaaagcatggaaactcctgggattctatttaattctgttcttaggtatttgacaaagcagtaaggtaatgaatgaaaaagtaaaagtgatgttatagaaaaattgttgaaacatttttttttctctgtatgtctgtgttctttagaggatagtaggaagtcagggaaccaccaacatgctttgcatttctattctagtaaaatatrtattagcttagtgtactggataaaaataatgagacaaatcatcacccaggcgtttccttattgatgagaaatattccccctgtgttctctaggggttttgtttgaacccattaaatttaaaataatgtgatttcaagattactatggaaataacaaatttaaatttcaaaaatagaagtgataagactggaagcttcttgtattaagactaatttgaaaaaacacgaatttcaagattaaaagtagtaatattgtgctttttttctctgtatgtatttaatccttgcagtccaaacttccctgccgtattaatcagaatattttaccttcattcgtataactcatttggttcattatcatttttcaagcatatattataaggtttttggaaacatttacatttggtctcacatattcacagaagcaatctgactaaaatctgagatttgtaagtataagtagcaaaattttaacccaggggactttaaaatgttttctttgcaccgatttgtattcattcagtaaatgtattacatgacttctgtagggttccgatgtctaatagctgaggtaacaaagaaaataagtcacagtccttggaatttacattctagtaaatgtaggttgytaaattgtattagactatggtgtagtcagtgtcacatgcatggcaagaaaagtgaatacgggaccaatggggtcaccataaagggaatgatagactgtaccagggttggggggtggagagctaatgaaagctgacacttgagtgaagtatcaaaggatgagtaggttttttccagatatagaggcataggtgggagtttgggcgtagagcatttccagaagcaagagcagcatgagcttagacttgaagagaagtgtaagaacgaaaccctgaattgggtttgtccaggcttcagctgtgtgcagggttggggggtgaaggccacagagtaggcaggaacctggtcaagaaggaccagccagctggccttgtattttgtgtagaaagtgctgggaaaagagaccatcttcgatttcctatgggaaagaaccctctggaaggtgtgtgcaggcaggagtagagggtgtcaaagctgagagaccagctgggaggttgtttcttgaattcaggatgtggctcacttggaagcaatgtaacgacagtgagtgtggagcaggaggaccaggccgtagggatctccaactttgtgaccaagtggatatgggaatggaagagagaacttagggcttccaagtttctggcatgttgatatggtttcggtttggaagggatggttatattgtccagactaactcacagtagtgtcaattagtggaactaatttcttagaatttatttaccctttgtcatttttatcatgggaaaaatttagctatctttgaagtttaaggaaaattctttctcttaaacctttttctacatttgcaacatctgtgtcttactgtgcgttttatgtgttctttaaccttgatttttattctgaatgaagaccattggtctcagcggtccctgtgtttgttttcaggcgatatgagtctcatccagtctgtgctgatctgcaggccaaaattcttcagtgttaccgtgagaacacccaccagaccctcaaatgctcygctctggccacccagtatatgcactgtgtcaatcatgccaaacaggtaggtgtgccagccaggccactgggggcactgggcaaattgaaaactggatgacctggggcagtggtaaggactaaatgggccactgtgtgtgaaaaagctttctaagccctagtcatcatcatcaagaattactgtaatgagttgattagggcataacttgtgtccgatcattgtcaaagagcccatatcttccttatgtacaactcatttacttgcagaaaaaaggattctactacaattatamttttttccacttgccctgaacttttgtcttctaataataatgttcccaaggtcattcctcmtacttttaggccaatatttagagctagcgaagaggatacagattaagagctggcacctttgggcccataagccgtaggtaggcagagggccaggttaaaaaaaaaacaaaacaccaccgttcagtcactgtccaacgcttccaccagttgatagagttcacttagttggacagggaaagggaaaccagagatagcattttaaaaagaatttccactgcttttatagaccatagccatattcttctcttgacccttcatatcagaacaatatgatgttcacaggacgtgcattttctctaatttatgtactttagaaagctaatgataaaccctgaagcaaattatcaattctggcaggtcacataattgcctatcatttaaccaatttaacagttggatatggttgttctgagaggcagaaattgttggaaacgttgattccttctgctgacaaactccatagatttgaccttctaacccaactaaatctagtgtttaagttacacagcatgcctttctgcagtctartttgatgtagttataataatatcacttggtgtaaaatttttatactctacaaatatccgacgggagggttagtattatctggatagctggaaaataaagtaacattagtggaaagaatataatcaagatttattaaaagcctatgttgtcctcaaaagcctagtggctggcagcttttttctgtttcttgcttgtagctgcacttgtataactcttagtagtatgccagggatccttttcattaaaggtctttggtacaggtaatgttgctaatgttaagttagtacgttttatttgtcgaaaacagcttctgatatgctgttaataaaccccagccttcaatatgaatatgaactgaaggacttgagactcgtaggttgattcatggatttttctaacttgataatagtgccttattgagctggtggtcagtggaaaagagtggttgtgacaaagtgtatgtttcaatgctggtctctaacatacgtgcctgtttgtaccatgtgatttgtaacattaccacagtggcagctgcaggggcattgggagtgctgaccccatcctgcctgtctgggttgtgttgaattatctacatatagtcttgtgacatcaatggtatatatttataggataaagcaaagttaacttgtgacaaaagcaaatacgccacatggcgcgatagtgagtttgaatctggcagacctgggtttgtaccctgtccttttaccagctctgtgaccttggggcttgagttttctcatctgtaaattggggtaatgttgtgaggattacctttatataaagtattcagtaaatcttatttttccccttctttcctcagttgcattattgtgctgaaatttactaaacaggtcagccaaaagcatcaaattattattaatgatttcaaaagagaccctcttttttccccctcactctccaatcttttatgttcagctagtatgtttggagtatctattgttttcgtggctcttatattcagttattaggaggtgtataatacaagttaataataaaaagatagaagccctcaaaccttttttcctgagatgggcaacattgaaatggacgagaaccaagaacctgcaccaccttacatttcggcagtagttaggattgcaaggtcatttcacatccattcttttacttgtttttttatgacaacctgagatgtaaatagagatggttttattttcaccattttccagttgagagcattgaaactcagggaagtcacaatagtgaatttaacagctagaccaagatgtaccttgccataaaaacaaaaaatttcaaaatacataagtggcatttggtttttgagtgggtaagtttgtgaaggggcatccatccatcatccactaatgcagaaataaggcagtaagggaaagtgagagcgaaagcgataaagggaggacacagaatgtggaagatctaatgagcgggggacagagtctgaaggtcacacatggggagtgggttgatgaagcccgtgatgaaaggggcaacttggcactggcccattttaagatcacgccacagtggccagaaggagcttctatcagtgtttcatgagcagttactttccttccaataccaggttgtccttttgctccttgtgaatttaggctaacctcatgaccccagctgtgcccctgttaagagactccggcaagatacgtagtcccgactgcctattttagcagttcctcrtgggccaacttcttacattttcttcttatgtttcctgttaaatccagagaacaagctggacatgctaaacatggaaaatactatacatgacaacaagccattaggcagtgttgtccatatccgacacagtgcaagggtttcccccatggaataattccaatggctaagtccactccacttttaaataactcataagattggcctttcacgggttccctggggcattgttctagagactaataggttttactgttaggaaaatttccggatattccttagccttactcttcctctctgcttatttatccacttattcatatcagtgtttcttcagctgttcttcaacaatttctcatgggttgacatgagacatttaggctattatttcttgtgtattaacttatgtgctcttcatgagggtaaagagatattaaatagctctaattattatttctaagacttaaaagctaccagctggctggctgtatgagatacagcatttacaaaggaaggagcacatcgattgatacatagtcctgtgtcttttgtttctcatatctgcttagcctcataactttctcaagctcagcaagattggattacctcttcttacctttgatacctggttcccattctatcttgctacacctacctaaggtaggagaggtgctgcttgtaccaaataggtcatgtctcttcctctgagcgtgcctatgaacaggcatgcttatgcacaccacctaccttacaggagaaatggaaaggagcgggaatgagaagccaatagtatttgctcatgggtagaccaaamtgtgcccaagttctgttttttaaaaaaggggaagggtgtcgaaagggtttgctgtcagatctgcattacgtctgggaccattccctgggacataccacctctctactatttacttgtagaattgggctgcattgggagttgctagtctaagcatttcagctttttcccagccctgctgctattgacagaaaaatgcagaagctggctggacccttctggcacattttgtgttcactgggagggtggggtttataggaaatactgctgctgcaatcctaatctaattatagtgacttgagcttcagttgctttgataaactgaaggtttgaaccaggtgatccatgagggccatctagctctgttattctaggactgattctgctttgaagtatatagagcaaaagatggtgtgcataagcatgcctgttcataggcgcactcagatgaagagacatggcctatttggtacaagcagcacctctccttttgagacctccagtatttgtgccttcgcctcttaaattttgctgtccaccttaaacgttcactcaagaagaacacttgcatttctgattggtctgctgctgcctggcctcccactgctacgtaccctttctttgaggttcacactcctgacagccctggggaagccaaggtggcagaaagaactgggagggaatagaaacagtttcacagtttctccaaagtcagtgaagtgaaaaacagctgtctctgcactggctggcagaatgtaccctgccggctaataaaggccattagaaaatgcaggctccctccagccagccgtaagcctcccctggatcgtgatgcctttcatcctgtgaagtaccatgggaagtgtgactctgaaaacagagcaggaagccaggaacctggagcctgacaaccaagggcaaactgggaccagaggcaaggaccaaccccaggagatgcccaagggacagaggtcagtgtgggacctgcagttagatgatgagtctgtcaggggtcccccaaaccatagcagaagtttcagtcagtaagcaggcagtgggacagtagccacgcaaacagttagttcagctcacaataaggacgtcttgtaaatgagacagccccacctcagacctacatgcttcctgctgatctctttggagagatcagaaaggaacctggccacagtgaggaacttggggtcaggacccagtaaatgaggctagatcctaatgtgacagctctccaacttaaggctagtgcaccccgttgtctcgtttctaaaatatcattgacatctccagtatttggttggcttcctaagtcaaagcctcaagatcagtgcatatggaggaatttgccctggcacaatttctgtccgccttctgaaggacaatttcatctccccggtgaacygtatttatattagaccaggattctgctcctaagtctgtgacatattttgagtatgaaggggtcctgaaaacatagtagtagcttttgcttaaaaatcaaggttcttgaaagaaaaacctattgccagagcaagctgtatgttatcattgttttcagatgaactctacattagatgcaaatgatttaatagacttataggctgttggagctaaaaggaccctagagatcatataacccaacctcatttttttcatgtgcaaaattagcttccagagaatttaaatgatctgtagaagggcagaacccagaccaaacagcccactcttaaattcaaaaccagggtatttttcctgtcgtgtcagatctcagatgtgggtgagcatcagaatcccctgaggggtttgcttaaaatgtacccacccaatccccatccctggagattctgattcagaaggtctggggtgaggcctgggcatctgaactttgaccaaatttcccaggagactctgtacccaaagtttgaaaaccattgctcttagagcccattggcctgaattgcattaaaggtctttgacctttcagaggtcctgccaagtccttgttttccatcttttgggagatggggagctatcactccctataggtcaaagctacctggcagaggtctcatcagaccaaccctaggaatgaatctttagccttaagaacaaattggaagatgatgtgggaatcrgatggaagccttgaaaagagayccccttcccctcttctcttgctcccattgaaacagtaggtgaccccagtcccctggctagctcacagctgtgaccagaccctcccttggttctactgctcccagtcaccctgcttctctccccgacccacatcagggtccccccgatgtacacggtggccactttcagagagcacgaagataatcaagaaggttaaytttctgggaagcccyccaggagcatgtttttattgtgttcgaaagctgctttatcattatcgcttgatgacatttattaattgcccagctgggatgctggtcacagggtgactgacacgtgggtatttcataatagatttcccatttttttggtagggcagccctttgaatttagagtcagatcaaagcaaacaaaattccaaactttaaatttcctatcccaacctcttccatcataggaatccttttctaaaccactttctgagagtaatcgttgcttcgtgacattttctctttttttaaatctgagtttaatagaagaaatactaccatggtaatagattttcatttttcttaataggtatttcttttcccatggtcatccttcaattagaactgcagtatgttagtgttttgtctgttattgcagccagctgtataaacagttaattacttgtaacttaatttgaatattatacagagcatttgtcatagaagatataaaacaagatccaggcagaaaaaagttaacttctatttcctccaaagcaggaggaacaaagaacaaacagctcttgctgcaggggaatagacacatattgaaaacaaaataagtgatctaatcagatttccaggtagtgaagaacagtacttggtgcacaggcaaaactcgctttgtgcttcccataaattcaatttatagatgacttttccttcctgtcttatgcacagtcttctcattctggctttttcctcatcgaagctccagtgtctcccactccccacttttcctgaccctccttagtaaaactcgtgtcttaagaccaggtctgtgccaggacacatctccagtttcatttttccttggttaggtagaccttcctgcttctctacccagctttatgaggcctgaagtcttggtgaggcgctgggtaagttcatccagagacaagcaccctgagtggtatcttaaaaaacaaaccgcttttcttctcttcatgatgattggttagcaacccagggttgccatcatttctcttaaattatcaacacaaccagtagctggcatgctgctatgatagtcaacccctccaagaaagctgtgattcaaaaatcagttgatgagattactgcttaacagaaatatttgaggcaagyggttaggatggttagtaaggttttaataagcggaaatgacacgcaatctcaggtctccaggggygctgttcttatttgtgagctgccrgttgttcttcagtggctggaatgagaaaaagacttgggaaaagagcagtgttcatgcctgaaccactctcttcttttggtgatttacccagctgtttataaaaggagtttctgcaggcccagatacgtgaatgatgagcaaaagcaaggaatttctttctccacattaarattaagtgttagcagttccttaaatgaaggaagcaattttttataacttgcaaagcttctccctcattctttagggaatttcctatgttaatttatgcagtgttaaatttatgcagcrttgaaattcagcccaacagcagtacttacggaaccaatacagagacagtagaacctataaggtgaaagctgaataacacagaccccaccagactacggatccctccagccaaaagccctgagttctgagttggagcaggttttgtcgcatagctggaatataataataacccaaaatgtttgacagatgaattcatcttttttaaaaatccagcctgccattgtgtttgttaatttccctgatagaattgagatggttttgtaccacccctgccaccctttggtagcaagtgagtgcagtttgacaaaatgtttatagatcagccctggtgcttttctgtggtggtcccacatgtcttcaaggagtcaccacaaatcagctgaaccactgtgctatcttggaggattagaattttaatacatgtaacggtattttgtgaatgtggctaaaggggttattaaaatgttacttcttttagtgtctttatgtgagactggcctgctcatcctcagaccagccaggccccatcttgtctctttctgaaagagagcctaacattcttagcatgatatgatttggctgaaaaattacccatctatatttggttgaggttgcagagagaatagtaaaaacaatctctagactcgtgaaaacactctttaactgttgctttccttaagttgtggcagctgcaggttattttgcaatatttgaaaggaggtacattgtcatgtggttatccttgtaaccctaagcccaaaattgtagagaggggtacagctatgtaatcttgaccaggcagatgacaactcaaagctcccatcagtgtgttgaagaaagcagtgaatctataacccccccaaatgcaaatggctaagtggcatcatttataaagagatcactttctctagtaactgcattcccttagataggctcagtatagatctgcttgatactggcttccattttgtatttaataaagcatgatgtagtgaggttgtctatatatctggaatttatagaacttatcatctatgtgattggagaggctcacacagatcaattcataagcaggtgagcatagctgagatgctgtgacgctgtgacactgccaggtggtgtctcttacatggtgggtgctcagcgtgttattttcccagcgaacatggggctggtgcctcacattccagtatgagttcttacaggacaactctctgctgagcaatcttccactgcacctactttgtttttcctgttttccctaaatgcatctagcttttctaatttacctcctgtatgacagaatcattgtttttctcaccactgtgtgtgttatgtctaagtttgtctgcctttatatctgttcttttgtgccctatgacatagacttcttagaaacctataatgatgaacactttaggataatctatccaccctttgctcctatgacccaatacaccatcttgtttgacttctactctttctgttctgtccccttaatttcaatcatttttaaatttttgaccctaaattgttgtgtctagagacctttgacctcagagggcctacagcgtccttctagacatttccattttggatgtctcacccaaaattgcctcacaaacccaaaatttaagtcatcctcctccttcccaggctcccactgacttccctgtttctcttggtggccccatcactgtctttgtcaccaaggatcctcccataccttgggtgtcaccatctccctttttcttcccatgtagctctagttcttgtttccacctttgtctggtttctaatctgcctcctccttgggcttcctgcctgcagactcccctctgttggatccatcatgctgaggatgtcaggttaacattcctaaatgccattctcctatgtaaaagcattcctccatgttttctgtggctagcaggacatgtctcagcctggcgtccgtcctgggccctctttccaccctttctcttggtcagtcctgagcatgtaccctttcttccagctaggcctctcccctcaggattctgtgtgtgctaggcttcttcccctgctgaatcctggccaccgctttctcccctcactcctcccaktcccaccccagtcctccacctggattctctccatggtggaaggtccttggagaagccttccctgctcgctccagctacagggttgccctctgcaccaggcagaaccattcctcttgtgaactgtgaccatctctggaaggggacacagaaactgggaaacggaaggaaaaaattactttctaccagatactatttggttcctgttaaatgttatgctgtttacacaataaattttagcatgtatttagcaaataaataaaaattagcaaattattaccttttattattcctgaattttccacaggtgtatgtattagtttccccaatgcactaaactgagtgcagtggtacctggtaggagctcaatgaagagatggctggaagggtgcgggttggcgggaggcaggtgggaatggataaactagaggcaacctcggcctcaccttgcctctctgagtggttgcaaaactagaggggaaagtatcacttttttcttcttaaagacctctaaaaatgaaggcagtatacccccatttcagctggttatagagttctcatctgatagttaagaattcttcctatctacatcctcatctcccaaataaataactaaatagaatgtagggaccatttctgcaatctgggaataggtaccaatctgtgtagctctgtccagcctcatgagcacatgaacatctgcgttctccccctctgggaaggaatcttgtgtttctctaatgaagagattccctctcagagcctttggagttggggtttgatccctgcactgccttggccatagctttcccccggtcactgcatccatcagccatgctcccaacatttccaaatgcccctaccaggagcacttttgctttctatttgagacagcaaagactgttgcccaagctggagtacagtggcatgatcatggctcactgcaccctctgcctcccaggctcaagggatcctcccacctcagcgtctcgagtaactgagactacaggcacacaccaccatgcccagctaatgtttttgtttttggtagagattgggtttcattgtgttgcccargctgatttcaagcttctgggctcaagtgatctgcccactttggcctcccaaagtgctaggattacaggcgtgagctactgcgcccggccttgttggggttttcaacccatgtggtggtgagaggggtcatttaaagatcatattgataaagcaatggtgttgattaaaggagcaatattttgagaacaggaagcatatgccttgttttctgtgtttttaaaattagatatttgaaaagcaacacaaatcatactaaatagttagtgccatttattttttgtcctctcccggtggtaaaacttactctttctgtttttcttgcagagcatgcttgagaagggaggataaaaactttcagaatgagcaaaacaccatcaacgttaattccagagatggaacattttttttcctagtgagaaaacaacccatttgaagagaagaccactaatgagaagaccactaaagagagacatcaagaatggattcagcagaatcatttcacgttttgaacagcagcagtttgaagggccaaagccttgatcagggatcagtcattaaaggacactcttgagtattagtaaaccctcttatgatgattaaaagagaagggcagccctctccaccttttggtactttctattcaacttgcactgaccataaaatgtttctcttctgaacaagccccatcatttggtgaacctccaccctaacaaagtaggatggggttgggggctaaattaattggagtggggcgaggagagagccagaaaacatagatccgagggcagcagtgctgggtggagagagccagaaaacagatctggaggcagcagtgctggatggaattgtctaggctgtggcatgttggttttgtctttcttttctcctttgattatgtaagagctatttcattataacttattatggtgattatacaggcaagaagacaaaaaggagagaaaatgtacctcttctactggaataatgtttatgattacaagtgagataaggtatttttatcaatatgaaggcaaccttggctgataaaacctctatagtgaatactcacatctttacttcactcactatcaataataaatatattttctgacaaagactggcattgtagctcctcacacattcctttggctgggttagatgtctatgcttacgggaattgagctgatttatattgttaataatttgcatttgtgctgtacctttcctctcaaaggctccagagcatttcgtggagcctccgacaggcaagtgatgcttataacttgcctatcaggtaggtagaattcgggaagatctttacaaattgtgtgaactttcctttctttgggatgacttaagtcatcctgcctggggcaagaactagattagataaccttggttaggaccttctgacyctgcaatactaaaaaacgtttaaagaaaataattcaaccattaggtttttttttcctctttccartttttcaaaacttcctgattataactctcccttttttttttttttttttttaaccatgattggtgcttcaaccctggagttgagtgagttgkaaataagtagtcacactgaagctaaatgaraaggttcttttcagacataggagtaccagtgctctgtgatatcctttaagtgtcttttgtcatgtaggatttttattttattacgaagcaagtgaatttagcaaaatacaggttctgtattcttaatctgtgtwcaaattctggctctgctgtggaattcaaccaagtcaaccaatacttcttcaactgcaaaaagggggcaaatggaagaactaatttttaggcttacagtgaagagtccaaatgctgactcaccgcatacgtttggtcagacccagtaaatgctggcttgtgtgatgattcagtaaactggcatttggcgttgggggcatagaacgtattcacatgcccaagtaccttttatttaaagttggatgtacttgtgatggaacagtctcagccaacgcatgtgagtgtaactgcagctgcttattcattcaggttccccaggcgatggctccctccgagtgacatgttcatagacacttggggacacacctgctggcctaacgttgattctgagcaacactagaggctctcctgccataattactgatatcctctgtgatgactgcttcatgaagttttttttgtttgggtttttttgttttgttttgttttgtggggggctttcaggtttcttttttaatggtctgaaagaagctgagtttatttcagtgtgaataaggattcactggtaacttgaggagcagcacattttgatgctgtcagggtggcatccaggtagctgcctgagagaaatggaaaaacctgagagacacaaaaacaaatgtttacatggcgacttgctctagtgtttgcaaatcagctaactcacaaattccctcctatactgttttgttttgcaattgagagccaagcacttggcacatcccaggctgccagtcttgcctctggcaggcaaatgcagcgctgtagagtcaggcgtctaaagtgggcgaaatccaggggaaggggggttggttcgacaggccgctcctcccagcattgcttattaatttatcattctgataagcatggtaggtgcaagacaaaagccagcgctttggggaagtaaaaggatgaaatgatgcctttctctccgtccttggagagctccctgctgatggcatcacagctctgccaggtcacagtagctttccagaccactgcttgggaagagtgttgtgatttatatgaggctgtggagtggtacattccaatcagtttctcacttaagtagaatgcaccttcagccacagtagcttagctcatgaagccaagaagaataaagtgtcttgaaagctgatcagaggatatcacactaaacaaatgtttgaggaacttatagaacacagctgggttgaatcagcacgaagtcctctttgagaagtcaataacattacagtaaacttgccaacatgcactagtttagaaaagtattgactaatcatgattagtagcaaatgtagactgctaaaagccagatgcctgtggccagttggtcaacccacaagactccctacaacagtttttagcttagaactgaccaggtagtcacatgtcctcgacttctcgggctgagaaatggagaatgtgtggttcttcacttgctgtcttccagcctgcaggtataattgcttttgccagaaacccacattgcagtgagctgtaggagatgacccttttgagatttaagaattaaagcaacaaaatctcagttagattaggaggaatagttcaagagatctgttgtacaacatgctgactggttaataatgttacaacgtattcgtgaaataatttttttaaagaattagcagttgaacaattgaaagggcagcagtaacttgctgtgattcaaaccaagtgagttaggaaaatagtctgtttagaattaatcctcttgaaaggctaatgttgtgaatgaatgcgttgatactcattgttatctcactgctctcctcccgtcttcctctcccaagttttcccagtctctgcttcctcctctcttctctgccatcttcattccctcctctaacctcctctgtgtgtttacacttttctcagtctctccagcctccctccagagaagcagtgacaacggagtgcacagtgcatcctcctgagtgcagagtcctgggctcttgatccagctctgctccatttgtcagtggggacaagtcacctccctctggtctctcactgtacagtggcctgttcggggtcctttccattatgatttgtgttttttgatacttcccttcttttcttccccggcctcctaaatcttttagtcctatatttagtacttcctctcatttagtaatttcttattcttacagttcttataaactgggtaaattttctaaatgaaaactatatttgtatttctttctctgtgcccttgatggtacttttcctacagcttatggtctccattaggtttttgttttccatcagtgccctgagggatttactccgtgggcaggctgcatctagtctaggaagtcaccttaggacacgtaggccatttgtgctgatgacacccacggtccaaaccacccccagaataggggactgtggtgcgggtgttccgaggcctgcaccggccagtgaagaatacatgttctggctaaggagtccacggtttagtttaaacctttattcctggcatctgttttagcttcttcctcccagcctttaagagcatgtagaatggagcagatttcagtttttactctccttcccttgacccacttgattttgaggtaccaacaataactgaagcaacataaaggaaataaaggagggggataaagacctgtttactgtccataaagtagaatgctggctcgtggtgatcaacgctgtgcctggagaggactggatgtgattcccagaagctcctttcactctctaggagctttttttccttttttggccttttttttcctttttttttttgaaacagggtcttgctctgccacccaggctggagtacaatggcaaggtcttggctcactgcaacctccacctcctgcgttcaagcaattctcgtgcctcagcttcccaagtaactgagaccacagacacgcgccaccctgcctggctaatttttatatttttagtagagatggggtttcaccattttggacaggctggtctggaactcctgacctcaagtgatctgcctgccttggccccccaaagtgctgggattacaggcgtgagccactgcacctggtctgtaggtgctcattctgactgtaccatatatgaaaaaaaaaagtcacttttaattattccactgcaggtgagtcagagctatatctgttttacaatcatccctagcctgcgcatgacccagggagactggagtggttggtgatttttcaagctctgtaatgggaaacttcaaggccccccttgggtattgggaggctggtcctgcccatctccctgggcgagctctgctactcctggatagcactgctttatccatgatggaggatcagattggtaaacaaaagacaaagtagatttgttcccccgtacccggaatgagagtcatcttcctcacccaaaaaggttccttatgctaggaattttagccaaagcaccagacagcttccggagctttcaattccattaccttccaaagcccagagtcattggatcctggctttgggagaaaaacgaccaaccgcctaattcattctcctacctccaggctgatgtttgaatggagatgatggaattttatatttcatgttgtgctctctctcctctggtccctccagcctcaatattgctggcagagcccctaagaagagttgaattgctttagtttatggggagaaagcaaaaattacccaaatcaaaggtatcttccacttttcctacccttccaaatagattcatggtctctagatcatgataatatgcccttgtatttcaggggacaagcctatgttaaatccactttggattcmgaaaatatggtcatcatattgatgcttttcagttaaggaagttggaaactgaaaccatttcattccctgcaactcctcaaaccaagtcaattctgtggcaaacagctttgcttcaatttaatagagtacttcaaaactcttgcagtgatttggattaggtgaggcctctatactcttcaaaggctttcccatgcagaaagactttacttacctacctctctgccccccactccctggcagatagtctctctcctgggaggaggcttatcaggcaggcagtggtcactgtccctttgttgagaggccagtctgcttcgaacataagcttgccttcaaagtaaattacatttatatatcatggctttgaaatgcaaacatggaagccggaggtcagtggtcagttgcagggtaccactctgcttagctgtgtgcctttcttcccagacttgccccagcacagagcagcctgccaggtctggagtccaagtggctcatacttggggagcctcctgcggactccccttccctgtcaggtctgccctcctcactgcccacagcacagattgaaagcctctgttcattctctctctctgcccctccttgcaaatatataaaatcgaagtcgagggcccgatgacttgggccaactgcctattatctgctgcctgtgcagtccaagggatgagggtaaaaccattttcttcacttcatagccacaagccgtgtttctcagtcagcatcaaaccagcaacaccatgccagcctgcacattttagcttggctttgcatctccctaaggtaatgtgcatcccggtctcagaagcatgaccatgaagtcattgaaaacagtattcaacctccagttgaagtggcattgttgttttatttcaagcttggaaggcaggctgcagagcaggggctgggaactccacttcagcagagggtgaataggatgtcgggtaacctgctggcaggagtttattttcagtcacctccgtgttcttaaaatgcctttgcagcagctgcatgttaaatgtgaacccaaaataaaagagcccacactcctcaccctcaggtgcttaacacagaacttagaagtatcagtgactaaggcagaaggtgtttttcttctattggaaatgagtttatcagtgaagttagaaagatgttatattttagaagcagaagaggggttatgaatcaccactaaggtgatgatgtttcaggaacatcagaagtttattgtcctgagtttttataaccactttcaacttcctcattaaaggagaagcttgttcatcacctgtggctcagcatggaccacttagttcatcactcctgccttctctggttccccggagaaggtactgttagccacagtaccatgtcacactggcattgcctgaatcattgcctgaattcagcatagcctctgtgcaccaggtactgttccaggtgtcagggatattgtggtgaacaggacagacaaggtccaggcctcgtggggtttacattctggt

SEQ ID NO: 9934 - DNA, 12968 bp, Homo sapiens
ttgtgaaatgatggttactgtctctgtaaagagacaacttttctctttcgctttttgttcagtctctgaaaacataaattcaggaagagatagctgaatatactagatggagtttaaggccagaggcttaaaacttggagaaacccttctccccaamtccagctccccaaattctgtgatggtattgaggagggccaccctctgactgtgcagctaatgagaagtaagatacatggataggaatttgttgctagaatcatgcttcccwtagctggctatgcatcagagtttgctgtggtgaacaaaaaaaaatacaggttcctctattcagagattgtgatttgaatcagggctyggctggagcctgcaaacttgtgtatstaacattcttcttagttgattctgaagcagccagcctgacgyatgtccccggattgctggcctgggatactggacttgatataagagaactttgcttcaaaccctggactctggctcctactgccgtgggatccytaagtcttagtttccccatctgtacaaatgggaaggaagtgttaacataattattttaaaaaatgcctggcctgtcccggggatccagtgagcatcagcttccttcctacattctggaaataatgtattccgattgtgattcaggggtcgcctgccaacaaartgaaagtgtttcctaaacgttgttagaaagccaatagtttaaaatataaaataattagctgtaaattgggaaatttttcactcagattggaaatacattagaataaaaagggtaactatctttccatatcaatctcagaggaggtgtttgtcagtggatcaccagaattgttttggggatgaagctctgatagcacagcgttttgcttcttccttttgttcctctgtctactggaacaagttacgtaagtcaaccacatttttagaaccagatataaacacccaaatgtcagatactctgacaacrtgactgaacatcacctccatttgggatggaaagcttcctatctacagaccatccaacacttgttggttacattatgyaaatatacccccaggaagacttctaattgtactttggtttcyggagtgggctctcctactagaaagaaaatgtcaaaagcagcctacaggaatattctagtgtaaactatttgtcattttaagtctaaagattctgttctagtttatcaccttaatctctttttgagtttggttatcctgaatcaatttgtacttgttagttctggagaaactgataaaagtcatggttcagcatcgccagaaagcatctcttgttagcacttataatttgaattatrtggggtaataatttatgtaaygtctgtcccactagagaggaagcttcatgtgggtagagcattacatatttctctcttgttaactgctctatcaccagcagcaagtagtgtttgatatatgatgaagatttgataaacatttatgaaatgaatggaggagtccaggtccacactcattagcagaaatgaaagcaaccatgagctgaagccacacagttgactcttttactgaggcaytgaaagaagttgaggtatcagagaaatggggtgtgtgatggtggttatcacaggcaggatagatgagtgtctccggctagctaactggatcaagtgtttgttttaaactttttgtaatatggtgcatgttagatagcattcttaaaatgttggggtaactgtaagattgtttgcctttaatatcttactggattcctagtagtagacttaaaaaattacaaacttttcttctgcctcattagtattggagtaaatttatcaatgtatagtactatatgtatcagtttggcataggtactttttgttcagttctagagatcatcttttttttattttactttaagttcttggatacgtgtgcagaacatgcaggtttgttgcataggtatacatgtgccatggtaatttgctgtacctatcaacccgtcatctaggttttttttttttttttttttttgagacggagtctcactctttcgcccaagctggactgcagtggcgctatcccggctcactgcaagctccgcctcttgggttcatgccattctcctgcctcagccgtcatctaggttttaagcccctcatgcatcaggtatttgccctaatggagagcatctctttacatgagttatttttccgttagaatattgtatacatatagcccccatatggccatgcataggagatgagaacttaaaaagttaaaatgtgtttcccataaaatgctttatggtaccctgagctttagaaatgaatccagtgctgtcgctgtaggaagatgacacatttacgatttaattgttatatcaataacaattagtcagcttatctgttcactggggtatttcttttttaaccataaagtagcttgaataccatgacatcaagcatgggtggccagttcaacatcaatgaaacactttcttaaactctttttttcttctgctaaatcctacttaacagttcagtgcatctccccaggcaaaaacaattagtatttgtttagttaaatatgctcctagaatgtgaaccaatttccctggcatggccttctagktatcagccttaaaatgttgcctgaaacatcaaatatttattatagcaaacttaaaatgaagtgtggttgaatcttaagaaatagatccctttgctttaccccakactgactgaaacatacttgtgttcttagtgggtcacttttcagacacagctaaggaggaagagttgttctgctcagacctttgaccagatgataaataagcctgggccttagttttgatctgtggagatgttaatttgccacgataaatcactgttgagtttccttgaataaggggccacagtatccattctctttctggataagatattaattcagtttaatttgaaatgttaatgcttggtttgaagatttacctaaggaaaaatgtaggcttccaaagggtgtagttatgcaggataggtttctgagccttttgctgaacaatttcatagtaaggctgttcaartttaattattttcacagtgactcttttccatactctttttgtacaagttttattacactatggctttttctttctaaaacataacatggtgaatgtttgtattaaatacagaatatttggatcatccactagaaattygggagactctgcttctctgatgaattgaggctgtttttaaggaatggtgctgtaaggctttggaagaaccgtttacaagcaaaacattggcagagttttaattttatttaatgacctgcttcctaccagtgatctcggcaccctgtgcaatgatttgcaatcaattaatcatacagaatgaatgttgtaacactgcaataagggcattgcactctaagagtctcataaatccaccagaaacaaaaaaacaggaattgcatgctcaaagacttcctcatgcaaaaccccagatgaaaaggtgattttatgttctgttttctaaagtgtcctcagaagccttaagactttcttgtggattctgagttttgaagtttccatttctcaaagactgtttggccctttactgggctgtcatcataggattctataagttttcgcctcattcggtttagtcactgatcatttagatggggaattcttgattctgaattaccaagagaagcccatggctttgtgttttcctctgaatttagggcagtcactttcaactgcaagaggccatattttggggagcctttgtagaaatgattcagaaaggagacatgtttccatcctgggaatacactgacatttgctagaggcagatggcagaagataggatagcgtgacatcagaagtcaaggagccttcacatacttggctttgccgaaagcttctggaatctgcgtgttcaggatcttaagcttgtgtgcttgtcatttcagatgtgcccttgcagttaactgtttaactatgatggatttttttttctaattttagcatagtaaatatagagctattaaacattcttaaaattatataagcctaaacccttggatgtgtgtatattgtgttgtctttattcattttcatatggttctgtttttggaatgttcttataacaagaacatggaagtttaatatatattccatctgactaaaactgaaccctctttaaagaaactaaaggttttcaaagctgttttacttccaatgagtagtttaaacttctagttcatgatggatttattcctatcaaaaagttgtactatttttgattacttgttaatgtatccagattggcatgttagacacaagtagagcacatcctgtatttttagatgcttgatgcttctgttcagcataagccctgaaaaataccaagttttgcaaatgcaaagtacttttcattggcatggaaattggagggaaaaaacacaatgaatattttggccaaaatrtgatggtctgttagtcagcatctggtaatgcggccatattttgcattcaggctccagtatgacaaagtgcagttgtacgttgacatctccccygggactgtggactggaaccacatctactttgaaaggtaatactgcaaggggrgtgcttagccttcttttagggtactccactcaactacctacataatttggtttttaaaatgttttggtttatgctaaacaagcagtctgagataaagcatggtaaaaaaaaatcaaatactaaatttgtctttatgagctccctttctctgahgagctggctatgagtccgttaccttcatgaatatggagcaaaaagcctaaatctgaactctgtcggctggaagcgaacaaagtactgggaaaaattacatcaaagtatgctactggtagaagttatcrttggtcttggcaagactacagagggtttttttcaaatgctgctgcccagtaaattaaaatattttctctttgtatttgtcaggtaagagatacagatatataggtaagatgaatatatttgtcaggttcaatctcttgcctactatgatagccagtcccttcaccccctctaccataggatagacacacaattgaattcttctttgtctaaaacaaggtgggcttaaggtaaaacatkgatcttctcaaacaaacttacaggacttctggtggtgactattttcagtttctttagagagactgttggctaactttgaggatgtatggttcaggaaagtttcrgaaaatatgttgcatgaagggataattaaatgactgagttaacactaacccagaaaaaaacactagggttgaaacaaaccctagcttcttctggtcaaaaatgatgttgcttagcaatagactctaaaatgctttatccaatttattttatttattgagacataatttacatagagtgaaatgcttagcaatatcatttttgaccagaatgaccaagarctgaatcagaccagacrtgttcctgtgaggaactgccattcwggatgaaaaaataatgaatccaacccccattgcctgcagccaagtttcggtaaatgttgactgaaaacacacttttccaatgtaatgagccttatgtacatttattgatacttcactattaagtgagggacctgagtgaagaaaagaatggatgaacacatcaagtgcactttatttatactgaacaatggagatgacaggctggcatagtgattaagatggaaggcttgggaatyatgcctaggttcagattccagctcagtcatttattatctatgaaattttaagcaggtgtttaaacttacttggtgtctcagtttcctcatctctacagttggatttctgatagtatctactttggaggtggtatgatgattacataaaacaatgtgtgtacaactcttagacctttgtgagcacttaataaacactactgttatcactgttactattatatcttgtggtgagaaaggagtacatgattaggaagtgcatttggtgcattcgagccactgggctgcttctaaagtggttgctctggggaccagagagacttgttatgcctcatttgggtatcacatgaatcagcacacctcaaaaattattccacagtttggatgttagtattaggtattatataagaatttcccataatcaaataatattgagaaatgctgatttttgggaaggcacaacttttcccaaacttctactgtgctcctgtgcactgtgaatctgcagaattggcccttcccaaaccctttcaaccacagcatcctcctttggaggccagcatcttgcaagactacttattccttgaaatacactgtggaaaaaacactgatgtcaggggatattgaaataaactcactgcatgcggcatacccttcaaagacatttttcctccctttggaacagttgaaattcaaatgacatatcctagcatgatttgccacatgggttgtgttttgaaacccaaatctaacacaacaaatttcagatagagctttgtttagcccccaggccagtttttggtcccgtggataagggttggtatccagacctcttagagcttttctgcatcagctttccagggcttattcaaaccctccatgtgctgkaagtccctcaccctttatgaggcacaggaggcgatacgcttgcatctcgatctctcagcctcggctcatgctgttctctcctttctcatcctgtgttccagccataggaattctgttcattgtgtggaaggctacgcacccccacatccccaaccttttgtacatgtgtttcctctatcgagaatattctctcctccaccttttactctcaacctgatgaccccatacttaatctttcaggacttggctccagggccacgtgcttccacagtattttctcacttgyttgctttatgcagtttatttattgagacataatttacatagggggaaatgctcagatactgtctactgtccagtcagttttgtgggaagaatatcaaggcacagagcactctgtcaccctagaaagttcccatatgcccctttccagtcaacccctccccttcaaagcagcgactcctctgcaatccatcaccatgggtgaatttcgctgattctagaatggaatggaatggaacactttgtgccttttggkgyctagcttttttcactcagcatattatttttgagaggcaaccatgttgttgcatgagcccatagttggttcccttgtattatgtttcattgatgaatattccaaagtttacttatcccttccttgttgatggacatctggcttatttctaatttttggccagtctgaataaagctgctrtaaacattcttgtacaggattttgtgaattatgtttatrtttctcttggattaatacttaggagaattgctrctaggataggtgtctgtttaactttcaagaaactgtgcaacagctttatactgtgaaatagtgattgtcctgactacaaacctccatggtgctgagaccaggttttgttcaacgtgattttcctggtgtccagcccagggcagggcacatgctagacattcagtgtttattgaagaatgaatgaataagaagttcaaatcagttttcattctgacatctctactactaactgagaaaaaatgaatgctctgtccatcaaggagatggaaattttattggctaaatgtgggctgattataggcaggcaaaaacaagagagacatagcttcctycttactgtgctcttggacttgcctctctcgtttcagggtggcagcatgtgcaggtaaaatcaggtgtgcaagytgacacaggccatagaagggtcctgatcaccagtatagctgagctcacctcctgcagttaaatctcccaacactcccattcaagaccctcccaaacctcctttttcatcyccccytaccctttggttcacctgcacaaatacatrtttcagccaaacttgacaactctccctactttgtgacatcttgcattctctcccctttgcaatggccacagactccacccagaaggcctgccacatgcagccacagccatctctttctgtggacaccctgggcagctttcaaggctcagttcatgtgctttctcctctctgaagtgttccttggccaccacatctggaagcttgctctctttggagagtctttgagatggtgtccacctgtggacaatgttcattagccacttagcaggatattctgcttttattctacttgtctgtgtatttctgctctgtgaggtaataggcttcttaagggacacrtatgtagtggccctcagcagtctgataggagctgaggctgctggccactaagtagctgatgctagtcttcatgatccttgctcttgatggccgattccattaaagaggagttaattacatggtaatgccatagctccttcttaagaggaggctttagtacaaacttgggaattcatgtcacctggtggacaattgaaaggcagctgctttcttggccaggtgcagtggctcatgcctataacctcaacactttgggaggctgatgtggaaggattgcttgagcccaggagttcaagaccagcttgggcaacatagcgagagcccatcactaaaaaaaaaaataaaaawaaaaaataaaaaacttagccaggcatggcggagtgcacctatagtcttagctacttggggggctgaggcaggaggatcacatgagcctgggaggctgcagtaagctgtggtcataccactgcactccagtttttgtgacaaaacaagactgtcttaaaaaaacctttctttaggatccagtgctagtcacaggtcagatgttgtcaggaagcacagatatcaaaagctagattattgctatatatcatttgtatgcacwaaacaatttaaagtcatctcccatagggaaagatggctccaaggagtaaaggaatagagcaatttatcatgagactgggtcttagtaggttgcccaggctggcctgagactcctgggttcaagtgrtccccctgcctcagcctcctcagtagctgggactataggcacgagccacaacayctggctttatgttctcttttgattgctgttttgrtactttaagggcctaatttttcttctgttttacaaactgcctaattttataattgtataattcctaaaaatgtttaagtttaatttctagaaatatggaagagggacctttattcttataacaaacttaaatgtaaaaagaacacctgagggtattcatatctgcactaaacgaaacacagtctatatgttaggttgtacttttaagattataatcatttacgagtgacaaacgcaaggctgtggctgtggttcggaaagatgtttcagggtttggtttcttagcagatgtcatttcaaacaaataagaattaaaaaaataatgtttytcatttttaaaaggaaaaaagttttatgttttcctgaatactgtgaatatcaatttctcaaaccagaataggtatgtaagttctttgacatctcataattttgtagttgataaagaggaaaaaacaatcatttgtagaccttagaagtacccccagcacttcgggargccgaggccagcagctcatttgaggtcaggmtttygagagcctgaccaacatggtaaaaccccgtctctactaaaaatacaaaaattagccaggcatggtggcaggtgcctttaatcccagctacgtgggaggctgaggcaggagaatggcttgaacccgggaggtggaggttgcagtgagctgagatcgcgccactgcactccagcctggrtgacatagtcctactctttctcaaaaaacaacaacagcaaaaaaattaaaaattaaaaagaattggttgccaatttttaagaagtctggtaataacataattattaagaagcaggtagaactaattagcttgggtgtgttaggtttaattgcttgccttcttctctggctcaaagaaaaacattgcatcttgtatgcttaagaattttaacagctgtttttccctctactgaaccagtaagaagtaaatgcagcattaaaattcctaggttgatttcctgccttactcagctggcagagaaatgaatttgatttttcttctctcagcaaaatgagaggcataactcttttagtgtgggtagggttgtgaggcaggccgctccccagaaagttggcttttttgccaaggtacttagaagtccctggtctctagagccttaagaggaattcagagtcatgaraatactacccyattcttgaggttgatgacctgtatgtcatttaattcagcgcgctcagaaaaagttctgacttctttttatttatttatttatttattttgagackgagtctcgctctgtcacccatgctggagtgtagcggtgtgatctcagctcactgcaagatccgcctcccaggttcatgccattctcctgcctcagcctcctgagaaaagttcctacttcttaacagagactccaagattgactatcttaatttgttttgattatttacaaattsactttgacatatttcttgtctacctgattgtattatggacaattttaaacatatacaaaattataatataatagccactcatgttctgatcactcaacttcagaaaatcaggaacttatgcctaattgtgtttcttctagactcctacccccaatacatactgtattattttgaagcggatcttaaacagtatctataagtatttattcatccataagcatttcagtatttgtctctaaaagataaggctctctttttaaaatcattatcrcacctaagaaaaagttaataattccataatatcaacatatagtcatatgtttagattgccagttgtttcacaaatgttatgtgtgtgtatacttttcacagtttatttttgactcaggatccaaataaaaccacacaattgtgtgcagtagtttaatacattctttaatatgaaagttttaatcgtgaatatttttaaagtatagaaattatgtattaggcatgcaattaacaaatgtttccattttgccatatttatttcagatcttygcctttttgcttttttagagaaataaaatgttacagatattgctaaaggcccttacccatatcttttcctttgtttttcctacttagggttagcaaatatcttaaagttggtggatatgatttccacagtatgtgtctgtgttaccgctacatttttataatgctacatatttatatctaaaaacaaaatatcataattttttgtttttaacgcttatatagctatttaaatatatatgtactttctgcaacttggtttttttcatattcatacatgcgacacaaattgctcattttaaactgctatatattatttcactttaatgaaaaaattttagtatatttattactaaggagcatttacgggatcttaccaattttttcctattagaagtgragagcagtaaacatctttttatgcacatctccttagtcacatgaatgagagtttatttcaagtataacacctagaagtggtaaggatgtcttcactgttgccagcgatgattgattttgctccaaagttgttgtacaatataactatcagcagcaagatatgagaactccagttcccccagatcttacccagctcatagcattgttaggcttctaaaatttgcccatatgctgggcatgaaatggtaacttgttctttcatacttttctgattaccaatgagatttaatatcatttcatttttattggctgtttaggttcctccttctgtgaatttcctgttcataaaagttttttctgactcacagcagattttggagtytcaaatgtgttcactcttaattatatagacaagttaattcttttggratagctttaatakattttgtactttgagtggttttcagagaaatcatgtttacaatgacacgtgaacactttaagattcgaaaaggacattcgtgagaactaagctctttctaggtggagaaaactcaactgcaagtgcagaaactactcaaaatgtgattgactatgctgttccatcctactgagactaaccatctgccttgttttttatttgcataccttctcccttactccttgctatgttttcctccaaagctcctatgcctctctcaacttatcagtgttattttacacatactcaatatagtcaacatctatccgcttcattttctttcctggaagttttgcctttagggtcctctgtacttctgttccaatatggacttgttgctctccaggcctgctctgcgtggtcacccagggccatcccttctctctcctgtgttgaaacctctgtgccctcagtctcatgcttcccctttatagtattttcctttatttggttggacatatctccaggccctccctaagaaaaagtctgattaaaggaaattttttccagattagctgaaatgtccttctcattttatttttgctactctgacacttgttttttaaataatttgtctgggcttagaattctagaatacaaaactattttcctccagcctgttgccaagggtttgactccactttccagggttgctattgagaagtctgatgcctttccgattctgggttctttgtttgtaacctgttcttactttctggataattttagaattgtcttttttgtccccttatctgaattttatcacatgtttcagtgaggtctttcgttaaagtcatttttactggttatttattagactctttcactttagaggtatatttccctcagttctgggagatattctattttttaaaaaaataattgcttctcttcagttttttcttactgtaactgttgctggttggaaattggaccttttatatcctctga

SEQ ID NO: 9935 - DNA, 12270 bp, Homo sapiens
tttgtttctctctgaatttacttactcagacttcgctgactcctcatcccacctctacactatttcagtcccccttgctaagcattccttatcttttcttactactcaccacccttgtaactatttattttaatgttttattccctccaaactttaatatacatgaagatggaaaccttgcccatcttgctgacccctgtacatctatcatctagcataatgcccggttcaaaacagtaatcctatttttttcagcgaggggaggaaaaagagaagaaggagagagaaaatgtccacatgaagatgggagagacaaagacattaagagaggaagaagacagctatggccggctgcccaatgccccttcacccttgactcttccaactctgagttgcaccaagaatgaagagcctttgttcagttattgtcctgggatagagacaaagctaagaaagcaagccaagaggaaggaggaatatttctctacagggcagtacatgtgggattaaggcatgtgagctaagaggaggatgaaagtcacagtgttgtcagttataaatgatgtcaaaatagtctccaaaggactacatacatacatggtggcattatgaagacgattgttatttgacctaatcaaaatgtctgtggatctgaaaccacrtgaaagaccaacttaagcatcatctatggtcaaagatatgaagccctcaagtccagataaacatgaaggccatggctaatgtctttgaaatatccaagctgggcacagaggctcatgcctgtaatcttagcactcatcactttgggtggccaaggtgggcggattgcttgagcccaggagttcgagaccagcctgggtaacatggtaaaacctggtctcctcaaaacaacaacaacaaaaatttagcagggtgtggtgggtagtggcacacacttgtagtcccagctactcaggaggttgaggtgggaggatcacctgagcccagaagttgaggctgcagtgagctaggattgtgccattgtactctagccagggcaacagaatgagacaagaaagaaagagagararagagasagagaaaragagaaagggagaaagggagagagagagagararagagaatgagagagagagagagagagagagagagagagagagagaaagaccgaccgaccaccacaagagcaagtaagttcaggttaaattaagaaaaatgttggtggtaacaaayggcctgtcagatcattcatttccctgtttctttacaaatcccttgcattgttttttcagcacaagttcttacccagctatcctctaaaacaaatctttgaaggaatagaaggaaacacgttatcactcacagttcaatggtttcctggaatgttctgtgcacctctgtttgtgtgtgtattttttcttttctttttcctcttctttttttttaaactctaaagctggtcttactagtctgacacaactttgttgacctgagaaaatctgtgtctgtctgctttgtctcatcttgtccatccccttcccaaatttccattttggtatgtgttccctggcagctcttttttaaatgcatctttttgtctgtccctcygcatgtctcagacatacaacaaaaccaggaaaagaatgaacttccaggtctctgaacacagttttggcctttatttgataatatttctaccaacttatttgccacaaaacacagaaagaaaagtcccgctgtactcgttgtatggatttagagtgtgtgatgggctgggagcggtggctcacacctgtaatcccagcactttgggaggccgaggtgggcggatcacctgaggacaggaattcgataccagcctggccaacgtggcgaaaccccatctctactaaaaaatacaaaaaatagcttggtgtggtggcacgtgcctgtagtcccagctcctcgggaggctaaggcaggggaatcacttgaacctgggaggcaggggttgcagtgagccaagatcgcaccactgcactccagcctgggttgacagagcgagattctgtctcaaaaaaaaataaaaaagatagaatgtatgactgatagagtatctataattatcctacaaaacttaaatactcctcccaaaccttttcaatggacacaaaaattattttcataataaaaatgttagaggcatctcgtaacatgaaatagagacacaaccccactcaactggataaagttagtcagaaacaatactggtcttagaaggaaacagcgcctcacacctaaaaagcaaaatgcttagtggttaatctcccagaacgcatatgggagacagataatatacctttggctgcaaaacaaggcattgagaggttaaaatgtccttggagtcaagatgagacagagatggcaggcactcaagaacccagtgttccttctgtgagacactaaagacatcattcatgccgttctgtcctggggacgaaacccaggcagatgataacacaacagcatggtgttgcaagagtttcctgcaagagctaaacacaagggaatgacccaagcctttatttccaagccttcccccagcccccatgaaacgacccagaattttgcacattgtcaattctaagccacctccatgcagacgcttcccttagctaccaacaaagagtagcagtaatcattattaaggaagtacaactggaaagtttatgcatagttgctaatcttccgtgagtatttaaatacacagagaaatgcgcatgaagccctgcaggcaatccacactctctggtatcagcccaagtctggaacagaaaagcaggaaaactggaatgaacaacctcagagacagcataaagtggttgcatgagacacacatagaagtcttcctctgagggatatttttatacgtgagtggactttggcccccatccctaatactgaagtgacttacaatacttttctcttttttttttttttttgagacagggtcttgctgttacccagactggagtgcagtggtgcgatactggctcactgyagcctmcacctcccagattcacagaatcctcccacctcagcctcccaagtagctggcattacaggtatgagccaccattgtgcccagctaatttttttgtatatttagcagagatgaggtttcgccatgttggccaggtggacttacagtacttttataaggcattttatcttgaaagaaacctcagatggaactcccaatttacctagcaccttaaattgagactcccacaaatattgactctttttttttttttttttctttgagacggagtctcgctgtcacccaggctggagtgcagttgtgtgatctgggctcactgcaagctccgcctcctgggttcacgccattctcctgcttcagcctccygaaaagctgggattacagttgcccgccacctcgcccggctaattttttgtatttttagtagacacggagtttcaccgtattagccaggatggtctctatctcctgaccttgtgatccacccacctcggcctcccaaagtgctgggattacaggtgtgagccaccacgcccggccaatattgactcttaaagacagacaatcatcaagcctctaaaacagcagccacctctctacttaattggtaacacatgccaatgtttgattgctcagactcctaggacttgatcagccactatttcaccttgaagtccttgtgcggttctctgtggacatgtggatgacatctgaatgcaacccgtcgtagccttccagacctcaaataaatcccctttagctttctcttccataacaacccaattcctttattcctttttttgtttttgttggcttttcctccctgaatccttgggaataattgagctgtgatatggatctgatacattacaatgattcctgcaggtcaaactttcttttcatatacacataagcattgagaagggttttctgtgaaatcgagtccttgtatgtaaaatactgattctgaaaggccaaaacattctgtctactgtgtcttggcttagttgctgtggagagctcaggtatctaaatttagatttttcccatggcttagctcaggcaaatgtccttcccatgcaaaatagatggtggcaggacctacaactcttcccagtcatcagtgaccctgcacctatcctcagagtcctggttacggtagcccaccccctagtcactcaccctcttttttccccgacaagaggatcacccacatgcccccatggagggttccactgtctaaaccatcaaagactgggatagaagcagtcaccaagtcccaaatacagaattagaactcaggacctatttccaatctaaacaatgaaaaaatcagagtacaagaggtcagctcagcaccagattaaatgcttttttttttttttttgtctgagacagagtcttgctctaccacccagtctggagtgcagtggtgcaatctcggctcactgtagcctctgcctcccaggttcaaggattctcctgcctcagcctcccaagtagctgagattacagacgcccaccactaggtccagctaatttttgtatttttgtagaaaaggggtttcaccatgttggccaggctggtctcaaacgcctgacctcaagtaatccacctgcctcagcctcccagagtgctgtaattagagtcatgagccaccacacctggcctaaatgcactcctataagacaatgtggaaggtaggggccaaattccacacaaccagcttagaagacaaacttttacagcaaagagccatcatttggagaaggacatatgtataatggcaaagaggtattaatacgtgaagtacctgtgacattgaggatcgttacctagaattgacattcagtatttacttcacatagctctgtaactgggtctcttgtaaacaggcattttgtcctcccccttccaatactgtgaacccattattatgtcacctttcctcatgacagtcctataaactaggtaaagaacaaacgtctctattcacagacagaacaggggaaacaagataaaaaatacaactttccagtatttaacaaattctgtcaagtctagacaaaaggtatgatgtctaaatgaagctgttagtgggctatgttgaatctcaaaattatctttctccttttttttttaagagatgatctcattctgttgcccaggctggagkgcagtggctcaatcatagctcactgcagcctcgaactcctgggctcaagtgatcctcccgcctcagcttcccaaggagctgggatgtgccagcatacttggcttttttttttttttttttttgtagagatgaggtctcacaaagttgcccaggatcgtctcgagcttctggactcaattgatccttctgactcagcctcccaaagtgctaggattacaggcatgagccaccatgcctggcctcaaaattgtctttttaaatatgtctgtgcttttcatagtgtaactactatacaactgaaatgtcgattatggcacaattgatcataactgactcacatactttgtgttttgtttttcatggtgtctctcctagcccagaagcttcctaaaccacttttccagaggcttttttaggaacacacattaaaacatgcttcctgaagcagagccactcattcccgggtccccttcctcatccttcaaagagctctgactctcaactttgttttttgagctagcatggcatgcacacaaaatccaagcttatgactctacaatgagagtgctttgatttaaataatctttccttcctaatttaggccctcccaacgaaaacttaaacctttatgcttctttacagagaaaaacaagcataaggaaagcccctccatttcctacaagagacagatctccaggactgaattttaagccatggggaaattgcaaagggagacacctgagctcttttgagcacttgtgccaaaacacaacagatggaatggtttggcatttcagaatccagttccacagaataaagaagaatctccactctggcagtggggaggaggaaggaagtggaggtttgttggctttactttgccatccatccctttctctatgtggtagagaaggactgaraggagtgatcccacaggacacaggttcccccgtgtctgtcaccttcaagggggctcaggctcccagggggaaggcacaggggaatcacggagttcagttccaggctccaggactttccagaagggacccctgagcaggactcgctttcaccgtcaagtattgctttcttttttagacacaagattttgctctgttgccctggctggactgcagtgatgcaatcatagctcatcgcatctgcaaccaccagggcttaagcaatcctcccaccttagcctctggagtagtggggaccacaagcacataccaccacagccaggtaattttgttgttgtttttgtaaagacagggtctcactatgttgcctaggctggttttgcactcctggccgcaagcaatcctcctgtctcagcctcccaaagcactgaagttacaggtatatgaaccacatctggccagcaccaagtattttgacaaagcacctattagggtaattccaagtaatctctggcaaacatggtttcagttaggcaagactacaagaaaccgcccacatctattttgtaaaaatctgtgctcccctttcctacttgagtagacacgctcacaaacagacacaaaggcagacccctccctctagtttttctaacataccagagccccctgcaaacacctgaggccctcaatgctgattttcrctggaatctcatcacagttgaacagggtagaagcagcttaacctctctccttgtgcctcgctggaaccagtggctcgtcttccacgggctgcccctgatccctgggctttgagggacaaagagcttgctggaaatagtgatcaccctcgtgatgacaccaggtcaacaggcagctgtgggctcattaagatgtaagccggccrggygcggtggctcacgcctgtaatcccagcacttygggaggccyaggcgggcggatcacgaggtcaggagatcgagaccatcctggctaacacggtgaaaccccgtctctactaaaaaatacaaaaaattagccgggcttggtggcgggcgcctgtagtgccagctacttgagagggtgaggcaggagaatggcgtgaacccgggaggtggagcttgcaatgagccgagatcgcgccactgcactccagcctgggtgacagagcgagactccgtctcaaaaaaagaaaaaaaaaaaaaaaagaagtaagcccctgagtgacaggggctgcttttgtgtgctgtctgcccacggttttgctctagtatgaaggcttaggctagtagtaaggcttaggtgcaatagactctactccttatttatgagccctgattctcagggtgtatctgttacacatttgttctctcacagtcacccctcacttcctccaactattagcctcagattttcaaaaccagtgaggatttcaaatatgtcccgctcatgtctgtgtgtgtgtgtctgtgggtctgtgtgtatctatgcgtttgggtttggagaacacagcaaccaagtataatattctcttgtctacaatcactttcccttctccatccagaatctggtatataacacttgtaatatagtcctcatcagagttaggttttttgaggggacagggtctcattctgccacccaggctggaatgcaatgatataatcacggctcacggcagccttgacctcttgggctcaagtgatcctcccacctcagcctcccaagtagctgggattataggtatgcaccactatccctggctaaagagtttttaaaagcgcaaggtacaagtactggtaaatatrtacctgggaggaacccctctctgcttctgtggccatctttgttgcccactgaaggaagagaaaggagttaggaggcaggacctgactcaggtctggccttaccagaaaataaaacactggggcctaggggaagcatcaggatgggtgcccaagtcgctgggactgctacgttatcccgycttgtcactgtccctctgcactttctcaagcagggtcatgcactccaggcaggaatctgttttcaggaagcatcagtcccagttccagatctttggctaagtactggcacgctcctggataagtcacctgagyttcctggcctcagtgtcctcatctgccatttagggaaggctggatacatctttcarcttctgtgttctctgattccctgaggttgactttgatctgagtttgttttgattctcaaatcaagacttggtagacttcactaggtggtaatgcaactaaaaaagggtcctgggatgggatgagggaatcaaggactcattttgatccaggatctaaaagtaaaaaagaaaatgagaaaggggaagggccccacatctcatccgggctccccacagatgtctggtgaacacgtgtgggcctcaggggaatttggagtatggttccaaccctccctccaccccccacgccgttccatcctttctcaggaataagcttggcactttttgccaaacacttctctagtaaatatctttgtttccattcccccaatacaccaaagttttttaaagccattagaaaaccaggtagaaactgaagagcctctctggacagaatattcttcaacagtacgaggggcagaactgaagtctccatgtagaagtcattacactgccttttcccattaggccaccagtaccatggccatgggtttccttacctcactctattcatgctacctttgaaaaaaattgttttcctgaccatcttgtttcatacatttatatgtccccaaatccctttgctctgctcagtccaaaataccttcagtctttccaactccctgggccttctttctctcctgcatataaatggctagcagctgttttcactgacctatgaccttatgatgcgtcccactttgttgttattctctgttgaccagatattccatatcttggccatgcatttctttggcwgctggctcaatatcacctcaacacaaagatatctgaacgaaacactctgggccacaaaatcagcctctaagactgagatagcagtggtatggtcagaaccaaaataaggcaaagcagacagacacacacacacacaaagcaaatcctcctactgctaacagtttctactaaaatgtaaaactaagscttttgaaaaccagtgttggttctgttccttcaggaaaatcacaatttctccttmattckatttctacttcaaatgtggggactgtgctttttttttcccaaggtttctttcaggacatcttaatttaggcaatrggaagccagagacatggaatgaggcatcagatagcaagccttatcacctgcacttactcyagggccagggattttcatgcttgagggtttgctttttattttctatgggctttggcgaagtctcttctctgcttctacagtctcaaaacattttcctcatgggaaagacagttagttaacttctcaagcactaggaagaactgagatctctgctgcctccactccaaggattgccactrtgggctccaagccagatcaacactgtctgtgtgcagagttgtagtcaggcaggaacaagatgggacatgccagacctcatctgcactttgcgaaggtgacacacaccagccccgcaggcaactgtgcctgctttwagaaactcctaagcaaagtactgaggcagaaccagagggagaagtgaggggaaaagcagcttttttttttttttttttttttggtcatctgagcttgagttaatcggcagcactcggctttctaacctttgaggcatttctaaatctgatcccacacactcattctttcagagcccggcaaggtaagatgaactgattacaccatacttagaaacatcctgtagaatcaaagaaaaatgcttcctgcctttgtacagaaaattaagagatttttcaaagtgaagaaaagcaatttaattaccattaaacaaggtttaactgctgtgggcaatcattctctgcttgagaagcataatttcacttgaaagaaaccagattggcccccggccctcttttggcttatcctcagcaagaagcgactgggaacaactgactcttgggtgagctgtccagatagttagaaacatatcacacagcagtttagggaccccagggggggcagggaaaccccagaatcaggccactcctgtaccttgctcctgtctgctgctcggaagggccccccacagcagaaacatgtgatgcctcctttcttctttggcccttctacagaagggcagacatgggtcttcatgtccagatgtggcatggaacatcagccagacctttaatgttctgggagcagtccagtgctgagcccacgggtggcgggacccgcccgctccacaaccagctcgtccattctcccagcaagcaggcctgacgcacccctgacagtcagccgctcaggatttgaagtgtgattcacagctagaaaataccggtttttcattactatgcaaatgccacctgggtggggtttaggtaaatccggatgtggacactaacaatgagggcaagaatgggtctcttttccgtagttctcactgggcccagtgggttccacccagtggcagtctttaaagaaaattacaggccgggtgtcatggctcatgcctgtaatcccagcactctgggaagccgagggaggtggatggcttgaggtcaggagttcgagaccagcctggccaacatggtgaaaccctgtgtctactaaaaaatacaaaaattagctgggcatggtggcgggctcctgtaatcccagctacttgggaggctgaggcaggagaatcacttgaacccaggaggcagaggttgctgtgagccaagattacgtcattgcactccagcctgggtgacagagtaagactccgtctcaaaaaaaaaaaaaaattagagttgaacagagttggacggagacatttatagttccccagtatccaatgggcagttaatgttcacatatagcccaaggttagagacagatctttacctaattcatatcaaaatatatttattgtgtcattcccaccacgtggcaaagcccaaatcaccaactgtctcaacaccagtgtttggtcaaattgtttcatccagaaaggcagtgcagtcatgtgaatgtgcttcatttgtggycatatctgccttaaaagcataccaggttggagcttctagaacaacagaataaagaaaggcagggctgtaacatccaaatgcttaggaaccacccagaggacatgccccccatttcctaatggtatggcctgcagcccccaacccacctaactgttttcaacacatggcctctgaagaatacgtcctgctggataagagtcactgtgagtcagaaacttggattcgagctggctctggcactcacaggctatgagaccaactcatatcccatatcccagcatttctctgaggctgttttctcatctgtaaagtgaggaagttgcattcccatcattttcacaaatgaccccaagttgaacaatgcccggtgttaagggcatcagtgggactcacaacatctccctgtctttgttcagccaatctttgctgggtgcattctgagcaactgacctgagccaggagaggggagaagcttacaagtcagcatctttcaatataattaatggtttctttcttttcaattgagagcagatgaaaaagcaaagattaggtaaatggtcatgtcattgaggtaacccgaactcagggatgcatgacacacrtatcctgtttcagacatgattgcatagaactatatccttttttttgtgatcaagaggaaacattttattttatttttattatttttatattctttttgagacagagtctcactctgtcacccaggctggagtgcagtggcctgatcatggctcactgcagcctcaacctcctgggctcaggtgatcctccygcttcaacctcccgagcagctgggactacaggtgagtaccactatgcctggataattttttcttttcttttcttttttttttttctttggagacagagtcccgctgtgttgcccaggctggattgcagtggcacaatcttggctcacttcaatctctac

SEQ ID NO: 9936 - DNA, 12500 bp, Homo sapiens
acctctgcctcccaggttcaagcgattctcctgcctcagcctcccgagtagctgggactacaggcatgcaccaccacgcccagctaatttttgtatttttagtagagatggggtttcaccatgttggccaggctggtcccaaactcctgacctcaagagatcctcctgcctcagcctcccaaagtgctgggattacaggcttgagccaccgtgcccatctctattttcaattaagcaaagaaaagggccaaggagagggtatgagtagccaaccccaccaaggaaaaaatttgtttctaagtcactggagaacccactgaaagagttctcggggtgggggtattggggggaagtcctataggatgcctgtcaatgacctgtgaaagatctggaacattgtgatgcagcattgtctctggagaaatgggaacaggcctccagagagggaactcccagctactagggaggctgaggcaggagtattgctggagcccaggagttcgaggctgcagtgagctatgattgcaccactgcactacaccctgcatgacagggtgagaccgtgcctctaaaaaacagtaggcggatggttaagatggtaaatattatgttacatatattttaccacaattaaattaattttttaaaactcaaacatagggcgggcacagtggctcacgcctgtaatcccagcactttgggaggctgaggcaggtggattgtctgaggtcaggagtttgagaccagccttggcagcatggtgaaatcctgtctctactaaaaatacaaaaaaaattagcggagcatggaggcgggctcgtgtaatcccagctactcgggaagctgaggcaggagaatcacttgaacctgggaggcagaggttgcagtgagctgagatcgcgccattgcactccagcmtgggcaacagagcaagagtccatctcaaaaataaataaacaaacaaacataataagaaagaaattatttagagtaaaaatggaaaacagttctgtatcatgaccattctcctaagaggcagccacagttagcttcatgaccaaccatccttgcagacttgtttagacatgtttacaaacatatttttgaatagattttcaagactttgtgttccctagataagtaggatcatttgttttctctgtagcttgcttctttttacttcaaaacatatcatggctatctttcatgtcagtataagtaagtcagactcactttttttaaccactgaaaaaaaatcaaaggaaaggctaaataaactgtagtttatcaggacctaagtgtgctgaacattcttgtaaaagtatctcgcaagtgcttgcatttctttggaacagtaacactggatgtgcttatcaaagggcaaaacgatactaaaagcttaaagctttatgtcaccaaattacctttctactaacggcatctgtgaaagggytgatatccccacatcctcaccaacatcaaacattatcagtatttgtaatgtaggtagatgtgataggaaaatggaaattaggtcatcttgttttcgtttgaattctctagtaattagtgagattgagcatcttttccaatgtttttatggccattttgctttcttctgtgaactacctgtttatatatttgccacaaactctattaaattatttatatgtttcatatgatttataggagtactgtgtatatgatggacatcattttttatatttattacaaayttttttaattattcaaatatttcaaatattttttcaatctgtatcctatattttataaatttgtaaccttctttaggatattttttaccattaaaaatgtttaattttaggttgtcaagccagccttatgcatcacaacttttaggcctcttgtcttgcttagaatagacttccccatttaaagattacagaaagtattccctcatgtgtccatctaataatagtcatggtttttctgtttagctgttttataatagctttttgagayataatttacatgccatacatttacctgtttaatatgtacaattcagtggtttttagtatattcagagttgtgcaaccattaaccaccatctaatttcagaacattttcatcacygcagtaagaaactccatacccattagcggtcactccccagttccctcctaccctcccagccctgagtaatcatcagtctgttttctgtctctgtggatttgcctattctggaaacttcctataagtggaattacacaaaaygtggtactttatgaataatttttttcayttagcatagtattttcagaattcattcattcattcctattgtagcatgtatcatattttatgtctttttaatgctaactaatatttccttgtttatgtatactacattcattcatcaaycaatgaacatttggattgttttcactgtttgactattatgaataatactgccatgaatattcatgtatacatttgggattttttctttgacttttttattgtaaaatatacataatgtttatcattttaaccatttttagatgtacaattcagtagcattaaggatagtcacagtgttgtgcaactattaccactatccattttctctctyttttttttttttctgagatagtctctctctgtcacccaggctgtgatcatagctccctgtagcctcaaactcctgggctcaagcaatcctcccacctcagcctcctgagtagctggaacaagtgcatgccaccatgcctggataattttttttttttttttttttttagaaacagtgactcatcatgttgcctagggtggtcttgaattcctggcctcaggcaatcctcctgcctcaacctcccaagtcgctgggactagtgacaagagccacttttttaaaaaaatagagacaagagtcttgctacattgcccaggttgggccactgtccattttcaaaactttcttaccatcccaaaaagaaagtctgtacctattaaacaataattctccattgccttctctcttttgcccctggtaatctctattctactttctgtctttatgaatttgcctattctagatagtttatataagtgaagtcatccagtatttgtttttttgtatttggcttatttcacttagcatagcatcttcaagcttcattcatattgtatcaagtatcagaatttaattcctttttttttttttttcgagacagtctcactcttgttgcccaggctagagtgcagtgctgcaatcttggctcactgaaacctctgcctcccaggttcaagtgattctcccacctcaccctcccccaagtagctgggattacatgcacctgccaccatgcctggctaatttttgtatttttagtagagacggggtttcaccatgttggccaggcgtgtctcaaactcctgacctcaagtgatctgcccacctctgcctcccaaagtgctgggattacaggtgtgagccactgtgcccagccagaatttcattcctttttaaggctgaatagcrttctattgtatgtggacagcacattttatttatccattctgctgtttctaccttttggctattatgaatattgctgctgtaaacattgttgtacaagtatgtgtttggatgccactttcagtttgtttgggtgtacagctaggagtaggattgatggattatattctatgtttaactttttaaagaactgccaaacttttctacagaggctgcatcattttacacctagcagtgcacaagggctccaatttctccacagcctcaccaacactggttattacctgtcttttagataagagccattctagtaggtgtgaagtagtatcttattgtggttttatatgtttaaattatttaatccatctgtaatttatatttttggatagtgtaaagttattttttgtttcaatttgtgttccaagtggctaggcattttcaacactgtttatagtgttgaattcttccttcccctgctggtgtaaaatgtcatttttatattttaatataaaattaatattttatattaaatttatatacatatataagtctgtttctagataaggctttattgatactttatcaatcattacaccagtaccataccattttaattactgcaactttataataggttttaatatctgggaggagaagtgctttactcmacattgttctttttcaatttcttggcaatatttgaacattatgtcttccaccagcctcaacttgagaatcagcttgtataaagtttcatttaaaaaatcctatcggattctgcttgggattgcactgggcttgcagatcagcatggggatcccttctattacactgtttactwattacactgtttatcatataaaccatttttactatctattactaccaatatgtagtaataaaagagagagraaataatggaatcaaatttgggttgtgaagaagcagcagcagccctrgaagtaaaatgggccagagggccaggcgcagtggctcacgcctgtaattccagcactttgtggggctgagatgggtaggtcgtttgagcacaggagttygagaccagcctgggcaacatggcgaaaccatctctacaaaaaaacacaaacattagccaggtgtggtggcacatgcctgtagtcccagctacttgggaggctggggcacaagaattgcatgaacccaggaggcggacgttgcagtgagccaagattgcactactgtactccagcctaggcgacagagtgagaccctgtctcaaaaaaataaaaaattaaaaaaaaaaaaactttaaaaaaaaagtgctgagtatatggcacaatagaagtattcctttcacttacctgagctgaagtttgctgcatctgattaacagagaatggcctcagttgtttcagaatctttgtattgygggatataaatatacctcattacacacacacctctgtttttgtctctagtatgatgctgtccgaataaaccaactctatgagcaagccaggtgggccattctcttagaagaaattgattgcacagaggaagaaatgttgatctttgcagctctacaggtatgggaacttcagtaccttttctctggaaggagacaaaccaagtttgttctgcttgaagtttcatatgcttcatactggtttttttttgttctttgaagaaatatctgaaaataaggagagcaattgttttctgtattttttattttgctttcttcttcagaccagaacaaatttttaatttaaaatgctcctcataatccacacacgctcacatcctctgtaagacactagtcttgcaattattatctcttccctactgtkagcacaatcagtgatgagaaagagccagttgtaacatgactaaccatgaacctcagaacgattcaggttaaaatgtcattttccccacacgggaaggagacctctgtttaggagatgttcagtattccaagggaatagtcctcaaagaaaaaaatggctaatggattcatttatatttatracatttctgtttataacatttctaaaacgtctgttttcattttagtaccacattagcaaactgtcgttgtctgctgaaacacaggattttgcaggcgagtccgaggttgatgaaatagaagcggcgctttctaatttggaagtaaccctagaaggtggaaaagcrgacagccttttggtatgaactttttctgatcacccagaactgtggctttcttctgattgmcaagtataaatgaacttttctttattagaagagaatatttcatctgattttgaaaaaaaaaaaaaaaaaaagatgctcttcacctaacaagcttcaacctagtgaactaacttttcatgggttagctccacaaggkactatattttcatctctactaatgacaatacttttgtgttatatttcttcctagaggtaagttggcatggtgtgaaggagccactgctgagggctccacttcactagcatggaatgtggacttggtccctaaacttaagtctagaaaataccaccctgtctattacatggagcagctgtgagaatagaataaagaaaattgtttccttttttcttttttctgagacaakcagtagtgcaatcaaggctcactgcagcctcagcctcctgggctcaagcagtcctcccatctcagcctccrgagtagctgggactacagacacacactactgtgcctggctaatttttgtattttttgtagagacaaggtttgccatattccccaggctggtctctaactccagggctcaagygactctcccacctcagcatcccaaagtgttgmgattacaggcatgagccactgtgaccggccaagaaaattctttaccgataaaaaccttatttctatttacttggtcatccatttcaaccagacaagcttgaccaaagttgtggcctttttcyggaacattgcaaaaagtttctgaatgcttttgacttcaggagacaaacgaaaaccctccaataaaacaaagaaaactgttttgtcatctctttctccttatccatgaaaggtgaatgtcagctttataactgaaatgcccctcctgtttaattcactcatgaggtgccacacttttgtttaacttcggccatgggaataattattaatcacattgaatcagagaggtgggtccaccataattagatgtaagcagtaatcatggattagaattagttactatattcttctgcattcaatgtatgttctcttatcattaaatgtcctaaaataagaaactggtctcattcaggagcaaatacttcgtgcaaactaaacgccaagattctgtagagatgcagggccctgtgtcacgtttatagaagacataggccccatgaacttggagttctctgttgtctactttctccgctgaataaatacaacaggaaagtaattctttttagaataaataaaaagttatgtcctccctcccttaatagttttacgtgatgctaacaataggcttttcagtttgaaaacaggcaccagcctacattacagaatgaactttgaacaaggttcactttgaaagtttaatcagtgacctaggtgtagcaggagttacccactctwatataaaaattataaaatcttttgtttgcatataaaagtagtcatttctaattcagatttttaacttgaatgatagttatagggagtacttgatccactttttcatttttttcatctcgtttttcatttttgtaatctacgacacaaacagaaaagtgaaaaatacacatatgtacagcttaacaaattagtattcaattgtcacccaagtcaccacygaaatcaagaaacagaactttgccagccacctaggggacctcaacagggcccccattctcctcccaatcctccttactcccacacccagttaactatcagaaatgtagcgagtgtaaactgaagaactgagtttttcattttatttaatttgaattaattcaaatttaaataggcacatatagcaagggactgccatattagacagtgcaggttgagtatcagcatcacttatgaagttcctgcttttgaaactttatttgttttttcttaggaggacattactgatatccctaaacttgcagataatctcaaattatttaggtaagtaaacttttatggggaaaaggagttactcataacaaagtcttgaagataaagagtgcaggagtttaaattrtatatccctgaggcaggttcatggttcaaaggtaaaatgtgcgctttgccatsagacaaacaatgggttgagtcgtagctctaccacacacaccagctaggtgaccttgagcaatatattatgtctctgagcctccattttccaatctataaaatgggaatatacctccccttgggcttgttgggaggattcaatgaaataatgcatatgaagcactgagcgtggtacctggttcatagtacatgctcagtgaatggcagcgtgaaccctcagtgaatggctgggttcacatcagcaataataaacacatccgccatactagagcttctagyaggttccatctgggaggctcagtacgctgataccatttgaaggcttataatttaaaagccatttctctctagaactttgatcctgggctyacagagagtagtcaccttagtttatctacctgtttaagtacttctgataaactcctccatcacctcaggttgacctgaaactgctaaaaaggcagagaaggagttttatttttycatggaaataatgaactgccacctctgcaatggtgccagcgtatgttargttgaaagaaacaaggctctttgaagtcctgtcagttccttatttcactttrtggtttgttgacttttcttaaccaacgggcacttcactggggcagttggctttaaaggaaacacaagttgcttttgataacacatgatgcaaagaaagaattagaaagaatgagcaatgaagccggtataaatgacaaacaagtgtccaaaggtaacaatatttgtcactgggtttctacaggtatggttttggggatttcttactgtgattgtaggatgtggtcgcaaacaatagggtcattcttttttcytcttcttcttctttttttgagacagagtctcactctattacccaggctagagtgcaatggtgtgatctcagctcactgcaacctccayctcctgggttgaagcaattctcccaccttagcctcccgagtagctgggattacaggtgcccatcatcacgcctggctacattttgtatttttgtagagacaggatttcaccatgttggccaggctggttttgaactcctgacctcaggtgatccgcctgccttggcctcccaaagtgctgggattacaggcgtgagccaccacgcccggtcagggtcattcatttaacttccctggcataaatggttgtaaccacatttcactcatattgttataatcagagctacaggaaaaaagtaacaatttgaatccacaagtacatcttaataaagtattcataattgttccacaaaaaaatgagttgccacattctctgtagagggcaaatcaagcccctcatgaaccaaatggtgactgtagccttcctatagatgtttctgatgaagaaagtgatgctggagttgaatccatatcacttatgctaccctgaactgtcacaggctttcggtgtgacttatactctcaaaattgccctcatatttggccagtggatactatctaargtctcaagatgttgcattgaatatataatatagttcatggaaagaagaaacaaatgaaggaaggagagagagctcgtaggagggaagaggggagggagattcgagagtggaactctattcctggtaaggtgggacctctaataggcccttcatttccctagaccttctttcctcatcagtactaagagcattgaactaatcctttgatttttaagttctttctattacagtgaagctctttttttatttaaaaaaatctattaaatttatcatataaatagtggacttcagtttctagcaacagggtatcagctctaatgcaaactcttatcttgctatgaatacatatgcatgctagataaaataaaagaattataaatacagaattaatcatgaagtgaaacagaaatgccaacttacaggaaatgaggcaggaatctagttctacaaacgcagcatcagccacacagaggaatttagggaatagagacaggttgtcatggtttgaggctaggattttaattcccatgtagggatagaagatgaacctttcagtcctgtgtgaagcaggaagtgagaactgaagcgcctscctaaaggtggaaatgagcaaaggctgcccttctgttgaatgaaaaatagaaaaactacccattagccaaagaaagcagkaaggaagttcatccttgcatggggttctgtgtggaaatgaaaagtatctcttgagaaatcagagccaaggctgtgtcacacacagatgtagatataattttttttttttgagacaaagtctcgttctgtcacccaagatggagtgcagtgacgtgatcacagctcactgcagcctctacctcacaggctccagcggtcctcccacctcaaccctctgagtagctgggactacaggcatgtgccaccatgcctggttaatttttgtattttttgtagagacagagtttcaccatgttgcccaagctggtctcaaactcctggactcaagatcttccctttttggcctcccaaagtcctgggattccaggcatgagccaccatgcccagcctagatacaaatttaaatgtcttatgtgtttatgtaataagggaatcctgaaaacataaaatagaaactgatccgggatgacaaaacctatgaagccctaacatatgtagttgcaaaaatacctagaggggaatatccacaaccaactacaaaaattagccaggtggtagtggcacgcgcctgtaatcccagctactggggaggctgaggcaggagaatcgcttgagcctgggaagcagaggttgcaatgagccgagattgcaccactgcactccacccagtctgggcaacagagtgaaaccctgtctcaaaaaaaaaaaaaaaaattctaacgagagcctggagagcctgtctcgctcgttcttatgcasgtcattcaccacccagcatcgcctccgctgccccttcccctaccctgccccaggctttgctgcatagagcagcagcaatgattagctttgttaatgtgtcagaagcatcctgaaagatgacaaaacttccaggcaggagataggaggaggaacttgagatctcttgatactcttaaggtccaggtagaacagagaagtagggcctcattcttaatcctaaagagaaatatttagaggctgaagattaaaccaagacyttattacctgtatcttttggttaaaggtgctgtctttattattctgaaaatactattcattttggagaatctgagtattaaacaacaatatgttccttagaactgcctgggcatggaggctcatgcctgtaatcccagcactttgggaggccaaggtgggcggatcacttgagctctcaggagttcaagaccagtctagccaacatgatgaaaccccagctctactaaaaatacaaaaattagccggccgtggtggcacrtgcctgtaatcccagctacccgggaggctggggcatgaggaccgcttgaacccaagagacagaggctgcagtgagmcaagattgcgccactgcactccagcctgggtgacagagcaagacttcatctcaaaaaacaaaacaaaaaaaagaactgtcttaactacagccctcaacatgataaataccarttttttggtttttgtttgtttgtttgagacgaagtcttgctctgtcacccaagctggagtgcggtggcgtgatctcggctcactgcagcctccgcctcctgaattcaagcaatccttgtgcctcagcctccgggtagctgggactacaggtgcacgccaccacggccagctaatttttgtatttttagtagagccagggtttcaccatgttggccagactggtctcaaactcctgagctcaagtgatcagcctgcctcggcctcccaaagtgctgggattacagacacgagccaccgcacccagcaaataaatactattttaatacagtgttttttcttaatcctggaaatgttaagttcatataatgtttttcaaatttattttataaattatatgtaatattcttctgtaatacactgagggggttttgctgggtttttaaattttatttatttattttttagaaacaagtccttactctgtcacccagggtgatcatagctcactgcagcctcaacctcccaggcttaaccaatcctcccacatagctgggactatagacacaccaccacgcctggctaatttttctttttttgtagagatgtgatcttcctgtgttgcccaggctggtcctaaactcctggcctcaggcaattctctcacttcagctccccaaagtgctgagatgatggcactggcacccagcatatactttttttttttaatgtgcaacttctttcctatctttgtgttaaggataacatatgtttagctaaggaaagactagtactgacatgtttaaaaaaattgtcccagctgggcgtggtggctcatgcctgtaatcccagcactttgggaggccgaggcgggcagatcacaaggtcaggagatcgagaccatcctggccaacatagtgaaaccccatctctactaaaaatacaaaaattagccrggcatggtggcacatgcctgtaatcccagctactcaggaggcggaggcaggagaaccccttgaaccagggagttggaggttgcagtgagccgagatcgtgccacagcactctagcctggc

SEQ ID NO: 9937 - DNA, 104631 bp, Homo sapiens
tagcttctccgaatcctacagtttgcaccatattcacactcttcaaaataccattcaaggctatgccatgttttgggaaagattacagtgccctctgcagcttcagcataaataacacagttggggaaaaaaacagtaattgaaacatcaacataaaagtgtgtgcaattaatatgcctcagaaattcacttttcttcctaaactgaatgaaaacacttacataaagatcatatttaagcacagttcactacagcatgtatgacaggtacctttttgtgtaaaagatatgcaatatagaaaaagatgtatatgtgtgcctatctgtaaattattttgatgagaacactttaggaaatggcacagttgcctctggggaggtgaaatgacaccttaggagtcaatgtaggaagatttgtttttcactgtgaatcttctgttcatttgaatcttttgaccatatgcaggtattaatctttcaggtaaaaaaaaaaattaacaaaaaatttcgattgcctatcagagaaatggtaggcatccaaatgttaagcctctcttgccagaagttccataactttagataggttatttaatctttatgctttcccttaccactcaatttctttttatttttatattttttaacttttttttagtcagatttacttgatccatctcttttttattagaacatgtttatttcttttttctctttttgaaatattttctagatttagggggtacatctgtgcatgtcatgcagttgtgttacatggatatattgcgtagtgatgaaatttgggtttttagtgttcccataacccaaatagtgaacattgtaccaaatggttagtattgcatccctcagtcccctcacactctcccaccttttggagttgccagtgtctattattcactctatatgtctgatatggtttggctgtgtccccaccacatctcatcttgaattttaatccccataatccccatgtgtcatggtaaggacctgaagtgactggatcatggggatggtttctctcatgctgttctctgttactgagtgagttctcaagagatctgatggttttataagtgtctggcatttcccctgctcccactcactctcctgcctccttgtggaaaaggtgcctgcttctgcttcgccttccaccatgattgtgttttctgaaggctccctagccatgcagaactgtgaatcaattaaacctctctataaatcacccagtctcgggtatttctttatagcaccatgagaacagactattacaatgttcatgtgtactcattgattaactctcacttataagtgacaacatgcagtttttgacttcctgtttctgagtcatttcacttgggacaatggcctccagttccatgcatgttggttattatccttttattttatttattgatttttaatttatttatttcatgaataagttctttagtggttatttctgagattttggtgcagccatcaaccaagcagtgtacactgtacccaatgtgtagactttcatctctcaccccctcccaccctttcccccaagtccccaaagttcattgtatcattcttatgcctttgagtcctcatagcttagctctcacttataagtgagaacatatgacgtttggttttccatttctgagttacttcacttagaataatggtctccaattccatccaggttgctgtgaatcccattatttcattccttttcatggctgagtagtattccatagtatgtatacaccacaatactctggattatcttattagaagcagccctgcctcttcacaatttagtcatgaaaaaggwtaatctctatgagctcagagctagataaccaaaacaaatctgaatgagtagactccattttacacactgatttatgtcaactaatttctttaacttgagagaaactaatawtcatgtggttaaaatattgttatgaaataatataaaatgaaaggtgaatctgttttccaactcagtcctttccctccaaagaaagctaggtgtattctgtgtatctttccagaaattatgccaataagtatttgagtaatacttaagtaataagtaatttttaattgaacgtttactctatgccaagcatctttgtacacacaggggacaaggagtaaacaaaaactatgtcactctagtgggaggagacatatatacataaattaatactcatacacatattatgtctaaaagttacaaataatcttgtaactaatttaagaagaagatttaagaaatagaagtaacatacaatggagttgstgttttatagagagagagctatgagagggtgacatttgagtaaacactggaatcaatgggaaggagggaaacatgtatatctggagtgaaagccttccatccagacacagcagccagtgcaaaggtctcaagagggggtttgtctgggattcaggaaactgcccatggcccgtgtggctggagtggggagagcaaaggggagggacagtggtaggaggtaaggccagagcacaaacaaagggcaagatcatgtgaggcttgggagacaactgaaagacgttgggttttgttctgagagaaatcagagggtgggggtgaaggtgtggcactgggggtcttgagagaggagtgacatgatctgacacattttcacagaatcattcaaattgctgtgttgagaacagactggcagtgggggtgggcaagggtggaaacactgagattagctcagtgccagatgatgatatttcggaccaggtagctgaagcgtaagttgtgacaaacttttcatagtctgaaattttctcaaggtggccctgacagaattttcaggtgagaagctgagcagcatggctccagagtctgcacctggataactggaaggatggacttgccaacaactgagaagcagaaaactgctgattgagcagattttgaggggaagagcatgaatttggtattagacattttaagtttgccatatatattagacactcaatatgggaggaattaaggcatatgtttgctgttaagactggttttctagagcaggagaaaatgacaagcaggacagagagtgagaaggagaggactgtatccagtgcacacatggagagtttccagagtggaaaacacacagatgtttataaagttacagtctggaaggcgagtatgcaagcacaaatgcacatagtgagtagccagattgacaggaattagggcaaagtcttttctggaagcttctattttcatagtgaaataaagagtgtcttgtttgaaggaattaatgaatccctttttacccccttgcttaaaaccctccataggcttcccctcacccttgagaataagatccaaacattttatcacagcccacaaggccccatgggkcctggacctggacctgcctacctctctccattgccacaaatgcttcagtcacagggccctcccctttgtgtctcagacagatgacaaactcgatcaagccttggcttctttgacttacttgttcctctgtctggtacgccctttctcttgtcctcccaagtctggctcactcttctcacataggtttcacttcaaaggtcacctcctcaggtctttcttgaacatctcatctaaaataaaccttcctcccaacacattattttactatatatttgttatgtattgtctgctgcttcccacaagaatgtgtttcataagaaactagcactcttaacccaccttatcactctctctytgtctcctgatcctattaatcattacattatgtgtgtgtgtgtgtgtgtgtgtgtgtgtgtgtgtgtgtrkrkagagagagagagagagagactgagatttttctgtattacccatctcctctaagagaatagcaactctacaacaacaggtactgtgtctattctatttactgttgtgcttcctgaccttagaaccgtatctggcacataayagttgttcaatgaatatttcttgatgaacaatttggaaagtcagatgaaaaaattggatagagagcatataatagagagcctggcatatagtaaatcttcaataaatgtcacctgctgtgatgataaaaaaagacagtcatagcaacgatcataagcacaactatgaaaggctgatgacttctctttactcgtgaaccaatctcctcttgtctcattagaaattttgattaatcacatctcccttcttcttcataggttccttgccttcagctgtctcatatttgcccacaattaaaacaaaaacaacagttaaaatataccttccttaactctgtattttcttactagatacaaccaagtatctttacagtctagcaataaaaaagagttgtttatactacctcacagctagttaaccaaaacaaatcttgaatgaatagactcatttttctttactgttcttatctmtaaactagtttctttaaattgaaagaaactactttcatctaactcagtctaccatctaactcagtcctcactctgcaaggaaattaggcatattctgtgtatctttccaraaattatgtatgtatatccagacatattctgtgtacataaccgtgcaccttgaatttctcttaataaatgaaacatcttggatagctttctaaagtacacataaaaagctaggccaggcacgatggctcatgcttgtaatcccagcactttgggaggccaaggcaaggaggattgcttgagcctaggagttcaagacctgcctaggcaacactgtgagaccccactccctaccctaatccccccaccaccccgtctctacaaaaaaatttaaaaattatctgggcttgtgatgtgcctgtaatccaagctactcaggaggttaaggtgggaaccccacttgggctgaggccaggagttgagcctgcagtgagctgtgttcagcctactgcactctagcctaggtgacaaagcaagaactcatgtttatttaaaaaaaaaaaaaaaaaaaaaagagagagagagaagaaagggaaaataagcattatttttgggaaaaaatcactgtatttagaatagctttccctcttagttaataaaagtaacaaaccaggccaggagcggtggctcacgcctttaatcccagcacttttggagaccgaggcaagtggatcacctgaggtcaggactttgagaccagccttgccaacatggcgaagccccgtctctactaaaaatacaaaaattacctgggcgtggtggcgggcaccttgtaatcccagctactggggaggctgaggcaggagaatcacttgaatgcaggaggtggaggctgcaatgagcagagataagcaccactgcactccagcctggggtgacagagcgagactccgtttccaaaaaaaagaagaaaaaaaaagtatcaacccattactcaatgagtttttcagtcctcggtatttattttccctaattcaacctctgaggaagccacagctaatggaaacgagttacagaragagagaaacaggagaaaagcctaaactcagattttctaaggcgcacaacaggcttgtcacgtttctggactggacagcgaatttcaactcttgctgttgaaagtttattttaaactgttggtgcagtttctttaaaagacggcaattctgtttgggtagtgaaaaatacatgtatctctacctagtttcgtctacaggttccaaactttttaaggatggggtggaggatgacgttcgctagcttttggcagataatagtattctggtattccaggaccaccaytctctgcccactcctgggagcccctcccttcggccctctcctccgactctctgctgggccctttaaatcccctctcctgtttagcagtggtcacgccgcccgccttgcgtcccccgcgctgctccgcacgtggaatggcccatgacgtcacgaggccacggctcaatcaratgcggcgtttgrgaaattttaaatttaaaggcggggcggcctgtgagccctgaagtgccggccgcggagggtcctggccattttcctgggaccagttcagcctgataggatggcggaggaaggagccgtggccgtctgcgtgcgagtgcggccgctgaacagcaggtaggggggccacaccacggcccggtgcccgctgggcctgcggcgccgccctgagccggaggggcgaggcctacgatgtttccaggagccgctgcttcccggctctgctgtctagtgactcggctgctggccatcgtttcagggtctgtaaagtgacaggggaggatcggagatctagaagatactttccagctgcgagattcacttaaatttaactcagtctcgctgacatacagaccttcccttctgtgctgctctgccttgcggcatctgctcctccctgccccattccccgcctagagaagtcgtatgggaccgtgccttcctggccctcatcacagttagtcattttacacctaactgctgtctccagaccctctgaagacaagggctagtctgtcttgtcacattacattcaatcgtcactcaagatcattctacaaatatttatcaatttttttttagtgactttgtacaacacagacactcccgtcattgcccagtggctcttccattctaatgggacgagacagaaagtaaagttgaaaatgtaggatgttaagtggtgatatgtaggtaataagtgctagggagaaaaagcaggaagaggaataaatgaaatcggtttgcttcactagcttctggccctcgacccgaaatgctaacactttgtgtgtgtgagaaatttttattgaacacggggtttaataaatgcaaataccaagatcaggaatttcctatttttgaggagctcattatctaatgccttaaacggctacataaagaaaccattaggataccttttgacaagtgttatgatgggcaggtagagaatgtttgctagaggagttattagcccatcagagacgaaagcttcccgtggggtgaactggtgtcagaaaagtcttgacgcttttcatgagtgaaataatccctatgttacttaatggaaagggaagtcagagtattccaggcacagagaggttacatctgtcatttggggaagaccttcaggtagagcttaggatgtatctaggaattcagaggaaaatggaagagagaaatgacatgatctaggactcgtgccctgctgaggatttcataagtttccaaaaggttttaagaattttaagcaagacagacataatcagagttgcattttgaatccatccctttgtttaccagtactgggggagarggtgagaatgaaagccttcacaagaaaacacttttgaggcggcagaaggtcactgaagctccatttaagagttgaatcctcaaagatggactttctgtcattctcttatgttactatctttcaaaatattctttagcaggtgaaatcttttcaattattcctcctatgacatgacttttatgactggttaaaatgcggtgtttttattcttttagagaagaatcacttggagaaactgcccaagtttactggamaactgacaataatgtcatttatcaagttgatggaagtaaatccttcaattttggtaagcttataatagcrtcaaaagttaccttgttatccttttsctattaaaagtacaaaaggcttatcaataatattagatttgtcactaaagattagactaagccttctataaactgcttcactggaaacaaaattgtttatccatcatgtatttaagtaaggtaaccaattggcatttaaaacagttataatcacagttatctaatttgcatctaggtagattccagacccccatgtgcaaacactataccttattgcctcttgaaagaacatagaaaagttgacttgtagtgtattttttgtgtgtgaaaatgaactcattttaccttagggaagggtattttcagagaaccaaraagttgaaaaaaatactgtgtcttaaatagttgatcatcctacattctgacagttttacttttgggaataattactaatttggaatgaaaacacagtggactcatttgatttaacttctgtgttgttgttgttgttgttgttgtttagatcgtgtctttcatggtaatgaaactaccaaaaatgtgtatgaagaaatagcagcaccaatcatcgattctgccatacaaggctacaatggtttgtattcactcartgctgcagaaacattttagtcttgggcgtctgtgcaacaagcatgcatagttttacccattataggtttgtttttaatctttgcrtatgtgtgttttgttttttgcaggtacyatatttgcctatggacagactgcttcaggaaaaacatataccatgatgggttcagaagatcatttgggagttatacccagggcaattcatgacattttccaaaaaattaagaaggtaagtaacttaactggatttctagtacgtacaggtaaaactagtaaaaactgggtaccagtcttagtgtatttctcttgtaaagatgaaaggaagtagatttacagttattgtttgattatccatggggaaagaagaaaggcatagcatagattcacttttatctccacaacttactttataaagcttaaagttcttttattctttctcttgaattctgcaacaataatactctcaacaaaaagtaggcattaaggaacaagaaaatgttatcagaatggttagctccacctaaccatttaactatcagtgattataaaggaacagtagaaagtggatgtaggtaaaaaaagaagggaagcagaaagccagaataggcaaccgagttagttggtttcaaattagcatttttattaaaataagaacatcttttgagagggttttattttgagcctagagtttgagcctagagttggtgttctcccagctttatggtacttcacttttcattatttctgtaacgatgcttttatatttttgtgttcattattttgtcaacagtagaaccaaggggtttcttagtttgttttacatacattttacctctttaagcacatgagcatttagcattaggttttcacaatyggatgcttcctggtgtttttatataattttttttcttctagtttcctgatagggaatttctcttacgtgtatcttacatggaaatatacaatgaaaccattacagatttactctgtggcactcaaaaaatgaaacctttaattattcgagaagatgtcaatgtgagtagcagacttaagggagctttaaaattgactgacttattgagattattgttcttgaatgtttacctttaatttctatagtttttaaagtgtctcctatttctatagtatgtgagggtttttttgaagtatttatattcatcttttaaacaatatgaatagttttaaaatactgacagctctaatattttggtttaagtgtaaaaatagcaagttggaagtatcaggttagaatttgttgtgctttggtatgtgaaataaattgtgggtattcatagaattatttgttacattcctacagaattatggttccatttgccacttttaactttcacaaatgaattctataatagtttgcaccttcttttgaaaagcaaacttgtgacttctatttctctaatctttccataattaaacttgtttcagaggaatgtgtatgttgctgatctcacagaagaagttgtatatacatcagaaatggctttgaaatggattacaaagggagaaagtaagactttatgctgtatttctttagaacacttgtaaaaacyatcttttcaatcaagcacgtttggacctcaaatcatacttttttaagttaaaataaaaattattgtgtttctatggattttattatatatgcagctgaaatataactcatttttacagagagcaggcattatggagaaacaaaaatgaatcaaagaagcagtcgttctcataccatctttaggatggtaggtaattctatctatctgttagatctttccaagtaagaatgcactaatttttctacagcttgccttttctatctagattttggaaagcagagagaagggtgaaccttctaattgtgaaggatctgttaaggtatcccatttggtgagtattaatgaaccataataatgtactgtatgggccaaaacaaaatttaatttagttgctggatgtttggtttaataagaactgttaactaaactaaatgtgggaggaaatctacaaattgtctgcttagtcttgtcagtatcatcaaattcctagctaaaatgtcgtaggaaaaattcagagratctttcttcctgttatgtcatggttgccatctcctaaaatttaaatgtcagggctatagggttataggaattgatgttttttctaaccactaatgcagtagaatttttttctatacacatttaacactttagatcatcttagaatttgagggtctttttgtaaaatctcagccaatgtaatttagacttatgtgatcaacaaaaatctaggttggatggttaaaaagtaatcacattactttaggttttacttaagtacaacaataaaatatattttgtattgtaaacgtagtactttagactgtaaatccattgaggagtgatactgcattcatcctggtagccccaacacattatacctattttatgtctaatatagatttgctgaataagcgaatatatgcattatgcaaacattcctatattccacattagtaaaccttcacttccttctttccacactaaattattgctgtttctttcttgctccttttctatcttttaccatattgctttattctgcatttttagggcctaaattctttagcttgatgtgggatatgatttaagattatttgattagaaaacttcagggaaaaaagcaatctataatatgtttattcattttcagattttataaaattagattattaattacttaatattcaatcctaatttcaccttagctattttgctataaaattgtataacttattttagtagactttaatcttgttttaatttaacaataaaaaaccaaaccctaacctctttagttttctcatccaagactgtgatatttcrtataattttaacttttaataatttagctttaatactcttggcatattcagtgatctacttgatgattttcctcatgttacgtgatgctctgtcattygtgttccatctgttccaaccctccagcctacccacttactctaagaatcttcttggaaagaagtctctaaagagtcatctctgtctctttagaggtggctcttttctgattatctcctggccttggtgggatgataatatccagtttctcttagctgtactcctctgttttctaccctggcttctttttccctaccctcctaaaaaaataattaaaaaaaaaaaaacttggaggtattctgtgacgtttcttactcaagttcttgctctcaaatgttctgtcatcatttccatgttgatgactgccaaatattttacctatagtctctgaattctaattcatgtcttcctaaagatggttataattgtgtcccatcattatctcaaactttaatatgtctaaaacgaaactattttcttcctaccatagtgaatattccttatttccagtaaaaccagcattatcctagctgcctaagctggaaacctaagtcaattttgactcatctttttctgcctttctctttgtccacttgtcccatttcttactgatcctacctttaaacatttccatgggtgctacactcatttactttctcatctctcttgaattactatgtcagtctcctggaaccttgtctccatgacccttgtctttgtttcttgaagtcatcataaggatttcgaatatactaaccattgcttttgtatatcacttcctggggcaagatttggccactcttaaccaatctaactttatttccttctgctctacatgaactcctccctcatagattgggcctctgagtatctttgaatatgaatgcttgttctcatctttaaccttcactcatgctgccttcattaccactttgcccttttattatgtatctgtgtcatctgtagtggacactgtgcaagaaaaattagcctccttaactggtaatacatatttacctgcctagtctcaaaaatctccacagagagaaataacgtaaagctttgactttctttcaaatcactcacaatatttactaagttgttattgtcttctgagcatggtgttgggctctgagattaaaaaaacaataaacaagacaccccttcactgcttctcttacaagcagtctcctctgccacctccctaacccaagctggtattatctctcaccgagattcctgccccagctgcctgatggggctgcctgcagctgctcttgccccttcccaatccatcctccacccagtagtcatagtggatccattgtgagagtcattgctgagctttatgcaaggttctctttttttttccagttttacgtttttttatttttatttatttttttattatactttaagttttagggtacatgtgcacaacatgcacgtttgttacatatgtatacatgtgccatgttggtrtrctgcacccattaactcgtcatttacattaggtatatctcctaatgctatccccccctccccccaccccacaacaggccccggtgtgtgatgttccccttcctgtgtccacgtgttctcattgttcagttccaacctatgagtgagaacatgcggtgtttggttttttgtccttgcgatagtttgctgagaatgatggtttccagcttcatccatgtccctacaaaggacatgaactcatcattttttatggctgcatagaatttcatggtgtatatgtgccacattttcttaatccagtctaccattgttggacatttgggttggttccaagtctttgctattgtgaatagtgctacaataaatatacgtgtgcatgtgtctttatagcagcatgattttataatcctttgggtatatacccagtaatgggatggctgggtcaaatggtatttctagttctagatccctgaggaatcaccacactgtcttccacaatggctgaagtagtttacagtcccaccaacagtgtaaaagtgttcctatttctccacatcctctccagcacctgttgttccctgactttttaamgattgccattctaactggtgtgagatggtatctcattgtggttttgatttgcatttctctgatggccagtgatgatgagcattttttcgtgtgtcttttggctgcataaatgtcttcttttgagaagtgtctgttcatatccttcgcccacttgtcgatgtggttgtttgttttttttttttctaaatttgtttgagttctttatatattctggatattagccctttgtcagatgagtagattgcaaaaattttctccctttctataggttgcctgttcactctgatggtagtttcttttgctgtacagaagctctttagtttacttagatcccattttgtcaattttggcttttgttgtcattgcttttggtgttttagacatgaagtccttgcccatgcctatgtcctgaatggtattgcctaggttttcttctagggtttttatggttttaggtctcacatttaagtctttaatccatcttgaattaatttttgtataaggtgtaaggaagggatctggtttcagctttctacatatggctagccagttttcccagcaccatttattaaataggcaatcctttctccatttcttgtttttatcaggtttgtcaaagatcagatagttgtagatatgtggcattatttctgagggctctgttcctttccattggtctatatctctgttttggtactagtaccatgctgttttggttactgtagccttgtagtatagtttgaagtcaggtagcatgatgcctccagctttgctcttttggcttaggattgacttggcaatgcgggctcttttttggttccatatgaaccttaaagtagttttttccagttctgtgaagaaaagtcattgrtagctgatggggatggcaatgaatctataaattaccttgggcagtatggccattttcacgatattgattcttcctacccatgagcatggaatgttcttccatttgtttgtatcctcttttatttccttgagcagtggtttgtagttctccttgaagaggtccttcacatcccttataagttggattcctaggtattttattctctttgaagcaattgtgaatgggaattcactcatgatttgtctctctgtttgtctgttattggtgtataagaatgcttgtgatttttgcacattgattttgtatcctgagactttgctgaagttgcttatcagcctaaggagattttgggctgagacgatggggttttctagatacacaatcatgtcatctgcaaacagggacaatttgacttcctcttttcctaattgaataccctttatttcctcctcctgcctgattgctctggccagaacttccaacactatgttgaataggagtggtgagagagggcatccttgtcttgtgccagtttttaaagggaatgcttcgagtttttgcccattcagtatgatattgcctgtgggtttgtcatagatagctgttattattttgagatacgtcccatcaatacctaacttattgagagtttttagcatgaagtgttgttgaattttgttaaaggccttttctgcatctattgagataatcatgtggtttttgtctttggttctgtttatakgctggattacgtttattgatttttgtatgttaaaccagccttgcatcccagagatgaagcccacttgatcatggtggataagctttttgatgtgctgctggattctgtttgccagtattttattgaggatttttgtatcgatgttcatcaggggtattggtctgaaattctcttttgttgttgtgtctctgccaggctttggtttcaggatgatgctggcctcataaaatgagttagggaggattcccttgttttgtattgattagaatagtttcagaaggaatggtaccagytcctcctagtacctctggtagaattcggctgtgaatccatctggtcctgggcttcttttggttggtaggctgttaattattgcctcaatttcagagcctgttttggtctattcagagattcacttcttcctgatttagtcttgggagggtgtatgtgtccagcaatttatccatttcttctagattttctagtttatttgcatagaggtgtttatagtattctctgatggtagtttgtatttctgtgggatyggtgatgatatccccttyatcattttttattgggtctatttgattcttctctcttttcttctttattagtcttgctagcggtctatcaattttgttggtcttttcaaaaaaccagctcctggattcattgattttttgaagggttttttgtgtctctgtctccttcagttctgctctgatcttagttattgcttgccgtctgctagcttttgaatgtgtttgatcttgcttttctagttcttttaattgtgatgttagggtgtcaattttagatctttcctgctttctcttgtgggcrtttagtgctataagtttccctctacacactgctttaaatgtgtcccagagattctggtatgttgtgtctttgttctcattggtttcaaagaacatctttatttctgccttcattttgttatgtacccagtagtcattcaggagcaggttgttcagtttccatgcagttgagcggttttgagtgagtttcttaatcctgagttctagtttgattgcactgtgrtctgagagacagtttgttatcatttctgttcttttacatttgctgaggagtgctttacttccaactatgtggtcaattttggaataagtgtgatgtgctgagaagaatgtatattctgttgatttggggtggagagttctatagatgtctattaggtctgcttggtgcagagctgagttcaattcctggatatctttgttaactttctgtctcgttgatctgtctaacgttgacagtggggtgttaaagtctcccattattattgtgtgggagtctaagtctctttgtaggtctctgaggacttgctttatgaatctgggtgctcctgtattgggtgcatatatatttaggatagttagctcttcttgttgaattgatccctttaccattatgtaatggccttctttgtctcttttgatctttgttggtttaaagtctgttttatcagagactaggattgcaacccctgcctttttttgttttccatttgcttggtagatcttcctccatccctttattttgagcctatgtgtgtctctgcacatgagatgggtttcctgaatacagcacactgatgggtcttgactatccaatttgccagtctgtgtcttttcattggagcatttagcctatttacatttaaagttaatattgttatgtgtgaatttgatcctgtcattatgatgttagctgattattttgcttgttagttgatgcagtttcttcctagcctcaatggtctttacaatttggcatgtttttgcagtggctattaccggttgttcctttccatgtttagtgcttccttcaggagctcttgtaaggcaggcctggtggtgacaaaatctctcagcatttgcttgtctgtaaagtattttatttctccttcacttatgaagcttagtttggctggatatgaaattctgggttgaatattcttttctttaagaatgttgaatattggcccccactctcttctggcttgtagagtttctgctgagagatcagctgttagtctgatgggcttccctttgtgggtagcctgacctttctctctggctgcccttaacattttttccttcatttcaactttggtgaatctgacaattatgtgtcttggagttgctcttcttgaggagtatctttgtggcattctctgtatttcctgaatttgataaaacgtaatgaacaaacctccaagaaatatgggactatgtgaaaagaccaaatctacgtctgattggtgtgcctgaaagtgacagggagaatggaacaaagtaggaaaacactctgcaggatattatccaggagaacttccccaatctagcaaggcagggttctattactcccttgcataaagccctgcaatggcttctcattgaatataaacatttcagagttttagatctcacttaaaaagtcctgcataatctggcccctgtctacttctcttattctgtcttttcctgtcttcacttcaccaactgtgccacactgccttttctatttttttgaacacactgagcacattctgctttgtgactaagtgttttggctattctttttgtctagactactgtttcccttgatctttttgggaccagcttcctcttctcaggtcattcagatcgcwgcttaatgacaagccttccactgctatccagtcctatgaacctaaagctactggccccttttccagctctatttaaataatctctgttacacttatcacaacatgtttcttatttgtctttttatctcttcttaccagcctcctcctctatgtagaatgtaagctccatgagagcagagaccttatttatttgtagccctagcacctgatgtacttcctggagcataataagcagccacttcttttcagtaatatttgtgaaatgaaagagaggtccagctcttaaagatgccacagtaaagtcatggtattgctacascatagtacagctagcatgcatgactagcccaacaaaataagtgctataaatgtaagtcgtatctataagtcatgtttataaagatttctggttatgcagttcaaggagcagttcatctgaaatctggckgggaggaaggataaagtaggcaaagctatgctgaggagataatctttgtgcctggttcttgaataaagaataaggacagaatagaacattagaactaactgaataaaggaaatagcaaaaagctggtgcttggaggtgtagaagtacatggggtgtttggggaatagtgagtagttcagctagaggtaagaataagggatggataaatacaaagttggagcagtgcaagtgccagcttataaagaattatatttgccatagtaagtttttggaccttgtataggaaacagaacctatactggtggcattatggaagatataaagaaaggaacagatagagaacagtttgactcagagaaaaaagggaatgcctaaacagtagcatgggagacatggatacagatcgaatattcagatataccatgtattaaaaatgttctttcagtagtttgaattttattatttcamattatctgccctaargatttatttttatctatcttacagaatttggttgatcttgcaggcagtgaaagagctgctcaaacaggcgctgcaggtaattaaaactcatgaaatatgttagtcttaatgtcttcctattttacaggtttaaaaagtactaccaggcatttttagaaattgataaagtaattatattcattattaataataatgaatcattaattgtgattttctgataaaagtttaacatagaaatcagcatctgtatctgcttaatttttattttagtctacaatagcatcaattaaaaaatgaaaattatayaattgatgggattgtacagcaggaaagcccatgagaattccataaaaaccatttaaactttcaaaataaggaaattaagaaagataatgtggtacaaaattaatatgcagatattaatttttaaaagttaaaatattaataaaaacaagttaaaatatttagtagacaaaaagactccatttataataacctaaaagatgtgatatctaggaagaaactcaacaaagatttgtacaagactgatataaagaaaacttttttttttttttttttctaaggcagactctcactctgtctcccaggctggagtgcagtggcacgatctcagctcaatgcaacctccacctcctgggctcaagcaattctcatgcctcagcctcccaagtagctgggattacagacatgcaccatcacgcccagctaatttttgtatttttagtagagacagagtttcgccatgttggtcaggctggtctccaactcttggcctcaagtgacccgcccacctcggcctcccaaagttctgggattacaagtgtgagccaccacacccggcctaagaaaacttgtaaatcagacttgaaggacacaaacaaatacttgaaaaaatggagaagcatacttaaatggaaaagattcaaaatcacaaggatatcaggcctctgtgttaatttctagatttaacacaatcctaataagactatcaagagtacattttcatgtttaaattaggtaagatgattttaaaatttgtatggaaacataaaaacagacaagagtagccaggaaaattccaaaaagcagaaagtggaatttaagattttactatcttactataagatagtaaaacatattataatgccatagtaattaaaactgtgtgaattgtcagcccagtgaaatagaatagaaaatccatcaagagtcccaaatacatacagaagttagaatacaataaagatggtccttcaaatttgtaaagaaaagatagattattcattaattgatagccatttgggaaaaaaaattaagtcggatccatatatcatacaccaaggaatgcattataagtagctcaaaaatttcaatataaaaaaactaaaaattgttggaagtcaacttacagtgggaaaacccttttgtaactgatacaaagtccagatgccttaaaagcttaaaagaaaccaacaaaaaactgggcaaaggatataaatgaatagttcataatgcttaaatggtttagcttgcacctgcactcttgccattagaagagctgctgatccaaggaagattagaagtttgttcaacagacttgagctcattctgcaacctattgtagagccactcaactgagcctagcctacatccaccaaaccagtccatcctcagacctgtgaacaaaaaataaatgcttgttttagccggttggttaggtagtaatgttaaagcaatagctaattaatgcacctgtgaaataacatctgttcaaaattatttttacaattttttttgtataggcagtagactgaaaacctacatgtccttcaacaggggatggggtgggtgaatgaagtctgatgcagccgtaaaatggaattttatactttaaaaaagaatgaaaaagatcagtgtttaccgatatggaaatttttccaagatatgttgccaagtgagaaaaagcaaagtgcaaaatagtatgtatggactgttactattgatatcagtgaagaaggaaggaaataaatacatacgaacttgtatttttaaaaatctctaaagaaaaaaactaataacagtggtttcctggtagaggtataggaactggttgaatggggataaaagtggaagggagctttttcaaagtgtactttttttttaaactttttgaaccgtgtgagcatattaacaatttaaaaataagaaattagaggctaatttggttgtaagttcatagttgcctatatttagatgttggaaaaaaattgatttgaactgaagagctagagaagctctttcaggaaacaggttttttttccctgcattcttccctccctcttcatttttttctttttactatttttctcaggtaataacctttctgattcacttgaagtgggaccaatagggagagagctctttctaccactgatattaaagatgggctcatgtctaaaccagagcatagactttagcatctgccctctaatttctctcattaacttagtgataaataagtttatcatctagaaaaggagtcaagtttagttttcatatttgtttaataaattcaggtgtgcggctcaaggaaggctgtaatataaatcgaagcttatttattttgggacaagtgatcaagaaacttagtgatggacaagttgggtaagtttatcccgttgtgcacttacctactgattcttatatttttcattaggttgaacattgcaacatttcgatgacactcaaatgtactgatttcttccatatattcaaaaacttayacatatgattataatctactgaatttactttctgttttaaatattttttagtagttttaatctgcctcatataacttgtaaactaatttttgaaactctggctgatttaagagttctgcattaaaaaccaactactttattatataaacgttctcaatctttttctcctgtaaacttattccttgctaagtggtttcataaattatcgagatagcaagttaacacgaattctycagaattccttgggaggaaatgcaaagacacgtattatctgcacaattactccagtatcttttgatgaaacacttactgctctccaggtgagtttgatttttatctcarcttaatataggggaagatcagcttgaagaagaaaacattacctactaaaattaagcatagttttttttaattaactcgcctgttataatcgatatgttgtctactaaatagcatttcttaatttaattttgccagacttcgattatttgtatcttaccttcataatttttgccacacccaacactattttactgaaattgacttgatatttttaaaataactcactttttgtacttaatttattrtaaaaggaaactttaatattagtcctatcaatgggaaactattattacttgccacaaatagaaggtaacaaaaaaaattgtgtgtctgtctgtataacaaaataattctgaaattcctggtagttaactgttgccttcatttkctctgagcctaaggcctacattttctattttaaaaaggaaaggaaccagcctgaccaacatggagaaaccctgtctttactaaaaatacaaaattagccagatgtggtagcacatgcctgtaatcccagctactggggaggctgaggcaggagaatcacttgaacccaggaggcagaggttgcggtgagccgagatcgcgccattgcactccagcctaggcaacaagagcgaaactatgtctcaaaacaaaaaacaaaaaaaaaaaaaaggaaaggaaaaatgagaaatatcagtagggtagctttctcaatgaaggattcaatgttatctaatggtcaccttggtgtacccacctaaagttacttatggtacttatactctgagaaacattgctttaaatagctgttgagcaccagatcaaggtactgtcagaggtgcaaagagaaactagagtccctggcttaacagaattaatgaattctgtgacaaggcacataacacttgtcttgcaacataattgcctttgattagtagttaagtggttaataactagtatagagtttaaaggaaggagagatatttttggctagaagcaaaacttcagagtagaggaggcgttagcactggaccttgaggggtaaatgagattccaataagctgatgtttttaagttctctcaatatatcttttttattctcccgaagactatcacccaggataagttacagagcattgttataaggacatagaatgttccctttgttcaaaagtattaagccaactagaaagagtattgatttttttaatcttgaatataagaaagctaaatattattaattaaattcgaatttttttaagtgttgaacacttagcactttcgtattttttttccagtttgccagtactgctaaatatatgaagaatactccttatgttaatgaggtrtcaactgatgaagctctcctgaaaaggtatagaaaagaaataatggatcttaaaaaacaattagaggaggtatgtatgaatcatttatttcattaaattgaaagaaccaatttagaatggagacctgcccaaatgctcagagactcttcattcctgaatatctgagttgctacaacttaggtttttaatcacttttaaagaagaagaaatccactcataaaaattttagtttaatttactataaattgtaagatttggttcttgaaattattttagattttgttttttattttcaacgggcaaaatctgagattatcaaatgggccaagtagagacatttcttaaaatttttcacaaatacatatgaattcgattaaaaagagaaactacagagttacttagaaccaccttctgtgttttcatgttatcctgaattcctcttctaacccttagatagcaatctaataatatagcataattacttatcattttagtttgttttaaccatcatggtcccatattttgtaaaaaatcacgcattaaggatcttttttaaaatgagctaaaatatcaaatggtaatcttatgagaacatctctatctttactatcagaattcaagtctttgttttatgacttctgactattcatatcttcttaggcaattaatagagttatattaacagcattggtgtcttatacatggtatatagaatagttacatgagaagaaatgtgtattttattgtaagtctgagaaattattgattatggtaactgcattttggtgttctacagttagagtatattttatttcagtgaaattaaaattcttatagttyatatacaaatttaatattttattyttttatgctactttaaggttttaaaacttagccacatttattattaacataatccaatattgcattctataggtttctttagagacgcgggctcaggcaatggaaaaagaccaattggcccaacttttggaagaaaaagatttgcttcagaaagtacagaatgagaaaattgaaaacttaacacggatgctggtgacctcttcttccctcacgttgcaacaggaattaaaggtaaaattaaaagatgacagcttaaacttgatgtacagagaatagaattggtatttctatatgtttattatatagtatgcactttctatcctttgatacagtatattcaagaaacccagaagattttgtgtttcatagtacctaagagattcattaaaaatgccaatttctgattcctatttgtagagattctaattcaacaagtttggaatgtatttaaataatttatttgcaatattctgcttaataaattctagagaaactgggtgattggaagccataggtttctagaatatgtggaaatattattttctacttaaacagaaatattaatctcaggaaaattggtgtagaatataaaacaacataattgtgtcaatgtagactctggtgaaagaaaaacaacatagtgaacaaaattcttactttgttggtgtgattttttgtttgtttttaattgagtaggaatttatttattcartagactttttggggtgtgagggtgtcatggataagagaatgacctctggagctagacttcctggatttgaatctgtcatttcctgactcttggccttggacaatttcttgaattcactttgctgctttttcctgtggaagtagcagtgtggaatagcttgatactcacctcataagtgttgtgtgagaattaaatgagataataggtagaattagctcaacacagcactttccacacagcatattctcaactaatgtacattgttaatgtgaataagcattatgtacagaggtatatagaagacaatcaagaactattggttgagtggtgagcaggaagtagcccaatgaaagacctagagaagaatgtttcaaaagagacctacatgtacaaaagcttggagttgtgaagaaacattatgcattccttgcacttaagatgttctagtagcaggggcgttttaaacctccttgagggatttgaatgtgatgttttgctaacaacaaagaacagccttgtgtgtgacatcagaattatagttgagaaagatgtagctactgtgcacatcagattgcttgggcctgcaaagattgtggctctggagttggagtgaattggataaattggagaaatgtttggaaggtaaacttagcaggactttgtgattgtttggatgttgagggcagagaaagggagaaggaggtgtccggaatgacttgcaagcaattccttggcttcatgggtagctggtaacaatattggttgagttaaggcacactgaataaagagcagtggaaatggtgggtgttttatttgggatttcttttgtttgagatgtcaggctgttgaaaatgcaaatgtgtgaatatgaggtagaagatttgagatataaatatcaatttgggcattaactactacagatccaaattaaagtttgttctggttgcatgttgagagaaggcaacaggaggcaaagtgacagaaggcaaaactccaattgggtaaggcagagaaagaagaatccataaagcagcccaggtttagctgtacagttaagaataaaacctagtgaatatggtagctaaggggagagaatatttcagggaggtagtggtcagcagtgtcatattctgctgagaagttaaataagataaagatggacaaaaattatttgcatttagaaacacagagctcatttgcaaaagtaatttaagtgatggggatgaaagccaccttatagtgtgttgaggtggcctagatggatggaatcttgaatatagtagaaagaattggactaacataggagaaatacctcttgaattggagcaaacatggaggaaaggataggcttctgtgcaggtagtactcttaggagtttaggtttatactttctttgtgaaataggtttaattcttctgctgagatggcaggtgatggtagagtcataagtttgcagagatactaagggtttgaaataggctagcctttgtaggtaatgaaaaagaaagctgacaagggggaagggaatattgccatgcaacattaaaggtccagtttatcttgtcagccggtcttctggctgtgtggctctggcagtgctcaggaggctgataaaggtcttgaacacagtgccatttgagtgtgccgtgtagggtacatgtaagggacagagagtgggtcaaataatttgagaacattgacctcaaatttcaaacatgattacagtgatctatggaatctaagatgatagggtgagaaccaagagggagatggcaaaaaaaaaaaaaaaagtcatgcaacaagggaacagagctaaatagcccctgatgagctaaatagctatagtgggattaactaaattaatgatttggaaggayagcaacggcaatgagagcaagaggtctagtttatgactttcagataatgacaaggtccaggtgtggctttggtagcaactggcattaaactgaaggttattggagtcgaggatttgaatatgatggggcttttgcagagcagggtgtggaaagggctggccatttcaagcagaaggacagcactcagagaggcatgacagtatgcagtatattctgtggacaacaagtaatcttaagaggcaatgtgacggaatggttgcatggataggctctgaagtaatagacaatgggctcagccaccaattggctatacaaccttatgcaacttctccaaacttgttgggcacccaactcatctgttaaaaagatgtagtaaggttgatactcgatacaagtatcatctcatcttatttgattctctcaacaaccttagggttgtgtatttcagatgtgattacaaccctagggttgccgagagagtcaaataagatgagatgatacttgyacccagtaaagagtcaagagaagaatggtggctatgaaacctggagaaacacacttaagaggcaggcacaggaagagaaactagcaaagcagagtgagtggtaaggacagcagctgggtaaggtaagaaccaggagatgggtccctgaagtgttgaggaaggagtggataaatgatgaggaggacaaagtaggaaaaaaagaaaatggtagttagagtgaagtaaagagtcaagagtttgattttttttttaagcaatatccttagactaataaaattttaractaggcttaataagaattctacswagtcaatggttttcaaaaatagaaactagttcccttgttttattatgtttgaatacagatctatatgacataattttgatttcttcttctttaggctaaaagaaaacgaagagttacttggtgccttggcaaaattaacaaaatgaagaactcaaactatgcagatcaatttaatataccaacaaatataacaacaaaaacacataagctttctataaatttattacgagaaattgatgaatgtgagtgcttttttcaagtggaactatgtttaattataaaagcatccttataaagagaaactatgtttatagctcagttaatgtgataaacatgtttaaatactgtgtatttcatatgtgattacaatggagactatgatttaaaataagtaattctaaaaatacaaaaaaactagctgtgcgtggttgcaggcrcctgtaatcccggctacttgggaggctgaggcaggagaatcgcttgaacctgggaggcggagcttgcagtgagccaagacccgttgcactccagcctgggtgacaagagtgaaactctgtctcaaacaratataaataaataaataaatagaaagtaatcataagttctttattctgaatctcctaagaatgatgcactagttgaaacacacatgagacaggtgtttttattttctaattattattcaattaaattgttagttatatggcatctgcctttgctaatcttaaaagagtggcattgacataggaatctgtttcaaaattatttcttcaatagtacagtctgttgggggggaattttaaatctacttataatgatcaaatctcaaattcagaatttgtccttttaacctatatttcattaaggatcctgtattgtgtcactaattccaaccagtgatcatcttaattcatacaataacataaatgaccatatctattaatgtacttttggtattcatactctgagcacatagtagttaatttgaagttcttagtatctctgataagaatttttttagtaatctttaatttgacttaggaaatttggtaaacatgttcatggacaaattttttttttctctaattatagctgtctgttcagagtctgatgttttcagtaacactcttgatacattaagtgagatagaatggaatccagcaacaaagctactaaatcaggtaacttaatgtattttacagcatataatgcttttactctttttaaaattcttttgttattaggttttgttacttgttctcatttaatttcagtaatgattttggctctaatgaaggcttttctctttacatttctactctataaccatcaggcacctagaggaaggctaaaaatttcataaggcagacatgtgctagtaggtaaacctttgcctctagctctttactagcagatcttagtattcacaatgtttgtaaagtttctgttttgccttggtaaacttcattagggtaacaagactgattttaaaagtgtcaattctcaggcatttataatgtatagaataatatatcagggagaggtaattttggtgaatacatcagtaagtttagattccgtgtttactttgtagattgctcgtgtttaaagatgtatagttgtataaagtaatagacattttcatttgaattttagaatataattgcattactacttattattgttagttaattcctataaagtattattgataaagtgtttttttgttcctaatacatacattagaagtttcttgggttttttttacaatctctggtgtaaaaaagtatttttttaactcatggtttatctcttctcttataataatatagaaaatagaaataggcctctttatagtaaaacacagttgtcattagctttagaagtcaataaataatatctctgtttccattcttgaattcagaaccatctgagacataaaataagagttagttagattggggaattcaattatcagttttattactgaggagcttgaggacttatggtcaaaattccctgtcaggcacaggcaaacatacactttattgatatatttttaaaattctccttctttcaaaataatctattytaagttagctagtttgccaaaatgtagaactttagaaagatatcaaatcaaagttaaagtagttatttaaataattcaaattttattaaggaaacaaaaaatatttgaattttctgattggaaaatctgttcttgtttataayaggagaatatagaaagtgagttgaactcacttcgtgctgactatgataatctggtattagactatgaacaactacgaacagaaaaagaagaaatggaattgaaattaaaagaaaagaatgatttggatgaatttgaggctctagaaagaaaaactaaaaaagatcaagaggtaagagagacagaaatgtaaaactaaactaaaagcatacttttaaaagaagtattctcttttttctataatgtaagcttttttaattttttttaaatgtacagataacattttatgtgtttattgtatacaacatgatgtatgatgttttgaagtatatatacattgkggaatggttaaatctagctaacaaatgtactacctcacatagttattgtttttgtggtgatagcacatagtatccacaaattttatgttttttaagaatacaataaattgtcattaactatagtcaccttgctgtacaatagagctgttgaaatttattcctgctatctaactgkcattatgtcatctgaccaagatttccccattttcttctccctgmaaaacaccccagcctccaataaccaccattatactttgtacttctaagagatcagctttttaagattctgcatgtgagtgagatcatgcagtatttgtctttctgttcctggtttataatgtcctttgggttcatccatattgttgcaaatggtaggatttcttttttttttttwaaatagctgaagaatattccattgtgactttataccaaattttctttatccattcttctgttggtagactcttargttggttccatatcttggctgttgtggaaagtgctgcagtaaatatgggaatgcagatatttcttgaacatactcatttaagttcctttgggtacatgcccagtagtaggactgctggatcttatggtagttctatttttgctttgttgaggaaccgtcatactgttttctatatattcctaccaacagtataaaaggattctcttttgtccacatccttgccaacaagttctcttctgccttcttgataagccattctaattgggatgaggcaatacctcactgtggttttgatttgcatttccttgattattagtaatattgaacatattatgtgtatgtcttcttttgagaaacgtctgttcaggtcttctgcctatattttaattgggttgtttgggggtttttttgctattgagttgttttagtttcttatatattttggatattaaccatgtgtcagatgtatattttgcaaatatttctgcaaatattgcaaatattttgcaaatatttctgcaaatattgcaaatattttgcaaatattgtctctttattgatgatttcctttgcctttagttgtaattccgtttatttgtttttggtctttttggttgtgcttttaaggtcttattcaaaaattccttgtcctgaccaatgttatgaagcatttccactatcttgttttctagtagtttcatagtttcaagtcttagaatttaagtccttaactcattctgaattgattcttgtatatgatgagagacaggagatctagtttttcttcaacatatagatattcattcagttttcccagcaccactattgaagaaagactatcctttccccaacatatgttcttggcacttttgtcaaaaatcagttgactgtatatgcatggatttatttccgcgttctctgttctattggcctgttgtctgtttctatgccagtagcatgttattttggttactatagttttgtaatatattttggaggcagatggtatgatgcctccagatttgctctttttgctcaagattgctttggctatacagggtcttttggggttccatacgaatgtgaggattgtttttaatctacttttgtgaagaatgtctttggtgttttgatagatatcgcattacatctgtggatcactttgggcaatatggacattataacaatattcttccaatccatgaacatgcatatcttcccatttgtgtcttcttcaaattctttcattaacgttttatagttttcatttgagagatctgacacctccttggatagtttgccattaacatatagagatactacttttttttatgttgattttgtatcctgcaactttactgagttttttattagttgtaacagttttggatggagtccttagggttttctgtatataggatcatatcatctacaaatagagacaatttaacttcctcctttcctattatgttttatttttctcttttgcctaatagctctagctagaacttcctgtactatgttgaataaaagtggcaaaagggaacatccttatcctgttctagatcttagagtaaaaggctttcagcttttccccatttggtattacattagcagtgggtttgttgtatgtggcctttattgtgttgaggcatatcacttctatacctaattaagagtttttatcatgaagaggtattgaactctgtcatgatttttctgcatctgttgaagtgattgtatgactttttttcattgttttgttaatgcggtatgtcatgtttattgatttgtttatgatgaaccattcttatattcctgggataaatcccacttgttcatggtgaattatcttttaaatgtgctgttaaattcagttttatagtattttgttcagggtttttctgtctgttcttcagggatattggcctatagttttccttttttgtctatttttggtatcagtgtaatgctggccttgtagaataagttaggaaaaattccttcctcttcaattttttggaatactttgagaagaattgctattagttcttctgtaactgttggtagaattcagcagtgatgccatcaggtcctgggcctttctttgataggagactttttattactgattcaagtctcctttctcattactggcctgttcaggttttctatttattcataattcagtcctggtaggtartgtggtagaggaattcatttcttctaggtttttcaatttattggcatataattgttctttgtatttctgtggtatcaattgtaatgtctccttttttatttctgattttatttatttgagtcgactgtcttttttacctagtctagctaaaggtttgttgattttgtttctttcaaaaaaaaaaaactctttattttgtggatttttttaaagtccctattttgtttatttctgctctgatctttattctttccatttgctaatttggggtttagtttgttcttgtttttctaattcttcgaggtaatagtttaggtagtttgatttctttcctcttttttgatgtagatgtttattactataaacttctcttttagaactgcttttgctgcatcctatacattttggtatattgtgtttccattttcatttgtcttagctttttaaaattactcttttaattcattaacccagtggttgttcaggagcgtgtttaatttttatgtatttgtaatatttccagaatttctgctattattaatttctagttttatgtcattgtggtcagaaaagatacttgatataattttgattttaaattttttaagactgtttttgtggcctaatatgatctgtcttagagaatgttccatgtgcagttgataagaatgtgttttctgcagctgttgaatggaatgttctgtaaacatctgttaggtctctttggtctagactgcagtttaaatctgctatttctttgttgattttctgtctgaataatctgtccattgctgaaagtgtagtttcaaaatcctctattattattgtgttgcagtctctcttccttcagattaatatttgctttatatatattctgccatgttcagtgtgcatatatatttacaattgttacaacctcttgctgagttgacccctttatcattatgtaatgaccttgtctcttttcacagtttttgatgtaaagtctattttagctgatataagtatagcttctcctgctctcttacaatttcagtttgcatggaatatctttttccaccccttcctttccatctatttgtatccttacaggtgaagttaatctctttcaggcagcatatatttggattttttaatccattcaaccactctatcttataattggagaatcagtccatttacattgataggtaggaactactgataggtaggaaattactacttccattttgctaattattttcttatttgttttttaggtccttttatcttatctcactgtcttccttattggataaattattttctctgatagtatgttttgatacctttctatttttagtgtatttattataggtttttttccttcgtggttaccatcaggcttacaagaaaaagtcttacagttatgcaggttattttaaactgataacagattatcattgaktactaaacaaacaaacaaactccacactttatctcctcccactttctgaatatttgattttctaacttttgatgttacaactgttttccttcagtacttttactatatcattgcactccctcctggcctgtgarattcctctttgttgttgttgttgttgtttaattatactttaagttctggggtacatgtgcataacatacagatttgttacataggtatacatgtgccatgttggtgtgctgcacccattaactcgtcatttaacattaggtatttctcctaatgccatccctcccctaggcccccaatccccaacaggccccagtgtgtgatgttcccctccctgtgtccatgagttctcattgttcaactcccacttataagtgagaacatgtggtgtttggttttctgttcttgtgttagtttgctgagaatgatggtttctagcttcatccatgtccctgcaaaggacatgaactcatccttttttatggctgcgtagtattccatggtgtatatgtgccacatttcctttatccagtctatcattgaggggcatttgggttggttccaagtctttgctgttgtaaacaatgctgcaataagtatacgtgtgcatgtgtctttatagtagaatgatttataatcctttgggtatatactcagtaatgggcttgctgagtcaaatgttatttctagttctagatccttgaggaattgccacactgtcttccacaatgttgaactaatttacactcctaccaacagtgtaaaagcattcctatttctccacatcctctccagcatctgtttcctgactttttaatgatcctggcctgtgagatttctgcttagaagtctactgctaaccataatggaactcccttctatgttatttgcctctttactcttgctgctttgctgcttttaggattttctccttgtctttgacttttgagtttgaatataatatatcttagggcagggtcatttagattgaatttgattggtaacctttgaccttcctatatgtggatatgtattgctttcttcaggtttgggaattttctgctattatttctttaaataagctttctgtccctttatttttctctacttgaactgcagtgacccaaatatttgcttttttgatgttgtcccataaacttcattccttttcatccttttttttttttgcctcctgactctatattttaaaatagcctgtctcaagctcacaaattcttctgcatgatccattcttctattgatgttctttgttgcatttttcattttgttcattgtattttcttgctctaggatttctgtttggtttttttattatttcagtctccttgataaatttctggattgtttctctatgttttcttgaggtttgctgagctcgcttaaaatagctattttgaattctttggcagataatacatctccatcttttaggatcagtcaccagtatcttactttgtgcttttggtgacatcatgtttccctgatcatgatgcttrtggtcatgcagcagtgtctgcacattgaagatgaatgtagctatttgttttagtcttcaccatctttataaggtcttttcaagatctatagtatgactgaggtcaccatgttatcctgcagaggcactactggacacctttctctttaggtccccaggtgggcagagctgttcttattccacagatgagaggggtcagtatcaagatccagggccatttgagaatctgctgatggacaagggttgcaaaacctgccacagggacttggatacgcctgtctcccggtaggaccccggctgggtaaaaccattctcagactatcgctaggagaaactgaaaccaagcttcagagttaattcagaatgtgctatggaaccaatgttggtaagcttaacctggtggcaccagcagtcaagactcccagcagttccttatgcagggaggattgcttgcattctgtagctgtgacattcaaggttctttccagaactgctatgtgatggaagccagcaggcctgtcctacacaggcaggataactgccaggctgcagtagagaggggctgcagtcaagacaagactgctttaggatctattatgggaaagatgcatgaaacctgtcctggtggctggggcaggtgcttcacccagcagttcccaatacagtcgagatagcttcctgactgcagcaaagaggcattgaagctgagacagggccscttcagtctattgtgggatggaggactgcaagcctgacccagtggctcagacaggttcatctcttggcagttctctgtgtgggtgagagcagggaggctgcagcaggggagggctggagccagtacatgtccccgtcggaatctgctatgagacagaggccggcaagcctgtcctggtggctcagatgggcatgttcccttctgggtccttgtgcaagcagtactaagctaggactacagcttgaggagggcaggagccaagttataggctaacttttgggtccactgccaagaccaatgtcgacaggcagaagagcccatctgccgagaccctagagtgtgtgatttctcctggaccccttgacagatagttttggttgcagactctaggccaaacagggctgtagctaagtccttcaaggaatgggaccatttctgcatatgaacctgggagcacaattggcaggactcccacctgggtgttggtatgcactctcaaaaacaacacttccaggtcttgagttctactggggttttacaacctcctacctgaatccaaaggctcccacaaaaagacttgtctgtaataggtacagaattcttgttgttttggggggatgtgagcaggtgacctcctattctgtcatcttcttgacatcactcagaagtattgtcttaaagatttttttttctaagattgagatgttgaagatctaaccatttttcatatgtatatacaatttagaaaatttaagaaatattttcttcatttatattttaaaaatagttaaatcatgtttctttccctggtgcttatgcaagagaaaaaggaattaaaagcatctatgggaagggttggtgtatctacctcttgatggatttgtcttgaaattgtttccttatagtttgtatattacattttattgagcatatataaatgctacctagagcacagcagtttcctactgagatcagtatgaattttaatatctagatgactattttatatatggatgctacatattaatggatttctttttctttagaaagtatgtttctaaataattaaaacattagaatagctggagaagctaattttgtacgttttgtttttccttctccatctaagagagttatgtgaaaattagtrtaactaatactaaatagttataatggaatttatagaaacagatcactcattttctaagtataaaatattaggctacacgttaagagaacttaatccagaaaccatcagactttagggactcagaaattgtccaaaagattaaagggagttattagtgtaaagtgtccttaacctagaggccacagatgctgtgaaattattttgcagaatttttcaatgcatattcatttttctggaacaagaatctgtagttgttatcagacttgcaaagtgattcgtgaacatccccccttcaaaaaaaaataagacccagtgttttatgtagttaaaagatgaattaatttgcagctactcttcagacttctatgtggctagcccaaaaggccatgaccctttttcctcgatatcattgttcagtttctcaacctcttttcatttttaaaggaaaaaagaattctatgccaaagctattatttccattctacctacaaattaaaattattgctttatttcataggtactatattcaaagaggtaaaagtctataagttctccacagggtttcatttagcttgttttaaaatgcatgttaatgaagtgcaaaatgtcatgcatgacaaaaccattggactttaatcaataaaactaggttttatggaagggactggcctagtgtcatgattaagaacatggtctctagagtgaaattgcctggatttaagccgcagttttgccacttataaacttaccgcagatccaatcctattatgaattgttgccaaggccttgggcaagtcactgaatctcagggcttcctgtatttctccacccttgaagtagagaccagatgctcaccaaggtcccttctgactttaaaatttcatctaatttttgtatgttttttatatgtgataataacatgacataaaactaacgtttgggataagtggtaataatttctctaatatttttctcacatcattaatatattaataagaaaaattgaagcttattgaattgagtcaacacagagaaagattacaaaaataccmcagaatatatgacatgtatcacactgcagtttttctcccattttaaccacagttgaggaggaagaatcctactccgttctttttaaatttctttttcttttttttcttttttttttttttaaaacacaaagctcagctttctaatctaaaagacatataattaaaaaactttttctttatagagacgggggtcttgccatgttggccaggctagtctcacattcctgggctcaagtgatctgctcgcctcggcctcccaaagtgctaggattacaggtgtgagccactgctctaggccctttacttttaattcgacacaaaatttaaggttacttaaaagattatgtaataaaaacatcctgttcaaaamcagttttgcagtatctagtccatgttaaactaaaaatataagtctatgtgtatgtagcaaaatatgttccaaaacctacattttggggaaaggtttagctaaaagggaataaaagtcaaattggccttaggacatggagccatttccctggttttcctaaagcttttgtcaaaaatcacccaagttgtagataattttctagtgggaatatagtaacatgagatgcttaaatagtatgttttagagggagaatggaaaatgtcaagtatcaccatactcgaggaatgagaaaaatctttaycrtctacctattttaacttggtgtatttaattttataatttttactacttggagatgtaagttaaatatttcatttcacytaatgacaattaccatttaaatctgcaatttaaatggtagcaatggattaactgtagatcagatcatatgtttaaatcatttttccttttcacacactttcacttcatgctctgcatcttaaacatgtcattgggagattacacttttatttttataaaagctaattattttctatgcataagaaccagtactaagataaagtgctatttcaaataagaagtaggaaaattttcttttctaaattagtattctttaaatgttttcattatctatggccatactaccctgaatgcacccgatctcttctaagtatttttaaaagttaagattgatttttgattctttcttattggtaaatgtgattttctttcacagaagttaaaaataaggaagaaaaggtgaaagaaggagccaatttaaattaaaagcagtacaaatgtctaagactgtgttctacagtggggtagccactaaccatatgtggcaattaagcacttgaaatgggaccagactgaattgacatagtatataaaaaagaatgtaaaattgttcattttttttatattgattacctaaagaaacatgttggatagattacctgaagaaacattttggaagaaatatttttgatatattaggttgaataaaatatgttctcaaagttaattctgcctttttctttttaggtttaatgtgcctactaggaaattttaaattacatatgtgtctgacattatgtttctcttggatagcactgacctaaaatagtaatgtcaacacttgcactagtctgaaatttaaaactagtcaggactcagttaaacatccagaaaatatttaaataagatactattttcaagccccttacatactattagaatttgcttttactctgtaagtgctcatctgattatgaagattaaataattctaagggaaaatgtttatcttggttatgtgtggtttacttgttttcaacaaactttttggtactcagatatttaatgctacagatattttggtagaaaggacacctcaatagaaatacttctacctttatacttttacatggttgaacaatataatggagtgcaatatttcctctggaataaatcaaggtcatagttgatcattccatacctgtgtagcactggtgaaaagtaataatattgtaaaggcactgcatgaaacaaccctaatccaaacctagattccaaatcagaacttattaaaaagtacactaatgtagagcygatggatactttatgggaagaaaaaactttataagaattaatacatttctgtacttaactgactgaaaacaaaaatctactaaacgtgtatttttcaaggtttgattaccactttttaaatctctcctccaagtrgtgcatactaatttgctattgacattattgtagctttattaacagatgatatagctacttggtggggtcatgctgaggggtttttttttatttgtttgatatgttttgggtgatatttctagtatttttaaataatgaggtgctttgttgcgatagcttgaacaattgatctcagtcctttctaactgttgggtgattctgaagcagtgaaccagtgcccttttttttctttttctttttttttttttttttgctttgctttattaactattggtttgctctgttacctgttcacatgctcttacagatgcaactaattcatgaaatttcgaacttaaagaatttagttaagcatgcagaagtatataatcaagatcttgaggtgagcattcatgttggtatttctattgataagcaattagaactataaaacatgcaacatatgtaactgaacatgatgtcagaaataagggaattatgtttttaaaatwttagtgactttgaattttactatgaatttaaactaatrtatataagttctgttttaatcccttagacttcaaatcagattctaaattgttactctctcctttgattcttttagaatgaactcagttcaaaagtagagctgcttagagaaaaggaagaccagattaagaagctacaggaatacatagactctcaaaagctagaaaatataaaaatggacttgtcatactcattggtaaaaatcaggcgtattttgttgtgtaatcacataaatatatatagcataccatcatcttagcaaatgcttatactggacctactttgtgctgtgtattgttgtaataaatttrtatatatttcattaaatctgtcaataaccctatgagatagggactgttagtatatttgccattttagagataaagtcacatttgtggaaagytgatcatgtcatcctttgagtaaatataaggaagttaaggacaggctcccattaaaaatcagtaagttttaggccagggcacagtggctcatccctgtgatgccagtactttgggaggccgaagtgggagatcacttgagcccaggagttcaagaccagcctgggcaacatagtgagacctggtctgtacaaaatatacaaaaataagcctggcaggtaytgccagctacttgggtaactgaggtggcaggattgcttgagcctgggaggttgaggctgccatgagccgagatcatgccattgcactccagcctgggcaacagagcaagactctgtctccaaaaaaaaaaaaaaatcagtaaaattttaaaattccgaatttttttcagtagttttatacaaatgcatgcagtagtatatagtcaagatcttaaatattaaactgggatattttttcacaattttatagctctagatgattttagttgatataagatcttggcattaamtaacattgaatctgatgatgatgtcatttaatcgcttcagtttgctttcagtatacctgattacttatatatgtttggttccagtttttaatacttttttttttatgataacagtttctagctggaacttttaaaagactagtttctgttcttctgttttcagttgagttttttagtttttgttaccttctattcttttgttgccttttatttgtgacaaatgattcttttcaaaggggttcataccatttcatatcatcctattctgaggccctggataggaaggcacttttatgtattctggagtgtctgttcatagcgtggcaagcagaactgcccactttttaaaaattactatttctttttccttattcattcatgtattaatttattaatttttttccaaggacatatcattgatttcatataagctaaagtcatattaaaatgccacttctctttagaaatgaggttgtagatttttttcatgtatttttcatttgcattttctcatctgtaagtttcttgttcatatcatttctctatttttctattagatcatttgtctttttccttttcaatttgtgggttaatatctttaatttaactgttagccacttacctatcatgtgctgaagagaataactcaaaataaaaatacatagaaaacttcatcagccttgccgaacaacagttgttttaacctttaaacaaaacagatctaaattatgatacattgcttatataatttgatatattgcttatataatttgaaaaatatgaccagaatttttaaaaattatttttattaggaaaacattatttctttttatatatttggtaactagcatatttgtacgctttttgattagctagagttaacatttatatacatgttctcttaagaattttccaactctgtgaaaattagatttcagtgaaccccttttgtcatctgtctaggaaagcattgaagacccaaaacaaatgaagcagactctgtttgatgctgaaactgtagcccttgatgccaagagagaatcagcctttcttagaagtgaaaatctggagctgaaggagaaaatggtaagtattttttgtaatatttataataaagtagttgtaatgatcagtgtatttttgtgcatttgcaatgtttttctcaatagaaagaacttgcaactacatacaagcaaatggaaaatgatattcagtwatatcaaagccarttggaggcaaaaaagaaaatgcaagttgatctggagaaagaattacaatctgcttttaatgagataacaaaactcacctcccttatagatggcaaagttccaaaaggtattttgtaattttaaacatcttttttcaaatctgacttcttctagaaatgtacctaaacaatttgacaagcatatttcaatgattaaaaattcattatactctgactttttaaaaactcaatattacgttttagtttcatttggtattaatatttataaagatttccatgggtttcaaatcataagggattatttttcaaataaactttacctgatcctgaaaaaggtgattcaaggacaattaaaaattaaattacctgtttggcaacattggatctttatacaatttaccaaaactttctagatttgctctgtaatttrgaattggaaggaaagattactgatcttcagaaagaactaaataaagaagttgaagaaaatgaagctttgcgggaagaagtcattttgctttcagaattgaaatctttaccttctgaagtagaaaggctgaggaaagaggtaaacacatttataagcacttatcccttattttgaaataaaaacctttgcgataatagtgccttaaatatttyggtatagtttattttaaactagcagacaagagagatactgtaaacgttttgactagttagaaatagaaatgaatatagttcatcttctaatttgttcttwtgctactagattaaaaaatatattttttcaaggtgtatttaacagaatacttagtaatataatccatgtagcagccatttctgtagtcctcaaatgttgcatttatacagtattacggcccacccttagtctttaccattttttttggtagtagtagtatcattatgttgaataaaagacagtaatgagggaaaagaggttgcactgataaagttttagaggttaatgcaaaccttrcaggctggtgaatgtttctgtaaatccatggcctgccagtttttctttctacttgtctaaaagaaaaatggcaaaaatttgagtacttactgtatggcaaacatcatgctaaagaacttcaaaaacattatttcatttactcgtcttataaactcttcaaaaataggtagttttttagtcccaataacccattatcaaactcataattgagccacataaatctgcctcctaaacccgtgattgtagctacacgctgtattgcccstctttactttgtccctcctttatctcttctttttttctcatctctctctgcccttatctttcacagtgattaaactgttaatatacaagatatgggttatttaaattatgtaattatttaaatattacttaagtggtacttytatttttatttttttcatggaccataccacttaagatacttcttaaataacaattttaaatgattaaacattacttaaattattcattgattaagtttttggaaacctgagaggcattcaaagcctttagggaaaaaaatgtcaaattctgagaaatgcctgccacatgataaagttagaaaacactttaaaatgataggtaaggaaataaagacaatctgattatgtgcctttactattttccatgcagaccttactttctagaatacaragagattagaaaataaaacatcaaaggtagagttaaacaagctgagttagggaaaagtgacaataagagtactactatattgcctttccacagtcaaatttttgctgaatgkaaataacttctctttttgcagagaaagctttttttcctaaaaattgcttcagtgaatcatatgttgctaacatccctaaattttatttcttttccatagatacaagacaaatctgaagagctccatataataacatcagaaaaagataaattgttttctgaagtagttcataaggagagtagagttcaaggtttacttgaagaaattgggaaaacaaaagatgacctagcaactacacagtcgaattataaaagcactgatcaagaattccaaaatttcaaaacccttcatatggactttgagcaaaagtataagatggtccttgaggagaatgagagaatgaatcaggaaatagttaatctctctaaagaagcccaaaaatttgattcgagtttgggtgctttgaagaccgaggttggtacaagatgctattttgagaaatgctccttagtcttctggggttttggtttctgtatatatgtatgcctcagactgctctgcttttactgtgtgacatttactttttcttttttaaagctttcttacaagacccaagaacttcaggagaaaacacgtgaggttcaagaaagactaaatgagatggaacagctgaaggaacaattagaaaatagagattctacgctgcaaactgtagaaagggagaaaacactgattactgagaaactgcagcaaactttagaagaagtaaaaactttaactcaagaaaaagatgatctaaaacaactccaagaaagcttgcaaattgagagggaccaactcaaaagtgatattcacgatactgttaacatggtaaggttttgattgattaaactttgaaaaattggagactcttaaaaacattgcagaggccatcatttattatttatgattatgttatgtagtagctacaaaataattttgtttcatattctaatggaaattgtttttatatttttctaacaaagaatatagatactcaagaacaattacgaaatgctcttgagtctctgaaacaacatcaagaaacaattaatacactaaaatcgaaaatttctgaggaagtttccaggaatttgcatatggaggaaaatacaggagaaactaaagatgaatttcagcaaaaggtaaagggtgtttattttcagagttttcatatrcttgtatatatactctttaacctcaaatacttaaatgcataatattctcaatttcatttgttactcacaatggtaataactaacaataattttacaagcttatccctaatgcctttgaaataacttatgatagaatatgtttataatcaattagaaagggaaagggcccaaaaatgtattagtccaaattttgcatagctgatacttattttatgtcaaatttactatactaaacttgcttagagtttaaaattcagtccattgcagaggggattgccttataacgttataccagggtttcatttattaacagtattcttttctactttcccacaacacctctaagatatattggtaacagtaattttgtaataacatgtctcatttttattatagttcatattattttatccagagtatttactgctagaattttaaaatattcaataggagactggtgaaataatcttttgtaaatatatagcttggaatagtatatagtagtatatattttttaaattggtagtaaaatacacataacataaaatttaccaccttaaccattttaagtatatacttcactagtgtaaaattcattcacattgtgatacaaccaatttccagaattcttttcatcttgcaaaaccaaaactatacccattgagcaacagctccccagttttccttcccayagaccctggctaccaccatttatttttctgtctttatgaatttgactactctgagtacctcatataagtggaatcatgcagtatttatcttttgtgactgacctgtctcattttgcataatgtcttcatccatgttgtagcatgtgttagaatttccttcctttttatgagtaaatttccattatatgtatatgccacagtttgcttatctatgcatccatcatggacacttgcgttgcttctacccattattggctgttgtgaataaagctcctatgaatgtgagtgaacaaatatctcttcaaaaccctgctttcagttattttggatatatatatccagaagtggaattgctaggttatatggtaattctatttttaattttttgagaaagcaccataatgttttccataacagctgcaccattttacttcccaccaacaggacagaagtgttytggtttatatgcacctttgccaacacactattttctgtttttttttttttttttttttgatagtagccatcctaatggatgtgaggcagtatctcatcgtggttttgagttgcattttcctaatgattagtgatgttgaatcttcgtgtgctttttggccatttgtttatcttccttgcagaaatgtctatttaagtcttttcccatttttatactgggttgtttgatttttgtcattgagttgtargagttctttatacttctgaatattacccctttatcagttatatgcaatattgcaaaaatttcctcccattccatcggctgtctttttactctgttgattgtatcctttgatacacagaagtttttaatttcaatgtagtcaagtttrtttatttttactcttgttgcctgtgttttggtgtcatatccaagaaatcattgccaagacccttatcatgaatctgttcccctatgttttcttctaagagttttgtaattttcactcttacgtttaggcctgtaatccattttgcatttatttgtatatatagtgtaaggtcagggtacaacttcgttcttttgtgtgtggctattgttttcccaacaccattttttgaaaagatcatcctgtccccattgagtagtcttggcatccttgttgaagayactgtgaccatatacacaagcattaatttctggtctttctattctgttccaatggtttatatgtctgtctttatgctagcaccacattgttttgattactgtagctttataagttttgaaatcaggaagtacaagacctccaacttcgttcttctttttcaagattcgtttccctatttggggccctttaaggttctatattaatcttaggatagatttttctaattctgcaaaagacaccattgggattttgatagggattacattaaatggtagattgttcggtagtattgatgtcttaaaaatawtgtcttctaatccatgaacatgggatgtcttaccatttgtgtcttctttaatttcttctcagcamcatttmcagttttcagcagatgtctttcmcctccttggttaagtttattcttagtattttgttcttttttgatgctattatacataaaattgtcttaatttcttctttggatcgttcattgttagtgtacagaaatgctactgatgtttgtacagtcatgcatttttaacagaatacattattaaataaaagcaaatacacatttcaaagtaattcagtaagatccaattgatataaataaatatctgtacatttatatattacttctataaaatgagctgcattttcccccatttactccggggcaaaatactgccttggaaaatggaactttttttttatttccatctccttatgctttagttcttctctctcactttttctgtatcttatgttctcagcttatttataatttggaataaccataggccaaaggcatttgacctcaatttgaaatttaccctcaacacaatggcttatgcctgtaatcctagtactttcagaggccaaggtgggcagattgcttgagtccaggagttcaagaccggcctgggcaacatggtgaaaccccgtctctacaaaaaaatacaaaaattagccaggcatggtagcaatgcacctgtagtctcagccactcaggaggctgaggtaggaggatcacctgagcccaggaaggttgaggctgcagtgagcccagatcatgctgcagcactccagcttgggcgacagagtgagaccctgtctaaaaaaaaagaaagaaataataacttccacttttatgatgggaaagtttttttagtagacttttgacaataatatatggcaatcaataactgttttaaacaaatccaaaatgcagttatagagacaatagaagatgaagggaagagtagagttatactcactgggaacagctaagatcctatgttaccaagtatatgctggagtcatttatccatgttgataaaaggatgtagctggggcttttctgaggccattctgttcaccagggatcctaaagtctgggatggaaggctgagatcaatttggtcttgtatcatgctcatgctggaatctgccatgggaataaaagagtggaaatggggatttccaggtgctcccctgttcatctaggcaccagagagctgcactagcaggtctatcatgaatctccttggaatgctcatttttagtcctacttgatgtgtctgtttctggaaatgcagtatttttaatgtatctcaacaaaaatattttatgattagtaagcttattcttatataaaggacaatttttttcctttttcacaggttctaataattttttatttaataattagatctattagattttattcataactgtggtagttgaagtaccttctaggctgagttcagatttgaaataaaccttggctatcattacagaaaattttgtctcaatctgctttgtatttgaaagatatgagattctgaattataatatctaacagactagtcccaaaagactacgtgttccctaccttaatttctcatgtagttagctctgtgatcactgttatcttctagaagctcatgcatattgccaacaataagggggttgctaaataaagtacagtttatatctactctagagaatcaagcagctactaaaaattatttgtaggttacataacaacatgtgaaaatacatatgatctaagtggaaaagataaaaactaaaaagaatcacacatataaattcattataatagctatgtttaaaaaacaaaaaaacaaaaaaaaaacctttaatggaaaaaactccagaagtaaatttaccagaattctaatagtttgttgtgtgaagttggtgacagtggatgatttttatcctttatttttctattgttttctaatgtgattatagattattataaaaacttttaaatacctgtgtaggcaatatggagctgtttgctgaactagtgtaatgtcatacartaataccctaaatttgtaccagcaatagtaatttcagtctctgtctccctttaccaataagttcacgtattaggttacatttggtcgtgacttatttatgaataaatgaatttatataacatttttcttaagcagtatataaaatatacatatattaagaaaagatgaatttcacccttatgaaatagatctttatcaaaattatttatccccctacatataataaaactccagccttttgtaagtaggactgcctctgaaaataaagatttgcagggagtgggagacagggaatgattcccagcttttaggaggaaatagataaagtgatagagttcaagattgcttactcgtttagtagtaaataaacaaactactactagaatgaaacttggaaaatatttatggaagatgtgtacaaactaaaggcagatatcctttaattaatgtattaatgtcattgaaataagtaaacatgcagaatcatgttaacctatcatacgtgaagacaattattaatatttgtagttgtccatattgttctgattagtgaacagacgtaagagcacaaactttggagccagatcacttggattcaaaacctagctaaacctctgagtgaccttgggcaagtgactttacctctctccagttcagtttcctcatctgtcaaatgaagattatggtaatacctacctcataaagttactgtcaagattaaatgtgttaagatatgagaatagtacctggcacataatagatgtgttggctatttttattattttttaaagttgttgttaactacttaagaaattcttctgtaatgtgtttatgttttagatggttggcatagataaaaaacaggatttggaagctaaaaatacccaaacactaactgcagatgttaaggataatgagataattgagcaacaaaggaagatattttctttaatacaggagaaaaatgaactccaacaaatgttagagagtgttatagcagaaaaggaacaattgaagactgacctaaaggaaaatattgaaatggtaggatttagcactgtatacttggcattacctttttgtcttcatttgtttcagatttttatcaactttattgaggtataatttatatacaataaatgtatctggtggaagtgtatggtctgacgacttttaacaaatgtctctacccatttcctcttcaccccagtcaagatagaagatgtttccatcacccccagaaagtttcctcacacctctatcacagaccctcatcacctcctccccgccagattatcagtcctgatatgttcaccttaaatcatttgtctcttctagagctttatacaaatagaatcatacagtatgtagtctcttatgtttsactttctacactcccttttactgccaaggaatagttcattgtattaataygccataatttttttattctttttcctattgatggaaatttgggttccgttcagtatttggctattttgaataaaactgctgtaaacattctcgtacaactctttttatttacatagctttatttacttaaggtaaatatctaaatggaattgctgtgtcacagggaagaatatgtttaacttgatgagaatttgctagactgatttccaaagtaattatatcattttacattcccattagcaaattaagagaattctggtggctcaaacatccttcttcaccaacacttcatatttattggtgcttttaattttagccattctaatgggtgtgcagactgttgttttaatttgcctttccctaatgactaagatgttgaacattttttcttatgcttctagaccattgtatatcttcttctgtaatttgtctgttctcaaagaggtatgttgtagattttcagtgtataggtcttttaatattttattaaatttgttcctaaatgtttctctttttttttgctgtcataatttttaaattttatttttaattgtttgttgttgatgtctgccaatattttcacacttaggttttctatgtttaggggtgatayaatgtgtataagtttaaataaatatttggagaagttcactgtggatcatagtagaatgcgaccatttgtattgttttaattttataagttttggggattgtctccttcatcaaaagagcagaatgtaaataagcacacaaacaaacaatggtattttcttctcagtctctggcttgttatgtttttgtggtcttgatacgtgagaatgtcactgtgtgagcctaataaccaggatcagcccaagtcatgctagcagagggtggctgccattttgagctcgctggcagtgatctgtgctaaaaccaaagccatcccagtgtttgaaaaaactatagctgtagtctcattattactcagtgatagctcagaaaaagtctcttttgacttaaaggtagaaataagctaagctctcatgatagaatgttaaatgcaattctaattctcatggtaggaatgtaaattgagcagtaaagaaacagtataaaaagcagattcttggcatcttatattattaaaataaggactttcttttttgaaatttgtcttttcctatatagttttccctgatttcttcatttgcagactgagagaaatgctgatgttttacctgatttcataaatgttagctaatatttactttaatctcaactttttttttctttctagaccattgaaaaccaggaagaattaagacttcttggggatgaacttaaaaagcaacaagagatagttgcacaagaaaagaaccatgccataaagaaagaaggagagctttctaggacctgtgacagactggcagaagttgaagaaaaactaaaggaaaaggtgaatttttaaagttatttccctggccattttttctaactaaacttttttttkggtaatttttatttctgtagacctaaatccagaaatagcacatacctcccaaatgaacatatttcaatgctagtattttggacaattttaacttacactgagatctaaactaacataccttatgaggattatattattccagagtctttaggtgagagagggctttgtatcatttaaacaaatcatatgatgtattcattcatcaaatatttattgagcactgtcatgggccacgcactgttttgggcacttgagatatattagtcaacaaaacaaagattctttccttgcagagatgcattagtcattttgaaatgtaagatttatcactattaccatctcttagatgtttgcagtttcctgaatcatttcttatatagaagttaggtgttattgggatatttgtgtaagagctaagacccctgtaacagctgtagttcccaagagattctaaaatgcacccatagagatctttctatataagctaagggcagtgccacttgcataatagataatatagtacggttctgttattattctgtggaatattttttcttttttctttcctccttttttttttgagacagggtctcactctgtcacccaggctggagtgcagtggcatgatcacagctcactgtagcctcaaccccccctgggttcaggctgtcctcccacttcagcctcccgagtagctgagactaaattagctgtgccacaacacccagctaattgttgtatttttggtagaaacgaggtctcactgtgttgcccaggctggtctcaaactcctgggctcaagcagtcttcctgcctcagccttccaaagtgctaggattacaggtgtgagccatcatgcccagcctgtttttttcttaatatgtgttttcttttaattctgatccctttcactatctcacctaattgagtttactaaaaccttatgtctatttcatactcctataaaaaaggtaaaatcaatagcctgtgaaggttaatgtctcagtatttgggggagccacccataagcatcttattggaagtgaaaataaattctccaaaagttttttaagaggatgaggaattatagttatttggtagctgtatttgtatatttaattagtctctttgcttttttactttatctcatcttccccttatctccttaatcagtttatctccttaatcagcctgtatcagtttcctagggctgccwtagcaaattgctgtaaacttgatggcttacaatagagacatattctgtcacagttctgagtcctagaagtccaaatttaagtgtcagcaataccatattccctctgaaggctctaaggaagaatcattccttacttcttcctagcttccagtgtctcccagctacccttcgcattccttggcttgtaactgcttcacatgacctccttctctgtgcctctctatgtgcttttatgtctcttataaatacactcattggaatgaagacctactccagtaggatcacgtctcaatcctaatccaattacatctgcaaagactctatttccaaataagttcacattctgaggttcctgggagacatgaattttgggtgggacaatattcaaaccactgcagacatttatgcctgtgagtttcatttacttttaatgctacttacctatttatatgctgataggaggcaaggctgttaatgattttgtgtaagaattttgagaatataagtaaaatggtaattataaaaattgtgcattttaagagccagcaactccaagaaaaacagcaacaacttcttaatgtacaagaagagatgagtgagatgcagaaaaagattaatgaaatagagaatttaaagaatgaattaaagaacaaagaattgacattggaacatwtggaaacagagaggcttgagttggctcagaaacttaatgaaaattatgaggaagtgaaatctataaccaaagaaagaaaagttctaaaggaattacagaagtcatttgaaacagagagagaccaccttagaggatatataagagaaattgaagctacagtaagttatacccttttccttcatctattaagtgtttcttttaaaatctgagccacttggaaagaggggagcaatgttggaagaatattacaatattctttaaatttcactcgccaagggcctacaaaccaaagaagaactaaaaattgctcatattcacctaaaagaacaccaagaaactattgatgaactaagaagaagcgtatctgagaagacagctcaaataataaatactcaggacttagaaaaatcccataccaaattacaagaagaggtatgtcttttattcctttcatcctttgtcacttcttccttcctttctcctttgaaggaaagataagcagtaagaagtagctaggatgtggttcattaattgactgggtaagtatttgtcgagtgtttaatgtggcaggcacactcctaggttatagaaatgcaatgagaacaaggtgracaaaacccctaaaatccctctgatccatttgtagtgaaagaaagtagctgataaataagcaatcaaatgaacaagaaaacattaaatagtggtaaatgctatggagaaagtgaaacattgggattactgggccaacctgtattaaaagcctactccatgccagacattgagactgtagatataaataagacattgttctttccccccattataaactagaaagaaaatcccttaattccaatatggtaaatgcagaaatacgcaaaawtacatggtaccactaatttatcatggaaagagaaatcaatctatacacatagaaaaattgagacatagcattggagcccatctgaaaatggagatcatacatttattgggatatagtttgctcagctatggtttttctcttatagcttggaaactagtggagaaataagtatgaaacagactgctagcaaagtataattggttcactttgggtctaagctacaaagaaagaaaagtatgacagaatgtgacccagaaaagtcatgaatagctttagcaggaattgagggaaaatgaataatgagcagtttgtgatccaaggtaggcctgagggttcaagatgactttccttgctgtgaaaagtatcctgatcttttccctttaaaaatttatgataatggccagtgggatgcggtggctcacacctgtaatcccagcactttgggaggccaaggcaggcagatcacctgaggtcaggagtttgagaccagcctggccaacatggtgaaaccccgtctctactaaaaatacaaaaattagccaggcatggtagcacacacctgtaatcccagctactcaggagactgagacaggagaatctcttgaacccaggaggcagaagttgcagtgaactgagattgcgccactgcactccmacctgggcaacagagtgagatgccgtctcaaaaaaaaaaaaattatgatcataatctcctgatagtaaccttggtattttatgaatgtcctaagatcccagtgcttcatgaggaacaagagttactgcctaatgtgaaagaagtcagtgagactcaggaaacaatgaatgaactggagttattaacagaacagtccacaaccaaggactcaacaacactggcaagaatagaaatggaaaggctcaggttgaatgaaaaatttcaagaaagtcaggaagagataaaatctctaaccaaggaaagagacaaccttaaaacgataaaagaagcccttgaagttaaacwtgaccagctgaaagaacatattagagaaactttggctaaagtaagtttcgtattttcctcccattttaacaagtgtcttataagaatcaaggcttgtgtttgtgttatagttataaygtttgtattataattatgttaccagtttttttaatgtctcttaatcatgaaatgactagaaacagaacaattaaaaattgctcttgaataccaagaaggtattgaaacagagagaagatgtttcagagaaaagaaytgttttctwaaatattcaaaaaataatttagaaaaaataattctaaattacaagaaagggtgaaaccaaatatgagattgttttattttcttttttaaacctgttcctttaatgtttcataaagcactactgtgctttctcattgttttagtcagaaatctgggagctatccctactaatatgcctccttctctgcttattctgtaatccagtcaccaaatcttattgatttgagtgtgtattttaaaagtcatcctgcttttctctccacactgccaccaccctaatccaagtcaacatcatttctttccctggctatctgcagtagtctcctaactggtcttcccacactcattcttagacttctctaatccagtttctatactaagcctaagttatcctttcttacattcttttaatatcttattgctactttttaaataaagaccaggatcctttatgtggcctatgaggccctaggtgcagatcttgccggtcttatttcaattcattcttcttcctattctttgttctccagcaactctcttccgcagctcatggctttcagattctcaggtctctctacctgcagtacctccatactcctttttgcctaactaatgctcttatmcttcagatctcagttaaagctttctcctctaggaatcccttcctatcattcacaatagattatatttgacacttgggccgtaggagaagccagcatctctatttggtaagattcaacatcatatctatctttgtccttgaagtataagtctcaaaaagagagagatcctgtaagtctcatcattttgtctccagcctcgaataagatgctgacaacacagtgagacctcaatttttaaaaagcattaaatgcctgaataatggaagagtgggagaatggagagattgctctgtaaatgaggcactgaatcctgccttaattgttttagaaagcatcctgatttattttcccctaaaacacaatatctctggatatcaactgtactgttttatgattctcttaagatccaggagtctcaaagcaaacaagaacagtccttaaatatgaaagaaaaagacaatgaaactaccaaartcgtgagtgagatggagcaattcaaacccaaagattcagcactactaaggatagaaatagaaatgctyggattgtccaaaagacttcaagaaagtcatgatgaaatgaaatctgtagctaaggagaaagatgacctacagaggctgcaagaagttcttcaatctgaaagtgaccagctcaaagaaaacataaaagaaattgtagctaaagtaggtttcatctttcaccatgtttttaaaaaatattttgtaaccaaatattattataaaccctaaatatttggaaaggggagttaattacaacawaatagttataatgtttctataaatttattggaatttcctctaataataaagcacctggaaactgaagaggaacttaaagttgctcattgttgcctgaaagaacaagaggaaactattaatgagttaagagtgaatctttcagagaaggaaactgaaatatcaaccattcaaaagcagttagaagcaatcaatgataaattacagaacaaggtaaattggggatgaagaaacagtgggaggaaatgggtgggtttggagtagctaactgaattatgaagactactatttggcatgcttaattgttttgggaagcaaccttttcctcttaagttgtgtatgtgtgtgtgtgtgtttacatatttttatgactattaacttattttataattatgtttaagatccaagagatttatgagaaagaggaacaayttaatataaaacaaattagtgaggttcaggaaaaagtgaatgaactgaaacaattcaaggagcatcgcaaagccaaggattcagcactacaaagtatagaaagtaagatgctygagttgaccaacagacttcaagaamgtcaagaagaaatacaaattatgattaaggaaaaagaggaaatgaaaagagtacaggaggcccttcagatagagagagaccaactgaaagaaaacactaaagaaattgtagctaaagtaagttcccatcttattttttttttttttggatacagaaatagtgttaaggtgataatgacggtgttcatgttaagttttattaattttcctctaatcataaagggaccggaaataaaagaggaatcaaaaactgcttatattcaactgagtaccartaaactgttagtagacagaatatttcagagaagacagctcaagtagcaaatattcattgggatttaggaaattctgatggtgaattacaggaaaaagtgggacwtgttaaattggaaaatgacatctaattattgttactcatatcccttatgaaagaaagtactacatacattagattacaatgtaaaaatgattgccttattttaggaacagttcttccttttcctaaaaaaattctgcctatgttgtaacttactttataattttctcagatgaaagaatctcaagaaaaagaatatcagtttcttaagatgacagctgtcaatgagactcaggagaaaatgtgtgaaatagaacacttgaaggagcaatttgagacccagaagttaaacctggaaaacatagaaacggagaatataaggttgactcagatactacatgaaaaccttgaagaaatgagatctgtaacaaaagaaagagatgaccttaggagtgtggaggagactctcaaagtagagagagaccagctcaaggaaaaccttagagaaactataactagagtgagttaccatctctctacacctctagtaactatgacattgagtcctaagagaaaaatctgccatagggttggtgggagtataaaattggtccaggccgggcgcggtggctcgagccggtaatcccagcactttgggaggccagggcgggcagatcacgaggtcaggagatcaagaccatcctggctaacatggtgaaacgccatctctactaaaaacataaaaaattaggcaggcgtggtggtgggcgcctgtagtcccagctacttgggaggctgagacaggagaatggcgtgaacccaggaggcggaggttgcagtgagccaagatcgcaccactgcactccagcctgggcgacagagcaagactccatctcaaaaagtaaaataaaataaaaaataataaaataagataaaattggtccaatattgaggaaagttggtgagggtatatttggaaataccttccaaatttttccaaaggtttattcgttgatccacaagtccagttgtaactatcctccacacatttgcacaactgtataaagatatttgtaggatattctttgcaacaagttgcaataatgaaataacacaaacaaaaacagggaaaattctaaccatccattggtaagggactggttaaataagtgcagcacattcacgtcatggaattctatgccacaaataaaaaatgtggtagagctatagtgctgatttgaagggtgaagtgtcctgttagggaacagggtaagttcaggaatagtgtatctagaatgtattgacatctaaaagtagcttagagggtgagaactaggaggcctcagaagagggtggaagatttttacctcctgccctatacctttctatagcatgtggatggtactactctcaatgtattatttttatttttctattgataaaggacctagaaaaacaagaggagctaaaaattgttcacatgcatctgaaggagcaccaagaaactattgataaactaagagggattgtttcagagaaaacaaatgaaatatcaaatatgcaaaaggacttagaacactcaaatgatgccttaaaagcacaggtattttatttttaagttatctcagttactgagagtttgaatcaaactttttgtgtaatgaaacaagatatgaattaccctaaaattgaaggcaagtgaagacttacttgcctactcaatttagaaactatcattgatctttttatatctactgataatcctaacttattgtatgattatctcaagatccaagaacttcaggagaaagaacatcaacttcytttttttttttttttttttttttgagacagagtctcgctctgtcgcctggagtgcaacggcatgatctcggctcactgcaatgtctgcctcccgggttcaagcgattctcctgcctcaagtctcccaagtaactaggattacagatgcatgtcatcacacccagctaatttttgtatttttagtagagaggaggtttcaccgtgttgaccagggtggtctcgatctcctgacctcatgatccacccgcctcggcctcccaaagtgctgggattacaggcatgagccgccaggcccagcctcaacttcttaaagtaaaaaatgatcttagggaaactatgtatcaaacaggtcagttaaagaagcagttagaggcctggaatgtaactctggaaagtgtagaaacgcagaaattaagattgactcagaagcttcatgaaaaccttcaggatgtaagatttgttactaaggaaaatgatggcctaagaggagtagaggaaatctttaaaatggagcaagaccaacttagggaaggccttagagaaatagaagctaaagtaagctcattcctctccctggcaattcaatgtattgtgttcttacagcaatgaacccttctttgaaccaagtactactgttggcaagaatgaaatgatacagccttttaagcagataatttggtactgttcttgaaaagttcaagtctgcaattakcattttccttacggactttagcctacatatatactgttaaaggagtgtgtgtgtatatacaaacacaacgtatacatatgccacaggttawttattgtagtgattttaattaaaaatctgaaacaatctaaatgttcctcagaaggaaacagtaaatatgaacaatatatcgaaatactatgcaacacttaaaaaaagtaatatatgtgtaatgtgtttgcctctggaaagcagaagtagagtgtgaagagaggaggacagggaagagaaagcctgtaccttaaaaacaacagcaaagatatagagtaacagtgttattatttttactaagaaaatatatcactttattttttaaaaactaatattaagatatgtcactgtttttaaaatttctctaatgrtaaaggatctgaaaatacaagaggaactaagaattgctcacatgcatctgaaagagcagcaggaaactattgacaaactcagaggaattgtttctgagaagacagataaactatcaaatatgcaaaaagatttagaaaattcaaatgctaaattacaagaaaaggtatttttatggggggattgtttgattggatatctaatttgtttgtgcctaaaattgttggggatataaaatggttcaaccacactggaaaacaccttggcagtatttactaatgctggatgtagcctgcctgaggcccaacatttccacttcttgggtatgtacataagagaaaagagtacgtacatacttctataaaaagacacaagaatgtttatagcagccttattcaaaataacaaaaaactgaaaactcaaatgtctatcagcaggaaaatggatacatacattgtgatatataggttcaaaagcaggcaaaactgaaccaggatgataaaggtcagaatagtggctgtctctaggaaggagcacacagaaactttatgaagtgctagaaatattctctgttttaatctgggttgtagtttcatagatttacacctgtgtcaagaataattaagttatacattgaagatgagcatgctttatatatrttatacctcaaaagaaagtaaaattctgtgtggaattgtgcaggatatcagtgagagtaacatgggtagacagttgtcttaatcaatttagaaactattatttatctgtccctaaaaagccacctaacatattattttatgattatcttaagattcaagaacttaaggcaaatgaacatcaacttattacrttaaaaaaagatgtcaatgagacacagaaaaaagtgtctgaaatggagcaactaaagaaacaaataaaagaccaaagcttaactctgagtaaattagaaatagagaatttaaatttggctcagaaacttcatgaaaaccttgaagaaatgaaatctgtaatgaaagaaagagataatctaagaagagtagaggagacactcaaactggagagagaccaactcaaggaaascctgcaagaaaccaaagctagagtgagttgtgttctctctttaccctaccattatattcacatatttgggcaaaaatacagtgttcactgcagcgttgtgtctggtgactaaaacctagaaataatctaagtgtccaccaataataaggcactatctgtataatggaaaactaagcataagaatggggtattctttttgtgatattgatttagaaagatgtccaagtggtrtgaaaggagaaggctatgggtgaggctaccagcagaaaattttactttactcttctaatttaggaggttgtataatggttgtttttaactgtgagtgtataatttttaagattttgtttaaactcaatcattaagtaaaggtaacgtgcctttatatcattacatttcttgatttcttctaaccataaaggatctggaaatacaacaggamctaaaaactgctcgtatgctatcaaaagaacacaaagaaactgttgataaacttagagaaaaaatttcagaaaagacaattcaaatttcagacattcaraaggatttagataaatcaaaagatgaattacagaaaaaggtatgtgttgttttgttcttcttttggaaktaactgtgcccaaaattatttgtggaattaaraagatatagatacagatatgtagatagatatgtgcatatagaacacaagtagacactatttgccttccttgaagaaactgcttayattctaacttgttttacaattatctcaagatccaagaacttcagaaaaaagaacttcaactgcttagagtgaaagaagatgtcaatatgagtcataaaaaaattaatgaaatggaacagttgaagaagcaatttgaggcccaaaacttatctatgcaaagtgtgagaatggataacttccagttgactaagaaacttcatgaaagccttgaagaaataagaattgtagctaaagaaagagatgagctaaggaggataaaagaatctctcaaaatggaaagggaccaattcatagcaaccttaagggaaatgatagctagagtgagttcagagtcttcctttgtgtagtaactattaataagaattaagcttttttgaaaagaattacaatgtttttatttctttctctggaaattcctatgaacagtaaaggacagtgggaaatggttactctaatttttacacaatagaaaacagttttaaaaraagcaaaaatattttcagaaaataacatttaattctttatttttataaactgtgttaaagcagtctatttcccttaatataacattttaaagttttttttaatcaagagatagcattattctaaatggagaaatatttgaaggattagatttgtaagagagcaaatattcccatttctctacctatacatgctggagttctagagttgggctcttattggtgaagttaaaaggaaaaaagggaagataaatataaaaattaagttcctctggtatgactatttatagatattcagaatcatatatcttaaaatatctaattaaatcctctttttgaaagtaacagagttcagacaagtttattaaaatctgtaaaaatcttttttattctcatatttytttatgtgggcctgaactaaatttatagagagatttaattcattcatcaaatattcttctaggtactgtaktgaacaagataagtgggagaaaatgtttttgtttcactttatactttttaatcagaaatgcaaaatgtacacaggatatgaacttttccaaggtgctgggaagaatatatgactagggtttgaaacaccatagacagtacaggtggttttgccagtatatttggttggcgccaataaagtgcattaggataaaagcaagtgccactgttaaaactacaagtgaataatgcagagatttggaagagtaggaatcagaaattaaaatctaatttatttgttttcctggttgtttatttatttatttatttatttttataragacagggtctcactatgttgctgaggctggttttgagctcctgagctcaagtgatcctcctgcctcgatctcctaaagtgctaggattacaggcgtgagctaccatgcctggccctaaaacctaatttgtagctatgaaaaacaaatcctgtctccaaaaattagatgayttttctacttttttaccaatgagttaaggtcactccctataaaacttactgatactattattcattttctgatcattttaacattgcttttgagtgacaagtataatatttaattccattattgaaatgtcatgtaatttagaagtgtgcgattagacattatatgtgaatatagtcatgacaaaagccctgtttattttctttttaccaaagcaggaccgacagaaccaccaagtaaaacctgaaaaaaggttactaagtgatggacaacagcaccttayggaaagcctgagagaaaagtgctctagaataaaagtaagtaccccctgttaaaactacaaatgattattggttgtcttccaaaggcttaccgaaacctgaagtgggattgaaggaacctctggaataaatagatagtgctcagtatttttctaaacattgtaatctagtacaggtgtgtgggtataatgcatatatacacacatacacaaacaacaatgggagcttgtgaatttaagtcctcaccagaaaagtgatacytgagcaaatacctgaacgaggtaaagggtcaggccatacagatgtctgaaaagaccattataggcaaagggaacagcgagtacaaagttcctgaggcagaagactctgtggtggttcaaggaatatcgaaaagagggcaagctgctaatgaatgagatcagagagttagcagggaagaggcaagctgtgggacatgaaaaaagactgagttttattaagtgaggtggagatccattggggaatttttaccgcaagagaaacataatctgacttaacattttaaagggatgactcttaattgttatattgaaaatagagtggaagcaggaagaccattataaagactgatttcaatcacccaggcagagatcatcctggcctggcccagagagggagcaatagaggtagtgagaagtgttgagattctgaatatacattgaagggaaagccaacaggatttacagtcacacctgttggaatgcaagatctctaaggacatttttgttttgtttatgactacatcatttagcacattcctgacataagtcagtgttcaatatgctgctgtataccgtagttgattcatcctaaaaccaaaaacaggaatcccctctccaacattccagattgattaacatctagcttttcttaaattattaaaaataaagggctcattcttgtgagaayrcccttgttttattgtttagcagcctgaactaaacatgttacctactacatgattacagtaacttgaattttacatgtttctctacctgtgctctgaccagtgtgtcacctgcatagcctcaagtcacttgagtctatgggtccagatttattgcatgtctactgtatgccaggtaccatactgggtgctttacctcatgatataggctttattgctccattcataaacaaggaaactgccttcctcagaaaggaagtttagcagttgcccaaggttacacagctagtaaattgttagaatcagaattttaaactaagtcagacttgtatctgacttagttcaaaacttgggtatagaaacatgtttataaacataattttgtctccttcaagttaaatgactgtgtctgttttatagattacataggtatataggtatagatcatatattttacttgaccccagaaaactttgtggtaattattgtagtcttcctgttgttgtgaaaatggctcagtgacttccccagtcaagaagtggcagagctggaacctgaactctacctctgataaagggttagaaaacagattgtaggcagatagtaggattgtgtgaagtatctgtaccaagctgacaaataggtggtttgattcttaatcacttgttttatctgctaactcagactgcctactataaacataaaccagcmctcaaccatgaactacaatacatacttaattgaatttactcaaatttctcatcagactttgtcaatgttgattcatatcatggatattcaaaaaactaaaagaaaatgcatcaaaatgttaagaatggttggtcctggctttctttgttatatttgcttaaattttttaaattgccataataattatctattatttctgttatccaaaatgacaacaagagtttccttttgtttttagacacaaaggtctttatttctctcctacagaaaatgttaaagcataagttttgttacaattctagagttgtaactacttattgtgatattagaatgaattgttataaattgagtgaattctcatttcctttaggagcttttgaagagatactcagagatggatgatcattatgagtgcttgaatagattgtctcttgacttggagaaggaaattgaattccaaaaagagctttcaatgagagttaaagcaaacctctcacttccctatttacaaaccaaacacattgaaaaactttttactgcaaaccagagatgctccatggaattccacagaatcatgaagaaactgaaggtaccatcttttttagtaatatccttttaaatatttcagttataaacatyaatgtatttaagtcctgcttcaggtgccggcatatttgctatttagtattcttactaccaaattaaagattatgtgggtctgagcatagtaatatgtaggatatcagcaacacctgaactctgcctrtgggcctagacattatgtcaggatgttcaggaggcagatgtgagttaacatctcaaagatctcatagtctggggtgagacagacatataaacaagtattaagtgcaatgatagaagtgtatgcaagttatatgacgtactaaataaaattacagaagatgaaactgtagtagaagccagactcaataacaaagcttggagttctttttgtagatggggaatcattagactattgttttaagtggtggtggtaacaggatctgattaccacttaggtactaaactaaagaatacagaagaaatgagtttgagggagataagcctagtagcagaaagcaataagaggcagttacagtggtccagatgagatattatatgtgactgtactactagggagggtttcacagggctggagaggacaaacgagattaaagaaatatttagcagcttaaaatagtaggtcgaaataattgatagtggacataagggagagaagtttagatggagttcttggatttgggcttagtcaggtttgtcgatagtggtaccattaactgagattcaaaaataaaaaagaaagagaaacaaggtagatgaggcaggagattgtttaatttgagatgtttgggggctgaaatacctatgatggaacatccaagaagagaaaccaagtagacatttagatttgagtttgaggtttggcaggagaaaaataagaactaacatttgagactgatcagcatataggtgatagataatacatttgtaagatcatccagaaagcataatgaagactaagagccttgggataaaaacagaactctggaaaagataaatgtctaagaggcagtagcagaaaagggagcaacacatgggttcaaggttggaaaagtcaaagatacaggagagaamctagcaaaagtactgctacccaaatcagtggagaagagtatgtcaaagatgaagttatgagtggcaaatacttcagagagtcagaatatggactgaagatattctctcaatgtggtgataatagaactcattagtgatcattgtcagagaacagtttcaactgggtagttaaggaagagaccagattataagaggttaaggaatggtggaagttgaggaataagtaagctggtatctgccctacctgggtagattgcccttcgggccctggtaattcttccacaaatcctggtaatcagacatctagaattattcatgaagtccatgagacatttggcattgaaattattgtctcttgaagccaaatatctaaatatgcttgacaaggaagtcttttttttttttttttttttttttgagacggagtcttgctctgttgcccaggctggagtgcagtggtgygatgatctcggctcactgcaagctcygcctcccgggttcacgccattctcctgccacagcctccaagtagctgggactacaggcgcctgccaccacgcccagctaattttttgtatttttagtagagacagggtttcactgtgttagccaggatggtctcgaactcctgaccttgtgatctgcccacgtcagcctcccaaagtgctgggattacaggcatgagccaccatgtccggccgacaaggaagtcttgaggcatgtaacttcatctttttggttacccaatcagcgttggcaggagaggatgttgaaaatgagtctcatgagtttaactgggaaacctgggtgattggtaatgtaattagccaaaaactgggcaatagaaaaaggaggacttgtagagaaagggatcatgttacgttttaaacatgttgaatttgaagtacttgtaagacatccaagaagtatatctggtaagaagtcagaaataaggaattataggtctgggagttagttattctcctaagatactaagaggaaaaactggggatagagagaagctctttcccttttcctcacttgtgagaggatataggtaaataagagatgtcatcctacctcatagtctcaaggatgaaaactttctctacatgtgacaaaattttcatttaccaatttgtttaatttttttctgcaagtatgtgttaagctatgttacaaaaataaaagaagarcaacatgaatscatcaataaatttgaaatggattttattgatgaagtggaaaagcaaaaggaattgctaattaaaatacagcaccttcaacaagattgtgatgtaccatccagagaattaagggatctcaaattgaaccagaatatggatctacatattgaggtataatttattttaaatggatttagttagattttaagcctttttatcaagtagaaaggtactttttcatgtgcttagagctattttcatttaccagaaattaaaaatacgttgcagagtgatacctggccagacataaagactggcaaataatggactagcctcycttcagacctcaatagatacaggaaaacttatgtctatgctgggagtcagaaaccgctttattacaacaactccacatggaatgtgttacttgcattcatctatgtgaggctggcatccaattcccaacatgtatgtaaggtctgctatatgtactgaaaagctacatttagaagcacttcatgaagccagccccagtggcatgcctgtaattccagctacttaagaggctcaggcaggaggatcacttgactccaggggttcaagatcagcctgggcaacatagtgagaccatctcaaaaaataaaaattaagatgcacttcaggtattgtagcaattagtcacaaatttgtcattttgacaagctttaattctaataggtacaatctgttacatcatgtatactgccaaaattatattatgcaaataactagaataaagttttaacttacaattatatttcttagtttactttaaaatattaagaaatgatattaaaaggaagaaaagcaagagtccactaggtattgccctctttttwttttatatatatatatatatatatataaataaaatatttggatcaaaactttcctaatgtttaaacaatttgacgcttatttttcacacaggaaattctcaaagatttctcagaaagtgagttccctagcataaagactgaatttcaacaagtactaagtaataggaaagaaatgacacagtttttggaagagtggttaaatactcgttttgatatagaaaagcttaaaaatggcatccagaaagaaaatgataggatttgtcaagtgaataacttctttaataacagaataattgtaagtattactttttgctgtactacttttttgttgctgtttgctttaattgtcctacctcattcttaaaagggcaacttatgtatattttctttatttgtatatgctttaaaaaaattgatttgataaaacgtgttcttcctctaatgtattattcttccttatcaattcatactgatcaaggtaacgaaatcttgttgtataatatttagtttccacttgtgaaatcttgaatcctcttactattgtcctctttttcttctccttctcactgcttctgtaagaactgagccttttccacgagtagccttagagatcgtaagacatgagtctgtttcaagctatgggcagcaactgtggtaaagtcatakacaagcctggccagctactttagatgggcctcatgtgctytaataaacttttttttttaagagcagttttaggttcacagcaaaattgagcasaaagtacasagagttctcttataccccatctccacaaacacaatctcccctatcaacagcccacatcagggtggcacatttggcacaatcgatgaacctacattgatacatcattatcacccaagagagtccgtagcttacattagggttcacacttggcatagtacattctatgagttacaattgtaaaatgacatgtatccatcattacagtatcatacagagtaattttactatcctgccataaaaattccctgggttccacctgtattcatcacttcaccttcctaaaccctggcaactgttaatctttttactgtctccatagtagccccttttccagaatgtcatatgttggaatcatacagtatatagccttttcaggttgacaactttcacttagtaatatttatttacgttttstccatgtcttttcatggtttcatagcttatttctttttaatgctgaataatattccattgtgtgtatgtacctgtttatctacttacctaccaaaggatattttggtggcttgtatgttttggcaattatgaattcagctgctataaacatacatatgtatctttttgtgtggacatacattttcaactctcttgagtaaatatcaaggaatgcaatttctggatcatacagtaaaagtttgtttagttttgtaataaactgccagacagtcttccaaaggggcggtaccattttgcactcccaccagcaatgaataaaattcctgttgctccacattctcatcagcatttggtgttgtcagtttgggattttgaccattctagtaagtgtagtaagtgtagtatttgaccattctagtggtatctcattcagtttgcaattctctaataacatatgatgttgaacattttttatagttatttgtcatctgtgtatcttttctggtgaagtgtctgttcaggtctgttgcccttattttagtcaggttatttgttttctcattgttaaggtttaagaattgtttgtatactttgaatattggtcttttatcagatgtgtcttggaaatatattctaccaatctgtggcttgtcttctcactcccttggcattgtgtttcagagtgcagatttttaatgttaaaaaaaagtctagcttatcaattatttctttcatagattatgcctttgagtttgtatctaaaatatcaccaaacccaagatcatctagattttctcctatgctgtcttccatagtttttgttttacatttaaaccaatgatccatcttgagttaatttttctgaagttcttaaggtcttttttttttttttttcgcttgtagaagtccagattcagcacaattatattgtctttgctcctttgtcaatgatcatttgactatgtgggatctatttctgagctctctattctattccattgatctatttgttctttcatttatagcaaatctggaaactgctgatttttatagtaaatctggaagtcaagtaacatcagttctctgacgtcgttcttcagcattgtgttggttattctgggtcctttgcctctccatataaactttggaattagtttgtccctattcacagaataacttcctatggttttgttgggattgcttctaatttatagatggaaagaactgacatcttgacaatatcgtgtctttttatccatgaatatggaatatttctccatttatttgattcttttatttttttataagagtttggtagtttttctcatatagatcttgtacatatttgttagatttgcctatgtattttattttggggggtgctagtataaatggtaatgtatttttaatttcaaattacacttgtaaattgctggtatacaggaaagctattaactttcgtatattgactttttatcctgcaactttgcgatagttgcttatttagttccaggagtatttttgttgatgccttcagattttctatgtagatgatcatgtcatgtgtaaacaaagagagttttgttttatttcttctttacaaatttgtgtaccttgtattttctttacttgtcttatggcgttaatttggacttccagtacagtgttgaaaactagaggtgagaggggacatccttgccttgtttctgatcacagcaggaagacttctagttcctcatgattaactatgatgttagctgtagttttttgtagacattctttatcaagttgtagaggttcatctctattgctgagagttttaaattatgartgggtattggattttgacaaattttttctgcatccattgatatgatcatgtgatttttcttctttagcctatgtgatggaacattaattgatttttgaatgttaaaccagccttgcatacctgggataaatcccatttggtcatgtataatmatttttacacgtgattggatttgacttcctaatattttgttgagattttcacatctttttttacatctttgttttttattttattttattttattttttgagatggagtctcactctgtctcccaggctggagtgtaatggcacaatctcggcacacggcaacctctgcctcccaggttcaagcacttctcctgcctcagctgggattacacacacgcaccaccacgcctggctaatttttgtatttttagtagagacgggtttcaccatgttggtcaggctggtctcgaactcctgacctcgtgatccacccacctcggcctcccaaagtactgggattacaggcgtgaaccaccgcacccagcttttacatctctttttatgggagatactggtctgtagttttcttgtataatgtcatcatctggttttagtattagaataatgctgacatcatagaatgagtttcygtttctatcttctagaagagattgtaggttgtagagaatgggtatagttttttccttaaatttcttaaatatttggtagagttcaccattgaactcatctggacctggtgctttctgttttggaaagtttttaattactgactccatttctttgatagatataggcctaatcgaactgcctttyttgtgtattggtagattgtgtctttcaaagaattggtccatttcatttaaattatcaaawttgtgggttgttcataattgtgggttgtaataattgagttgttcctaatattttttaatgtccatgggctctatagtgatgtcctgtcatccatttctgatattagtaatttgtattctttttctttttcttagtttgcctagctagaggtttattaactttattgatcttttcaaagaaccagtttttaggatatttattttctctattgattttgtttcaatttcattgatttctacttttattatttcttctgcttactttggatttaatttgctcttcacttttagtttcctaaggttaaagcctcatttattggtttttaggtctttcctcttttctaatactggtattcaatgctataaattttcctctaaacactgcttttactgcatcccacagatactgataagtcatattttcattttcattgagttcaaaatacattttaatttctctttatttctcctgtgacccgtatgttatttagaaatgtattttttaaatctctaattatccagggatttttcagctgtttttgatttctagtttaattccattgtggtctgagagcagaatggtatgattggtccagaatgtggtctgtcttcacaaatattcaatgtgagtttgagaagaatatataatatgctgttgttggatgaagtagtcaatagatgtcaattgcatccagttgatagatggtactgttaaattcaaccatgtccttcctgatttttctgcctggtggatctgttcacttctgatagagaggcgttgaagtctccaactataataaattgatctatttctccttgtagttttatcagtttttgcctcaagtattttaatgcgtttttgttaggtgcatgcaaaataaaaattgttatgtcttcttggggtattgatgtctttatcactacgtaatgtccctttatccctgatagttttccttgctctgaactctgctatgtgtgaaattaatatcactacttcatctcttttgactagttttaacatggtgtatctttctccatccctttactttctaatctatgtgtccttatattgaagatgggtttcttgtagacaacatacagtcagctcttattttttgatctgctttgacagtcggtcttttaattggtgtatttagaccattgacgtttaaggtgattattgatataattggattaatatctaccatattgtttctgttttctattttttgcccttattctttgtacctatttttgtcttccacattttttctgccttttatgatttaaattattttatgattccattttctctgcttagcatacaactacacttctatcttgttttagtggttgctctagagtttgcaatatatccatttacaactaatctgagcccaatttcaaataacactttccacttcacagataatataagtaccttataataacaaaatatttataatttctccctcccatccattgtatcattgccgttattcatttcacttattcataagcatacataagttagctcagttaagaataagaaaataagtttttgttttaccttcacttattccttctcttgtgctcttcctttctttatgtagatctgagtttctggctatatcattttcctttcctctgaagaacttctttttaatatttcttgcaagaccagtctactgacagcaaattccctccatttttgtttgtctcagaaagtctttatttctactttacttttgaagaataattttacatggaatagaattataggttagtatgttttttcactccactgtcttctagcttgaatagcttcagagaagtcagatgtaattcttatcttcactcccctataggtatggtgttttttcccttctagcttcttcaaagatttttttttayctttgatttttctgaagtttgaatatgatatgcttagatgttgttttttgtttttgggggttttttttcgggggtttttttkgtttttttttttttttatatttgtcccgtttagcattatgagttttctggattcctggtttggtgtacgttgttaatctgtggaaattcttagtcgttattacttcaaatattcctgctctttctttttctgttcaccttctggtattcccattatgtatacattacaccttttataattactgcacacttctaggatgttgtttagggattttttcagtctttttactctttgcttttcagttttggaagtttccattgtcatatttccaagttgagtttctttcttcagccagtctgctaatgaactcttcaagggcattcttcgtttctcttaagagcatttttgatctctagcatttctttatttttttgctcaaaatttctatgtttcttcttacattgtttatttgttcttgcaagtcgtctgctttttccactaaggcccctagcatattaatccattttttttaaatttctggtctgataactctcatgttcctggcatttctgcctgtggttctgatgcttattcagtctcttcaaactgtgttttttgccctctagtatgtcttgtaattttttttgctgaaaagcaggcatgatttactgggtaaaagtaactgtagcaaataggcctttagtaatgtagtggcaaggtgtgtgtggtgggtggcaggcggagtatatttccctgccttcacatggaaggcaagagccagctgaaacttagtatttccccctcctccagatatattaggccctgayaaaaccccagcatgttaggctctggtgaaatagtttctgctgaggtcaggccttaagaaaaaaaaaatgctgtgttttgttttaaaatggttccttttctcctctcctgccagactcacaaagggatttctccaatattaactgtgatgacttggtagagctcctgaaggtaaaatacaaaagtgtggcggccactgtatgactaggtctccgaagtttttaactctcagagttgccacactgagctccartaattcatcattgcagttcaggttttcctaccccataactggttcctgcaaagggtttctgctctaagttgtaattctctgtatctgcctctctgcctctccagtttggggagcatccctttgccctgcgacctcacttctctgatggatctaagcagagttgtggatttttttcatttgttttgctttttccttgttaggtaactcctttttttttttttttttttttgagatggagtctcactctgtcacccaggctggagtgtgcagtggctcaatctcggctcactgcaacctccgcctcctgggttcaagcgattctcttgcctcagcctcccgagtaactgggactacaggcacgtgccaccactcccagctaatttttgtattttttttagtagagacggggtttcacctgttggccaggatgatctcaatctcttgacctcatgatctgcccgcctcggactgccagagtgctgggattacaggtgtgagccactgcacccgtcctggactggcaacttctaaacacctaaaatgctaaactagaaattccaaaattttgattttttttttaatcattgttcccaaggtgatcagcccaaatgtactgagtcataaggaccaacattgcttaagaccagtttgttaacttgttttacatttcagtgattggtatttggtgggtacaaaagtaattgcagtattcattctgctttcagaagtaatcccttctctgtttcattggtaaaacatgtaatattcaaaagattgcttatttatattaaattggagcaatggtagctagattaatattatagtttccaaaatacattttatagttcatatgtttggatagttcttttctgacaatttaatttcatctgcaaatcatattggaatcttgttgaaataaggaacaatgccttttttaaaaagttttcgcttggaaagttcatcctgtttattgattagtcagagctagccaaatagcagttggctatttcaagaaaaaacaaagaagtccacaatcagtagagaaaggcacaaaaccaatgtttggataaggtcatgtctatttgtaatttgttgtttttcttgtaatactggagacccagttgtgattagaaagcagggatttctactatgtggatcagcatgtatatgtggcttcttccagcacataagagtaggcattaataacttggtatggtgtgaggtgcatagtccagagccaaggagtgtccagggtgtcaggaacacgacgaatttaagatctggtagaatgaccacaaagcctggtagaatgaccacaaagccacaaagaagttagggatgagactaatggggcattcatgatgagagcagaaagtmcaatctgcaggaattaggaagtaaaaaagatatcaataatttcagagttagttagccttcartatraaagagtattgttattccctgtacagaaatacaagatattcagattaattaccaacaatcagtgagttattttccctattaacattgaggtttgtaatgaagcaggacaatagataattgttaagtttctagctgtgctctgctattagatatcagttaatgtttcattatcagccatagcatatataatgattttaacctggataattcttcaggttctcttcatatgttagtacaaatctaataaagtgagattatcatcttgcagatcaatatgaatcctctctagtcattattcattttattgtcatcatccacatccaacatctgaaatttcagaaactgatgcamactacaaagaatgttcacattcttttaaagtactgttttagaatgtkctaaataatgaacttcagcatatacactgtcctagaattctagggttttttgaagtttttttaaaatatgtatatcaagacccyccacccccgaggggatgccatggatggtaccaaaccctatgtattctgttttttctatacatccatacctatgataaagtttaatttataaattagacacagtaagagattagtaacaacagctaataaaatagaacaattttaacaatatactatagtaaaagttatatgaatgtggactctctcaaaatatcttattttactgcactctcctttcttatgatgtgagatgatacagtgcctacctgataagatgaaggaatatgaatgacctagacattttgatatagtcttagactactattgaccttctgtattcctgaatccatgaataaatcttacttgcagtaaagggcttggtgtcacttttttcaggggatcccttgctgaagtcttcctagatgctcaatgcttgctggtacaacacattgtcatcaactggaacacatttctgttcttgtcttctaccacaaatttaatgccttttctagcttaactaagcacttatcacacactattgtaggctgaagtgctacagcaaaaacagcacaaatttctcttcccttcttcacaattccacggataaaagattcattctaaccatagatcttagcaacctcaatatatgattttttttcttattaagttgagaacttttaccttctcacttacaagaagcacttgacagcttcacggtggcatatctaaattgccagcattactactcttgtgctttggggccattattaattaaaataagggttacttggacacaagtactgcaatacagcagcaatcrgataatcagggtggctatcaagtgaacaagtagtgtatgctggacaagaggatgatttacatcccaggcaggactgagcaggatgactcaaaatttcactgtgctactcagaatgatgtgcaattcaaaacctgtgaattgtttatttctggaatttcccatttaatattttcagaccacttttgactgagggtaactgaaaccatggaaaataaaattgcaggtaagtggggactactataaatcgttttagagctataatggtattttactgttcaataggccataatgaatgaatcaacagagtttgaggaaagaagtgctaccatatccaaagagtgggaacaggacctgaaatcactgaaagagaaaaatgaaaaactatttaaaaactaccaaacattgaagacttccttggcatctggtgcccaggttaatcctaccacacaagacaataagaatcctcatgttacatcaagagctacacagttaaccacagaggtatataatttcttataaaatgttcttcagtttgcagcttcatcacagagtttagagcaaaattatagtatttacttattactgaacatgaacacatttatttttgtaagtgatgggcttgatttttactagtagttctactatggctatcgttcaactaaactaattataaagctagacattatgtaagatattattataaaacataaattgtagcttcatttgattattacattcataaactatagtttaagttactaccagttaacgtacaattaccacaaaagttttccaaattatgtgactttctgttgaactgtgatctatgtccgtatgcagaacaaatattagcttggagagaaatagcaattcagcttttctcattatcatcagcgtatttaatattgcttaatgttataatcacaataaaaatataagaggttaaaaaatataacaagattgttacgcaggttaacttgtatctaagaaccagtacattatttgataaccaaattaccttattaactacccttactcgggaatctaacaacatgcgtaaaatgttgtattttgttagcacacaaaacgacttgtagggaacccaatagtaaattacaatttatcatttttaccaaaataaatacttataataaaacatcaaccaccagcttaatgagaactagatcactagtatacagtgttttgatttgtagggcattacagacctcagtcagctgctacagataaaatagaggaaagatgaaatccatytaccaatatagtaatttaaagaagcaaaaggaaagttggtcaatcttcaatgaccaaagaaaatagtctagcagataataaaatacatgctactatcattagacaagtttgatgcaaaaatggacaagtagagcagtggaacagaatagagggttcagaaatatacccaattaagtatgagaatttagtacaggtgtatgataacagtaacattcaattcagtgggaaaaaaaaatggtttacttkgccaggtgtgtgagtctgtaatcccagtactttgggaggccaaggttggaggattacttgagcctaggagtttaagataagcttggacaacatagtgagaccctgtctctacaaaaaaaaaagtgtttttttaatatattatccaggtgcagtgacatccacctgtggtctcagctatgtgggaggcttagctgggaggattacttgagcctgggagatcratactgcagtgagccatgatcatgccactgcacaccagcctaggcaacagagtgaggcactgcctcaaaaaaaaaaaaaaaaagaaagaaagaaaagatggtttgcttagtgcattattttgatacaacaggatagccatctggaaaaaagtaaggctggattcctatctcattcattaaacaaaaatgaattctaaatgggcccccaaaaatccagacattttgccaaaaacaaaaaagagtgtgtacatgtgaattatatgatacctttatgaaatgagattctatatgtccatgaaaacaaaaaataggagagatctatgtgttgataatggaaagatctggaaaaaatatgttctcaagttttaaaataaagcagaactatatttagtatattgtgtgtatactatttttagaaactatatattcatgtatatttggttatagatagaaaatttctggaaggatacacctgaaaaagtttagtagtcatcgcttcagggtcaactgggggtctgagatggggagacttactcttcattatatgtctttgaatttttttccacatatttgtgtttttctatttaagattaataagggtgggcatggtggttcatgcctttaatcccagcactttgggaggccaaggcaggcagatcacctgaggtcaggaattcaatacyagcctggccaacgtggtgaaaccccgtctctactaaaagtacaaaaattagctaggcgtggtggcacacacctgtagtcccagctactcgggaggctgaggcaggacaatcgcttgaatccaggaggtggaggttgcagtgagtcgagattgcgccactgcattccagcctgggcaacagagcaagaytccatctcaaaaaaaaaaaattaataaaattaaagggaaagatawatatatattactttagagagtcaattamccaatgtcctttgtttaagtggtgttcatgtaaaatatgagygcctatttaatatgcttagcactatgctaactaatawatcgcataaccactgtgctgtttttaactgcatgttttaagaatttgcagacagattataatataaacctttgacattttcaatccaaaaatcatcatctaaatgagggaaataacatgtctgtagattgaatgatgtttggcctctcttctatccattgttaatrcaatctgtgaaaaattaacaatatctaaatatgatcatctctgtctcaaatttmtatactgtgattctgtcttgatgatagagcttatgaatgtgtgctttttctaatagaaaattcgagagctggaaaattcactgcatgaagctaaagaaagtgctatgcataaggaaagcaagattataaagatgcagaaagaacttgaggtgactaatgacataatagcaaaacttcaagccaaagttcatgaatcaaataaatgccttgaaaaaacaaaagagacaattcaagtacttcaggtaacttaaacrtaaaaataaaagttgtttgtttgtttgtttgtttaacctattgaattcagcaaatctccttgtgctctattcttccctctcacaacaacttactgttacctatgtgtttctgaagttcagtactcaagcagaagcagcttaacttagaagtgaaatgtaggagcatattgtcatataaaatattatttttattatgttggaagaataatttttaagatatacatgttgtttatagtttagtgtatattttttcatttttcaaaaattgcttatcaaaatatataatactattagataagtaaatttttaaattctttttttcctacttactgcctctgttactgagtcccacctgatatcccatgggctgaatctgacctgttttggggggaagaaccgtaactgaaatgtttttcaacttgaatgtcattagacaaatcacacactcattaatcactacttacagctccctcttgttttagttccagccacttcccacatttcttctactcgagtctgatccaaattggcatatttaaatttgctgttctgctccagtgtcttttctctccagttaaaattaggaacacgtcaagaatgcctgctttattcattatttmacattgttctaaaaattctggtctattcagtgagacatgagcagagaggcaaaagaaaaaattaaatttgttttttcaacaattgttatagctagaaactaaaaaaattcaactgtaaagttttagaatgttgtaattttttaatattacaaataattgatcacagtttttattcattcaacaaatatttgctgagcaccagctatgtgtcactcrctgttctagaggccaatgaaaaaacaaagaccatgccatcaaggaacttacattctagttgaaggagacagaatattaattaaaaatgtaaaacatagaaggtatatttttatatatgttatatatattaagaggtatattatatctcaagtggtgaaaagtgaaatggaaaaaattaagccagacaagggggtacatggttctgggtgaaagtggacatgtgtgggaagagagatgattgtatatacaggagttgaggaatgtcacaccagtaagatgatctgaaggatgtgatagggtgaactgtgtagccagggagaaatattccaggcaaaggaaatagcaaactgaaaacaacaagaaagtttgtgcatccagagcagaataagcaagaggatagaggtagaaaataaggtgagaagtagcagaggaccagatcataaaggccctgtaagctattttaagaactctcatttctattctgggagagatggaaacaaaggcttctcaatgggaaaaggatagtctgaycaactaatgatgccagacaactgaacatccacaagcaaaaaaagacaaagaacttatacttttcacaaaaattaactcaaaatagatcataggcatacatgtaaaatgcaaaactagaaaactccaagaagatgacataggagaagttctaagtgaccttgggtttggcgattttttaagatataatacaagaagtgcaatccataaagaaaaaaactggtaagttggattttattgagacttaaacttctgctttacaaaagacaytgtcaggagaatcaagagaagccacagactggcagaaactgtatataaaagataaatctggtgaaggaatgttatacaaaatatacaaagaactcttaaaaccaacaataggaaacaaccaatcaatcttaaaattggcaaaagacccagatgacaaataaccatatgaacagatgcttcatatcatatgtcatcagagaatcacaaattaaaataatcgaccattacaaacctaccagaatagccaaaatccaaaacattgacaccaccaaatgctggtgtgtggagcaacaagaattctcattaattgctagtggaaatgcaaaatggtacagccattttggaagatggtttcgcagtttcttacaaaactaagcatacttgtatgattgagcagttgtattccttggtatttactcagatgagctgagaatatatgtgcacacaaagggctgcatgtgtatgttaatagcagctgtgttcataattgctaagactgtctttcagtgggtaaatggataaactggtacattcatacagtggaatagtattcagcaattaaaagaaatgagagggctgggcgcagtggctcatgcctgtaatcccaacactttgggaggctgaggcgggcggatcacctgagatcaggatttcaagaccagcctccccaacatggcaaacactgtctttactaaaaatacaaaaaagtagccaggcatggtggtaagcacctgtaatcccagctactcaggggactgaggcaggagaatcgcttgaacccgggaggcgaaggttgcagtgagccgagatcgcaccactgcaccccagcctaggtgacagagcaaaactctgtcttaaaaaaaaaaaaaaaaaaaaaaaggaaagaaaatgagtggacttttaatacacattggttagtgaaagaagccaatctggaaaggctacatactgtatgatttcaagtatatgacatttttagaaagacaaaactacagagacagtaaaaaaataaacagttgccagggataatggagaagagagggatgaataggcaaagcacggggttttttaggacagtgaaactattctgtatgatactgtaatgatggacatgtgccattttacatttgtcaaaacccacagaatgtacaatacaaataaactgtcatggaaattatagattttaataataatgtatcaatattcatcacttataacaaatgcagcatactaatgcatgatgttaatatggggaaaaaggaataggggacactgggtatgtaggaactcccagtattttccattccatttttctggaaacctgctgctgtaaaatatagtgttttgaatcactggatggaactgtttcagtacaaaatatacttagtaatgctttgttttgtggcttaaatttagttctagtttgatgtttacatcactgctccaacatctttttgtttcattttctgatttacctttttccacccttttcattatttccaacttttttcattttgtaggtattttcaattagaaaaaaaatatttattttaagaaataaaaatcatgtttctaattgcatattatgatagctccaaataaaaaatcatgtttctaattgcatattagcttcaaatagacttcatatcaatatctagttattcagttaaaattgatgctttttcatatatttggaattgtttgctattttaaaatgtccttattagagcaaagacagctaaccattctttacaactggagaaactgaagcgcctctaataattatttttattttctctaaaaaaaatttaggacaaagttgctttaggagctaagccatataaagaagaaattgaagatctcaaaatgaagcttgtgaaaatagacctagagaaaatgaaaaatgccaaagaatttgaaaaggagtacgtatttgtcttaatttaatgtgattttaatagcttaaattttcttcctaaactacatatacttttcattagttaactttttaaaatataatttatgaaaatattgttacagctctttttttaaaaatgtacacatccatagattttaaatatactggtctcattacatatgcaaagtttttaaaactaaacacaattctgatcaattaacacgctgtgtctttgaacacttcttagtcatacagaatataaacaattttaagtggcttttgtatgcctgaaagtgaacattaagagtgtgtgtgtgtgtgtgtgtgtgtgtatttagcagttttactaaggyttctgttggttctcttaatttcatttgttggccttactgtgtttctgtgtgaagattatatttccttttagtttatagttccctagggcccaagagcaaatcctctttttattgatttatttataggtagcattatacataacagcatgcctaaattctttgtggtatagcataatgaaaagaacattaaagagagtcaaggaaactgaagtagaaatacgttctcaatcccagcactttgggagggctacacgggcaaatcacgaggtcaggagatagagaccatcctggctaacacggtgaaaccccgcctctactaaaaataccaaaaaaattagccggcatggtggcaggcgcctgtagtcccagctacttgggaggctgaggcaggagaatggtgtgaacccgggaggcggagcttgcagtgagccgagatcgcaccactgcactccagcctgggcgacagagtgagactccatctcaaaaaaaaaaaaaaaaagaaatatgttctcacttactaatgcatcaccttacactgtttattctctctggtcstcgcattcataatcaataaggaaaggtttatttagaggatttgttaggatgcttcctggcttttaacacttttcattcttcctatataaatcttgaataaatatttaatgatctcttattttgcccaggaagtagcattggaattttcatgctctctaagcagtctattggtttcagtgaaacatagatctattagattcttaattataaaaacaattttacttgtagaatagggtcagcagggccgggcacggtggctcacgcctgtgatcccagcactttgggaggctgaggcaggcagatcacctgaggtcaggaatttgagaccagtctggccaacatggtgaaaccccgtctctactaaaagtacaaaaattagccaggcgtggtggcaggtgcctgtaatcccagctactcaggaggctgaggcaggagaatcgcttgagctcaggaggcagaggttgcagtgagctgagatagcgccattgcactccagcctgggggacaagaccaagacttcgtctcaaaaaaaaaaagaaaagaaaagtaaagaatagggtcagcagatacagataattcatagtcattaagaaaggcagaaagtcttataatttatcgttactgattaatgcgtaaactaacaactcataaaatgtctctttctrctggagaacagtgatcagaatttgacctttgtagcaccttagaccagagctgcagtcagggtttgctttcctgaccatacagaaataaagctgcactttctctttcatgctccttataccttcaaatatttctaggaccccatggtaaaaaataattaggtaattataattttgttcaatatacaatgaattaggcctccagaagctttaaaagaactggggtttctcaatataagaaaatcggactgtccctgcacccaagcagaatgcttctagtttgatggcattaatgccataaggcacatggcaccagagaggtatcacgagggcttatctactgccacttacaggcattatgtcaatgtgatgtgttagaaaatccttcacagcagttctgtttattctcctgtaaaaaatcagttgctgagctttttacatatttttattgtttttgttagaatcagtgctacaaaagccactgtagaatatcaaaaggaagttataaggctattgagagaaaatctcagaagaagtcaacaggcccaagatacctcaggtaagtagaaaatgcagatattttcagatgaaattttacttctcaacacacaacagactttgaagactaatattatgtagtatgtgacagtcgagagtaaacagaagttggccactaatctatttttaaatgaatttattggaaccatatttccagatatcttgtgacatcgtttgttgtaatcttagatgcttatccattatagattcttgaaaaatacgaactctgcttttgtattgtcaaatctttacctattagtgaagataccttcaggcaataaaggaatgacttatactatatcaacatggaattatgcttcccaataaaacgaaacacatgtcttcgtagattttaattgtatgcatctaataagttataattggtgtacagtaaaaataaatactattctgtttgttcttgaaactaaaaataccaagttaatatttacttgcaaaggtctttgaaatttatctgagatactttttagatctgttggtcaaatttctcaatatacatgcattcctcaaactacctttattcatattctgtctgtcatgttccatttgaaaagaaagaatgcttgaacagtacttgagatagctttacgcagtagaacaagtactgaastaagatgcagatctcaatggctatatgaaatcgtggggttagcacctgaccttctaacttataagcatatatgtatgcttatatatatacttattataagtatatatacacttataagtatatatacacttattatacatatataagtatacataataaatatataagtatatatagtataagtgtataatatataagtaatatatctattacttctttattacttacatgagtaatatataagtaatataaaatatatattacttatatattatatattatatataagttatatattatatataatatatattataatatatataagtataacatatataagtaatatataagttatatattatatataagtaatatgtaagtaayatatataagtaatatataagtatatatagtaaatacttatataattagaagtattatacttataagtctatagaagtatatatacgagtatatgtacttatatactcatacatacttttttacaggagaataaacagaactgctgtgaaggattttctaatatatacatatatatgtatacacttatatatacttataagtatatatacacatatacttaaaagtatatatatacacttatatacttataagtatatatacacttatatacttataagtatatatacacttatatacttataagtatatatacacatatacttataagtatatatatacacttatatatacacttatatacttataagtatatatatacacttatatacttataagtatatatatacacttatatacttataagtatatatatacacttatatacttataagtatatatatacacttatatacttataagtatatatgtacacttatatacttataagtatatatatacacttatatacttataagtatatatatacacttatatacttataagtatatatatacacttatatacttataagtatatatatacacttatatacttataagtatatatatacacttatatacttataagtatatatatacacttatatacttataagtatatatatacacttatatacttataagtatatatatacacttatatacttataagtatatatatacacttatatacttataagtatatatatacacttatatatacttacaagtatatatgcagacttatatatacttataagtatatatccacttatatatacttacaagtatatatacagacttatatatacttataagtatgtatacatttataagtatatatacatacatacacatatatacttataagtgtatatatgtatatgtatatgtgtatatatacatgtatacataagtatacttagtatatataagtatatatgtatagatatgtatatataagtatatgtatgtataagtatataagtatatacatatatatgtaagtgtatatttgtgcgtgcacatgtatatatgtgtatatacttacatatatatacttatatataagtgtatatatatatacacttataagtatatagtacaagcaaatatcttatgttttgcttagtatttggaattttcaatatgcaatatatattatatataatacttatatatttacagaatatatagaattctgtatattatatgttacaggatacatataagtgtatacacatatatatgcatgtgcacacatatatatagttatgctcacacatatatatggacatggtatatgcacatattttttgcaggtagtaacacttcagtcatggggaaagtaatttttagagctcatgtaataagtgtcttttttaaaaaagtgtatatacatatacacttatttatatacatgcacackcacacacaygtacataaagatcaaaycgaaagttgtgggtaaaaacacattgaaaattccaaatactaagcaaaacataagatgatatttgcttgtattatagtccacttgtttccaaaaatagatggtgctaaaggtgttaaggtgttacctagtacctgttgtagcttaaacttccctagtgtctgttacaggataaccacagcacctaccgagaaaacttaaaggggtaaaaatagaagtgaggattctttgtttcagaaggttgaggatatttattcttgatttgtagatgactttcaggtacatagtgtagatgaattcaaaataaaatagacatcaagaatcacccccaacacacacactatccctcttttgtgaattcccagtgacctaatggattaatccacttcataactatctcacattttgtgcaactttgcctacaatttacaaaacacagtctctttacacacatagtgtagaatatttaatatgtgctttaatattattgtaacatatatttagttaataatatgtattgaatacatataatgcactgaatgacggggtggccctcccaccctacctcacctccccgccacacacgcagtgtgttgtaacaagcccttcaggggaaaactgatgtagaaaatatagatcaataaaggacagcagtaagtggagaggattgctattgctgcagtcagggtgaaagagcttggtgatcaggatcaggatatgttagtggaattggttgagggggattytagaggcatagaattaatggttggtcaaataagcagagggagtaaggtagaaggcagaagtcaagggtgacttccagggaaataagacttgagctgtttgggtytctataatggcttattgtacttggtagtatttcctttattttgaactttggagacaattaaaattatcacctatttgtatattttcctcccacagtgatatcagaacatactgatcctcagccttcaaataaacccttaacttgtggaggtggcagcggcattgtacaaaacacaaaagctcttattttgaaaagtgaacatataaggctagaaaaagaaatttctaagttaaagcagcaaaatgaacagctaataaaacaaaagaatgaattgttaaggtaagatctgcttacatgatacggatattatgcttacggctattacatatatgtagggacatggtatatgcacgtattttttgcaggtggtaacacttcagtcattatggggaaagtaatttttagagctcaggtaataagtatcttttttaaaaaatgagaatatggtagcactattccaatgtttgctgtctatcaactgaccaattcttaaccaaggcaagaaataggaaagaaacaaagacctttgagggggcagctgaaatacaccacaagtccatatacccaagccagtgaggctttacttagagaggaactccttacgtccattattgtaggctttttactttataaacagatctaacaaattattcggcttctaccacgtggaagagtagaatcttttccccaagcactctactatgatacagtagaaaaaaaagcgttaaataattttacaaataactaactctgccatgagtgctattaaaaaagaaacaaaaacaaaaaggacattataaaagggttatattatgaaagagagmgatccaacgttatctaggtgttaggggtggagggttggttgatcaggaagccaacaaacaggcatacctcgttttattgcacttatctttctactatacacactgggaacccaaaagatttccgcgattcactttatttcagtgatctggaaacaaacctgcaatatctccaaggtatgcctatatcagaatagatatgaaaaatgagtaggaattaggctagatgagggaagaaggataagttttccaggccaggggaacatgttcacgggctttgagttaagaagaataactaattggtgggactgaaagacatccagtgtggccagaatgtagagaatgagacagagtaaagtgcaagacaaggtgccagaggtaactagattcagattacatgggcccttatagttcattttgaagaatatggagtggtatcctaaatgtaatggcaggattacctgcactggagggttttaagctagtggcctgatgagatcatatagcatctttggctgctagagcattatagagggatcaaattttagaatgtgtttatggtagttcagacaaaaagtaattttagcatggactagcttggccccaatagggataaaaacaaggaagtgaatttgatagataggatgagaktgtatcaagagacttggatgacttaaaataaaagagagtgaggtctctaggattgcttcccaggtttctctccggaggaactggataaatgctggtggcatctcctgtaagaagcagcattgtaactagaaaagcacagtgtaatatttattttacagtaagaaaggtacatcaaagattcatctatccaggagactaatttrtcaaattattgtggcaaagcatcaatagataagccactctggattatatcattgattcatttgaaaacctaatgttgtacttagagctttcttttcaagactccatgatcatggaaacttactatattattcaatttatatagatccattttgttttctgaactttgaaaatagtcaaaacaggaagcatgaggttgaaattaaaatgtaaatgtgataaaatgtacattttatgttatatatatttcatcacaatttatttttaatttttaaatataaatgtgaatacatcttaagaatcaagaagtcttacagtctctcttttcttcccccacatttaagcaataatcagcatctttccaatgaggtcaaaacttggaaggaaagaacccttaaaagagaggctcacaaacaagtaacttgtgagaattctccaaagtctcctaaagtgactggaacagcttctaaaaagaaacaaattacaccctctcaatgcaaggaacggaatttacaagatcctgtgccaaaggaatcaccaaaatcttgtttttttgatagccgatcaaagtctttaccatcacctcatccagttcgctattttgataactcaagtttaggcctttgtccaggtaagtaaatatactggttacttggaaatcagagggtaacagttggaacttatcattaatatgtgatcccaaagggcaagtttagataagagatgatttagttgagtaagctacaatgacaggcttcatttgctgactctgtaagaaagttgatttctccaaggcaccccacacagtgaagtgcaattcacttttaccccaagtgaagtctttagtctaccctttaagcctttagtttcgtccaaagagagacaagcaactttctcaaggacatgaagatactaccctaaaaagcaacttttactgaaaagtcttatcaattcaatggaccaaaatatccaatagcattatatttactttacccaagccagataatagatgaatcatttacttattcatttattcagtcaataaaattgttttgagcccctactatgtgttaaggattagatcctggtggcacattgataagcaaaaccagacatgatccctgccttcatagagcttaattctcatggaagatacagacagtaatcaagtgattaaaaaaaaaaaaaagtgaaattatagcagtgcaagtacaaaagactatgagaaatataataagtatttgaggagtattgaggaaggaaacagatcagatctaaaaggttaacatgagttatcttaataaagagcagagggaaaaacatctcaggcagatggaacagcaacagcgttagggtaggtgggaacatgaccaggggaagagttgaaagaaatatggtgtggtcagagcacagtgagtacaagcttgtgtgggtgaagtcagtgaggccaaagagagaaataagagccagaaatgctggacttttataaattatataaaggaattgtttcatttattgtgtagaggaagcctttgaaagatcttaagcaatggcaggagaacatgagttatacattttgaaaacatcacctcgtctctaaggtgaccagcaaataataggagcaggagttagactgttgtctaaacaagacatgatggtagtgtggacttggagtagagaaggagagaagtagaccgacgggagagattttggagtaaaatcagcaacaccaggcacctgattgaacaaaggagtggggaggtatcaaggatcacccccagctctgcatggaggttgtccacagaagtggggggacttgcaggagaaacggtaacacggcatttcttgtagtctttctcaccacatagcatctactgtgcacagccctttgtgacagtgtgtctgcctaccctaccagaggtaccctgttatgcaactgtagaaatctaaagcaacaaaattgtacagtaagaaaggcagttgccaaatcatttaaaaccttgagcactatttgccagagtttataaacctctactttgtgattaagaaaaaatctatccattctcatcaactacatcaaaattagatcaagttgacagtctaaaagtgttcttagggagataggtaggcacagaaacatttggaataaaaacatgtttgaaatattctcttcattaaatagtatttaacaaacatttaaggaccttctattggctagctaacacttgcatggaactctctcactatgttgcccaaactggccttgaactcctaggctcaagcaatcctcctaagcatcaaggactacaggtgcatgctagctaccacacccagctgtaatcaccttttgattttgtctgctagtgccagaggcatatgcataatgtgaattcatcaaactgcaaataaaaatgtttgagtccttttttaatatgtggatctctctggtactgtttttagataaataaaagagtagcctagaagaatacataaatcaaaaactgaccaattcagaattaaatgagatagtcccagcttgaattaataccagtctttaaaaaaataaatgtgagtttttacttttaattataaaaggtaatctaaattaccttaaactaaggtaattgccaagaccagttatggtagatttacttttataaatataataattgtaaaataaatattgtttataagcaaatagatgcagctaaagtcctttttaaaggctcacagaaagctttccaaagatgattaaatattctctaaaatactatttgtttagcacaccatttattttgaaaaacaggacaaaagaaaactcaatcagcccgtgtttgattcactttgaatttcaaattgaagaattccaaataaaactttattacctctcagtttaactatggtttgtctaatagttcattttaggacaaaatggggagtaaacttctccaactctgaggtgaaatacaccatcttcatgaccaaacacggtgaatcacgttgccatttttcattcttcacatctctcctgtcttaacctcctttccacttccagctgtgcttggtttttgtgtatttttgtaataggatgaatgttgttttcattttctttctcagaggtgcaaaatgcaggagcagagagtgtggattctcagccaggtccttggcacgcctcctcaggcaaggatgtgcctgagtgcaaaactcagtagactcctctttgtcacttctctggagatccagcattccttatttggaaatgactttgtttatgtgtctatccctggtaatgatgttgtagtgcagcttaatttcaattcagtctttactttgccactagagttgaaagataagggaacaggaaatgaatgcattgtggtaatttagaatggtgatagcaataccttcttcttgcatatggtaatacttttaaaagttgaattgttttatttatttgtatattttgtaaagaataaagttattgaaagaaatgtaaagttatctacatgacttagcatattccaaagcataatacatacattaatataaaacatcattttattaacaaaattgtaaatgtttttaataccttacacattcaataaatgtttagtagttctgaatcaccgctcttctatataatgttaatggtttcttggtgaggtagtctctcttgttgactcagtattttgctatgaaaatatacacaagttttctggatctggatttaaattcttaaaggatagcagaggctatgtcctcttaactttccagttctaatattccttttactgtaataaccacagaagttctttctcacatttctggtaacctacctatcccaatccctatacaaactctctaaattggttggtttattatagactttgtttttcattgcccctcactcccagcctggaggaacctatagatcatttattctacctcttcattgtagacataaggaaacagtaccagagtttttatcaaagtaaagttttctaaacctggagtccccacagatagataaagcatatatggatrgacttcttgtaatctgtaaaatttttgaaattttttatgaacttttttgtgtggatttatttggggggaggggatactggggtttatactttgttttatcatattcttagaggggcccgtgatcctgtaaaaatctaagaactatggttttagaggatatttgatattacttttataccatatgactttgaaaaaccacttaaaacaagttgcattaggttatagaacagaggtaaagtgatttcaagtcattctcggctctttggtaagattcattcaaagggagagattattgattgcatcatatctagtatttcaaagtctgtggattggatatttctccgtatcttaacataccaccaaaggaattaacaaagactaaggggaaactatcccttcctaaaatcttttcccccagacctgtaccttgagagtctgtcttctgctttccacccttatccaaacaaaacactaacatgcctgcaggtttgattctttatgtctgcttctccactgaacaaaagtaacccaaagtagtggttgtttacctgattgataaaactacattaaagccattaaaaatctagttgtcaggtagccagcctagtagaatattgcttaacttttgaatttgggtgtccattttattcctcaaatttgggaagtttgtggccattatttcttcaaataagctctgtcccttttgctgccaccattatcccacacccttaatatccccacacatttttctcagatttctgcttatataagttagaaaactcaagtggttcttttgattgtgatgcagctcctcatgggccacactttgtacctcacattagggatctgctgggacttgagtctagttataggtctaggagcatagaggggtggtgggggtaggtcctgaggagaatcagcattgtcttgcttggcagctgcctcaggggaggccattattatttcctcaggcaatgcagggttaacccttcagacaaaggtggaaaggccattaccaaccccaatraggttggagaggccactacagctggtaaaaaaaaaaactcatcagaatgtaggaactggccaggcatggtggctcacacctgtaatcccagcactttgggaggctgaggtgtgggactcttgagcctagcagttcgtgaccagcctgggcaacatagtgaaaccccgtctctacaaaaaatacaaaaattagcctggcatggtggcttatggccatagtctcagctactcgggggtgctgaggtgggaggatcacttgagccctggaagtcaacgttgtagtgagccgagatcatgccattgcactccaacctggccaacagggtgaaactgaaaaaaaaaaaaaaaaaaaaaaactcaatgttcctggcttcagggtcttcccacacgtccccatcccaacttatagaatctcactctcccagtcactgtggcttattttaccagtagacacactgaggccttttgtaattgcaccaatcaaatgatgaagactggtgtttgattttcagcaattttagcctcatgtctacaggagagaagatcctctttcagggcacgcctataagctcttaggttacttatgtggagcttgagccatgaatttgaatccctgaagtcatcctttttttttttaaataattttgcccaacaatattagaagcaaccaaccaacattggtatatttcttagttttccataaatatttgaaagtattatagggccgggcacagtggctcacacctgtaatcccagcacttagggaggctgaggcaggcggatcacaaggtcaagagtttgagaccagcgtggccaacatggtgaaaccccgtctctactagaatacaaaaattagccaggcatggtggtgtgtgcctgtaatcccagctattcgagaggctgaggcagaagaatcgcttgaacccaggaggcagaggttgcagtgagccgagatcatgccactgcactccagcctgggcgacagagcaagactctgtctcggaaaaaaaaaaaaaagtattatatatagagtcacttaagttcctcacctctaagaagtggttgattaggagtatccaatgcagacattttgcatacctctatgaacagttcatttcttggacaatcagtgctctctgtactattaaaaggagagccaggctgggcgcagtgactcatccctgtaatctcaacactttgggaaactgaggcaggaggagcacttgagaccaggagtttgagaccagcctaggctacatactgagacctcatctctaccaaaaaaaaacaatttggagggctgaggcaggaggatggcctgagcccaggtattcaaggctacagtcagctatgatggtgccactgcactccaacctgttcaagagtgtgaccccatctcaaagagtagagcctttagcattttcaaatctaatcagactaagagccaattccaggaaccccaaaaccaactcaggaaactcatccttaaaattttgttcctctagaacctctcctgttaccaaaatctgtcttaggattttccagagagacagaaccaatagaatatacacagatggtcaccaacttgtcatggttcaacttgagatttttcaactttagggatggtgtgagagcgatacgcattcagtgaaaactttactttgaattctgatctcttcayaagatagcaatactctactgtgatcatgggcagtggcggcaagacacagctctcagtcagccacgggatcacgagtaaacaactgacactgttcagtgtactctgttcaataaatcccatgagtcagtcaacaccttgttataaaacaggctttgtattaaatgattttatccaactgtaggctaacaagtgttctgagcacatttaagtaggctcggctaagctctatgttcagtgaattaggtatattaaatacattttcaactgacaatrttttcaatttacaatgggcttattgggatgtaaccccmctgaagcttgaggaaaaaaaaaaawatatatatatatatatatgcrgagagagagagagaggatgtttattaggggaattggtttacacaattagggaggctgagaagtcccaccataggctgtctgcaagctggagagccagggaaactaggagcgtggctcagtccaagtctgaaggcctgagaatctggtcggagttcaggtatccaagggcaggagaagatggatgtcccagttccggaagagagagaattcaccttttctctgcctttttgttttatctgggccctcagccaattggatagtgcctgcccacattgggtgaagtagatccttacccagttcactgattccaatgccgatctcttccagaaacactcagagatgtcccagaaataatgcttaccagctctctggggatccgtaaatccagtcaagttgacacctaaaattaattatcacaaacattgtcttgagagcctggcagaattatattcaggaaacttattaagaaactgccattcactcagcaaatatttaatgagcatctactatctgccaattactgttttaggcactgaaaggcactaccaatgtggaactcatattgtagataagaaaacaagtaactaatactcttttaatacgagctaatcacaatgtaaaggtgtaaaacatagtccccacccttgaagaaatttagtctgctgagaatactaatgggtaagcaagtatttgcaataccatgtgacttaggctgttatcaagtaagcattgttgctgaagattacagagggatgctgaagaaagctacatcaagaagcattggagttggctttgattagagaactctcataaagtctgttccaaaagcctcaaaagtcaaagggcattattagtaaagcaggaacaaagctagatgtgattacagattgttagagccagcattagaagttgctgaaacaatgaacaaggagggacaattttaccatagacctcatatagacacatgcagaaactaagtccagtttttaaaagaacattaaaaagcgcaacttttaccatccattataattaaatttctccaacaatgtcttcatcataagaatcactaacatgtattaagcacctgtgtggcaaacattgtgctgatggattcacaggcttagtcgttcctcctcaccacatccctgaggtaggtgctattttaccttcattttacagawgagaaacataagaggttcagagatttaagtgatttactcacttagctagtgagagagagatatgggacttgctctagtcttactgacgccacagtctttgttcttatcccctgtgactgttagaaatcacttagctccatgtaacaaaaaacgtgaaaaacactaaagtttattgtcctcacataagaagtycagaggagttgttgccttgaggctgtcatcagggccgcaggctccttctcttgctggtccctgtcgttaatgtgtgcctctggcctcagatgaactcactaaatggctgctctgtcccacggcatcctatcttcattccaggcaaaaagaaagggaggagcaaaagctaaaagcctttcagaagggcttacttttctatttaagaaggaggccctcctcagaaattcccacctgcatttcattggcaacatctatgctgcttggccacccctagcagcaaacaaggctatgaagtagagacttttgttttccagctttgacaagtgaaaaaaggggaaagtgagttggatgggtgctgaggaaaccaatttatacagtacatgtacaagtagcctacacaatcactctgctcactggcactacagataaagcacatgttgctatcctaacctagagggctcatgagatctagtcctytctttttgaccttatatctctgttctcttcagccaaactggggtttttcgctgttaacatgttcccttttaagcctccaccctgtcatccaagtttcacgttctccccaaccccattcccagtgtagtaaaaggctcctggcattctgccactaaatgtgcattagtgttagaatattctgagcatgaaaaaataaaaatcacaactgtatctcaaacaaaaaggatttttttttttatttctctcccttaaaacaatccaggccaagtgacaggaaggctccagaattttcagtgacctgggttccctctattttgttgctctgctatcttccacacgcagtttccagctcagccaatctcgtctaccctggcaccgcatatagtaggcataaacaaaacagagaagtggagagactgaagtgaaggaaatgatttccgcatcctaagtaagctctaaggtgcttttccacttttcaccttccacttggaattcatagttctacctgaattccactagatggcagcacatacatttataaagtgtatggatggagccactaaactctgaaagcagggaaactacaaatcccagcatgcattattaagcgcttgacttgcttccagacaaaggttgtctcaagtttgttgctcaaaccgagttctggag

SEQ ID NO: 9938 - DNA, 117431 bp, Homo sapiens
tgatgctcctccatcagtctaactacctgtattttttccatagcaattatcatagtttgtaatgctatatttaattgtatgcttattggattagattgcttttcattgttctcaccaggatgtatgctacctggtagtaaggcctacacctagaacaatgcctataatatagcaataacccttgaaatattttttagtgaatgaatgaatggataaatgaagtggctaagctataactggaaaacatttaattgccctgatctaaaaaattataaaatattatttcatgcataaaaaattatatataatacatacggatattttaagcataacaataaaataaacactcatgttacatcaattcaaaaggtaacacattacctatgccctctgtgtgtccctccctgatcacgtcttaatcctagagctaaacaataggttgcattttgtgtgtatcattcctcttctttttttggtcattttaaccaagtatagatattatatattattgtttcagaatattgtgtcaatggtgtcatatgtagataaactttggcaatttgcatttgttgttcaacatgtttctgagatttgtcttcactgaattatgtagttgtggtatattttcactgacagttttccattgattgagtaaaatgcaattagtgaaagtatttaaatgtccgtaaatgtttgagttctttccaggcctttgctattgcaatatgtactgctatgaaatttcttgtgcatagctcttcgtgcaaatgtgcaagagtttctctagtgttttacaagttaatgccaaattattttccaaagtggttgcaccagtttacactccacaagcagtatgtaagtctgcctcttgacatttgcgaaacatttgatgtgatcagatgtttaaaattttgcctgtttgatgggtgtgtaaatttgcctttccacttttattagtgagggttgagcttaattattattaaggttatgttaattattcttaattaaggattattgagattgagctccttttcatattgatgattcttctgtaaaatcactgcctgtttatatattttgcccatttttctatttagttgtcttctgattttttcgaagttcttgattctggacagtaattcttctatgattaattggttgtcaatatgttttcccagtttatagtttgtcttgtcatggtctttgtggtattttttgataaatacaagttcttaattttaaagtagttagagttttttcttttttcgagatagggtctgactctgtcacccaggctggagttaaagtagtttgatttatcgatcttttattttatggcttatgctttggttttaagaamattttccctattcagatgtcataaaatgactctcatattttcttccaaaagtttgaaagatttgcctttcatatttcagctttttattcacctaaaattgttttttgtgtatgatataattgtattagtttcctatggctgctataactaattaccaccaacctagcagcttaaaacaacataratttattatcttacagttatggaagctagaagtctgaaatagttttcactgggctaaaatcaagatgtcagcagagctgcattcctagaggagaatttttaagttttttttttttttccaagttctatagggtgctggcttatggccccatttyatattgaaagccagcagtcagccaggtgtggtagctcatgcctgtaatcccagcactttgggaggctgaggttgtccttgagtctaggagttccagatcaccctgggcaacatggtgagatctcgttccaacaacgacaacaacaaaaattagctggcacacagctgtagtcctagttactcaggaggctgaggcaggaggatcacttgaacctggaaggtcaagggtggagtgagattctagctcaaaaaaaaaaaaagtggctggttgcatccttgcatggcatcactctgacactgaacttctgcttccctttttcacgtagaaggtcccttgtgattacaccgagcccacggaggtaaacgaggataatctccctacttcaatatccttaaattagttgcatcaaaatcctttaggccatgtaaggtaacatgcccatatgttcagggaattaggatgtggacgtctttggggaaacattattttgcttcccattataatcaattgattcagcacaacttcttgactctgttctgaacctgggttcagagggacactggtctggtgacaatgataatagtaacaacaaacacttgtgccaagaatgtttctaagcattgtatgcatattatctcatttaattttcacaacactttgtactaagtgctactattattcctagcttagcgatgagtgaagtgaggagcagagaggtgaaatactttgctgaagatagggagcagcagagtttgactcaaccccaagtacctgagcttcgaagtccatgtgcttagttagcaccatgctatttttttttttaattttattttttgacagggtctcattctgtcgctcaggcaagagtgtagtgatgcaatcttgacctcctgggctccagtgatcctcctgcctcagcctcccaagtagctgtgactacaggtgtgcaccaccatacctagctaattttgttattttttgtagagacgctatattgccagggctggtcttgagcccctgggctcaagcaatcctcccacctcagcctccctagtagctgtgactacaggtgtgtgctaccacgctcggctaatttttgtattttttgtagagacagggtttcaccatgttgcccaggctggtctcgaactcctgagctcaagcaatccacttgcctcagcctcctaaagtgttgagattacaggcgtgagacactgtgcccggcctaccatgctatttttaaatgaataaacaaagtggataaatctagtttcagttagctgtgtgttcatgactaagtcacataaattctctgagcctcaatttcattatttgtaaaattagaatagtgatgcagcttttctgcattccacagggatgatttgagggcacgttgagacaacatgcatgaaagcagttcagataaggaaaacagagatccaagagtcattctgccacatgtcactggcagagccaggacagggactcaggtttcctggcagccaggctgggcaggctacttccaccacagagtggtaattagagcagttacaaattccagtcatcaaattgaacattttcccttcatcaccctcctgccctggaacggccaacattaaagccgtatctgtatattcaatcaattgttcattaagaacgccctccagttttagaagatactgttacaaaatccaaatgtgagataatacttcttagctggaacagggtaaagttgacaggtaatattttgtatcatttacaaatcaaaaggcagagaatttcagaaattgacagaaaggggaggctgtaagatatctgcttaagaaaaccacctcctcatgtgtttgcctcttttccatcctcatcctatgtttctgtcctcttctacttcccttcacttttccttagtaaagcagggattagaaaacctgaattttagctgtgggcatcattattgaccattttgctttgaatttcaaaggcaaaattgaagaacaaaagagccaagagtgggagattcactctaccagatcttaggatgtataattaagccacagcaataaaatcagcacagcactagcataggaacagatctagatcaatagaatagccacaagagctcagagacagacgtgtgtgtctctagggacttggcatacgatacagacgccatcatgcatctgaggggaaaagatggattgtttggtgggtgctgctgggaaaactggctcactaaatagagttaataatactgtattcctgctcaaactgtatgcaaggtgaaccccaggtggattaagacctgtgacaggtaaaagtatgaagccaactaggggaaaatgtaggagaatattttgcgactaacaggtgggaaaagattcttaaacaagaccccaagaccacactgcacaaggctaaaatttgatgcattaggctaaatgaaaattaaggatttctcctccattgcagcatagcaaagaccaagcaaacaggatgcatgaaagattgagagaaatatttgcagtgtttttctaaaactgacaaaagattaatatttagaacatataagaaactcaactgcttcaattcattcagaaaaaataataaaatccagcagaaaataggtaaaggatgtaaatagataattcacagaaggaaaacaatctcgatggttcttaagtatatggaaaaatggttaacaccaccaatcaaaaaaatacaaatcgaaattacaatgtgatactactttactgatttcagattgacataaattaggacatcggataataccaaatgttagcatataaaatgggaaacgggtaccttcctaccttcatgtgccattggtgggtgtgaatggcaaagccatctggaggccaacatgacagagtgaaaccaaacactgtggacttcatgacccagcgactcaatttcttatgttctgtaagggacacgtctaacatccattccagcatggtctgtggtagtaaggaactgctggcgacctaactagccgttatttgaggaattgataagtagaatatgatagacacacaaatcaaatattattattagtcattattaatgaactcttgttgtatagtgtcacatggatagatctctaagacactgagagaaaaacaaggaacagaatgagttctcatcacaatgccgttcatatatgttaaaaacagacacaaaccatgtatcttttgaggctgtatacggtgcatgaactgggacataccttaatagaggagagggtgcatatggcgggtagaagaatgggtgtggagaaggaacgagtaaaaaataaaaacaaaaaagaaaagggccttgctgactgacgagctgaacagtacgaacttgtccccaaggtccaaaaaaatcgccccaatcccccttccatctcgtcccattcttaacagaaccaagtgcaagggactcagcgtggctgtccagagcagggcttttcttcatcaaggacctaggtcctcttccttccacccacctcgccacgccctcggtgcccgagccccgagctstacttcgacggcacttttcaaacacaaccaaacacasccaggcttcaaccccggaccggcttgcttttattatttctcttgggaaagccttatcggtcgctaagattcagtttaagtgactcttctctgggaggccttttccgaatgctgcccttgaccaaaagccagcccctccagggctgtattcccacagccccctcccccgtcagccgggcaccccgcgtcctaactgcttattttgggcactcagcgctcccctcagggctggagttgtgctggggggggtctctgggttcacggcccgccagctggggtgggcggtcctgggaataactggacagttaagtcagcaggtacagccgcagcccagccagctccctctcctctgcttccgctctcattggctcagcctccccgccccccagcccccgccccccagcccccctccccagcgcccgcccccagcgcccgccctcagccggctgcgggaggcaaaaggctctgcgcacgcgctgtggggtggggcacacttggttgggggcggacgggggwttaggagracggcgaggagcgggcgcagaagggtggcggggccgccgggtcgttgcgcggcagttgcgtccggcctcttgcgcgcggcgcccgggaaggggcggggccgaggcgggcaaggtggcgggcccccgcccctggccccgcccccgcagcccgcccgcgagcctcgccccgcctcctcgccgggcccgccccgccccctcgccgggccgtgctcttgctcccgccgcctggcagcctcacgctcggctccagcggccaagagccggagaaagtcctgctggtgggcggccgcggggctgagggcgtccggcatcccggggccgctccggcccgggcggcgagagtgcccggcggtccatgcatccgccgccgcccgccgccgcgatggatttcagtcagaacagcctgttcggttacatggaggacctgcaggagctcaccatcatcgagaggccggtccgccggagcctcaaggtgcgccccggggagaggacctgccctcacggcgtccggccgcctgccccgcgcggtcccgcgctgatctctgccccacgccaccaccctcccctcctccgggccgccgggaccctctcagtcgggccggcccctcctcctccacccctcttgccgtgtcgccctaagccagttccctctcggacccttcctcagagcggaccgggtcctctctagtctggacccccatccccaagggacgggtccctgccccagccccggaccggcgccagccccgcggcccttgcccctcctgaggcgtccgaatccccccggcccacccccaggaacggccgagctccagccctcggggcagccccagcgtcctccgtcgcggacccccttccttccgccccccccccccaaaggagctgcccctcgaggccgcagcccacttctccccggtcctctcctgggctccccaacctctggtccgctgacgccgcccgggttctggccccaggcccacccatcggtccacacattcccaactcctccccccacctctcccggagacaccaccccgcgtcccgtcccctcacccccagcccaagtcagatcaagctcgggtccttctgccctcgaggtagcccggcctcccctcgcttcccagccagcactctttctcagtgtcgtcctggtccctgtctacaagccctcgcgaccctttgccgccatcctgagtcaccgctcatcctttcctcccatcccctccaggactgtagctgggacccagctccccaatccccttgagggggtcaagcttcagcttgctccccccacccctactggctctcccaccccgcagagtcatcttcctcccggcggctccaacctttagcgccagcaaacctagtttacggaccggacccctttcccctggccattgcttaattagctgccttagckcctctcactcccacctgccgcaatatctcaaatctctggtttttttccagccccggagtttatttccttccctcccccactccagatcttgtccttttcatgcctactcggctgcagtcttcatccatctcccttttagcatttcttggggtggaaaatgctggagaaatagccttgaagtattagagataaaaagtgtgtgtattcgttttataacatgcgtatgaaatggatttcagccaaggttctgaagccacgatgtgattttcaagctgcagtccaggagctagaaggataaaaacagaaaaatacagccccctccccaaactccccaaaccacccaattagagacctccgtgattgatgtcgcctggtatcctcagctccttgattagttttcattgttaatgcttaattgtgaaactttttcattcgtttatcctcatagagggtcactgggaggttggggggcaagactgaaccaatatttgtggtgcataaatgtgtattttacccttgacagacaccggaagaaatagaaagattgacrgtcgatgaagacctcagtgatattgaaagggctgtttatctgctcaggtatttcctagtctttctgtgaaattgctcttcttttttccctgtgcagcagagatgaatgctttctaaaatgtatgttcgcgttatgttcagatttacttagccacttgaacagagtacttttgtgtgcatagtacttaactatattataaattagatttggctatggacttatgactttgagaatttaaataaaatacctaatttatagaatgttgcttggaggagcaagagcagatggttggagttgaacctcatcctttttttcttttctggctttggtttttctcgcgtaagattcagtaagtttacatgagacttgagtatacagtgattagttttaagttcattgtagagtaggaacattatacgggatctactatacggaaaaaaatccacaaatatggtagttcattttgctgttcaggatatcctgtttgtattacttttgccgtgcaagctttatgattttgtctgaggggttttagaaatttggtygagcctactgtcatttcaatttcaaaccatctcacaggctctacagaattgcttaaggcaaatggttattgcaaatatttacaagatttttctgaactatttaaaacattgtcttgtagattgagcatcttaaaaactaatacagtgaacatgaatgatgttttaattaattgattaaaatcctttagaaacaaatttcctacagcattttgcgtttatttaaaattgttcattagcttacacaacatatttttcccttttggcaaattagtcactctttttttttccagaatcaggttttgaaaactgatgtaatttacctcctaggatatttgtcacccttgtttccttagttcagcgccagtttcaggtactggcaagtttctcgttctcctttcttgtttacagatcatgttccagtcccatgttactcattgaatgattctgtaaaaaaaaaaaatccctctccaggtcttcaattttcttaattacttttttagccttctaaaagtggcatcatgagtttctgttgtaactttagtcagaatatcagcatatttaccatgtagaccattccctctgataattgtatcatttagaaatgtttctgcatcttagactttatgttgatgttattttcccccctctttggggtatctgtggtagcatgctctcatcatttctatttacttcaaagaaaacttctatttatgtgtgaattcaacggtatgtgttttgggtgtttacttagagaataatccaacttttaacccattttcatattgtgttatatttggaatactttattccttaacaattaacatgtttattatgatgaacaatagatgtcaacatttgccttttcccacagttcttttactcaaagtaggtagaaaattgatgaaagtgtggacaaatgtgttttaatctacaacagttaatgatttgaaataaactcctgtttattcctactgaattcttttctttagtataaacactggcttagaattaggaaatggagagtcttgctctatttacttgtgatagaagacaccgtattctaaatatcagtgataaggcttctttttaaggaaagcttatttgttttctattttgcttttattgtttgttagcaaactaggttgtctgagttgtctttatttctcagactcaacatcagtttcgctcagttctggaatttacaaagcccttaaagagacagatgggccctctcattcttggacaagagaattttaaaagagattcaatatctcctttagtttcttgtggctcacctaccttgaaggaggtttgcaaggtgactcacaaggggaacactggtttggttatgtatggattctccaactgagttcttcttttgtatccctaccatcttaccacctcctgggggaatgtgggatttcaccttagtccagctttgggagggatgatgccaagaatgcctgaragggtctttcttccctgggattcaggggaggggacaggattgtttcatagagatgttctgaactttgcctctgtttaggccttctcatcttctctcatgtattgagcctgctattgtagatgtaatttattcctttttttctagtttgtactttgctgagtccttttttccgtctgtcattgattttcaggtttatttttgagcactttaccttttcctctgcattgaatattatataaatgtataatatataacatgttatatatatattttctctctrcttttatgtgtcaggtttgtttctttagttcttttattttgtgtattgaaactattttggagtattatgttaaattagaattcaaagtcagatgtgtaagcatcagtaagcaatgctttatattagtggggttctgatagcatttagattgaatccagtatctgaaaaaagcattttatatatagagtactgtcatcgataaaaaacaaattatactgttcattgtcttaccctgaaatatgacatgtcagttattaatgacattttcacaattaagtttagaatattacagtcttcaaagatttgacacagatgaatttgtggttttgcatacgtgcgatactgatatacccatctgtggcatttagcactgaagcaaaacaactttcctaatagtcacagcttgtgtcttagtcaaaatcatatcttatctttttcctgttttttctcttctttgtgattttgcgtatatttttggaatgtacttaaaacatgtgagtgattttattatagaagaatcctaagtatgtatactgtgctttcattaggtaaatctttacttgtatatttctgattgtctaccagataaagtgtagaccctgaaggctggcattcagaatactccataggtgactctatcttagctgtgcaatgtgatgtcccaccagtccctcacttttaaaaatggctttactgagatataattcatagtccttgtagttcacccatttaaactgtacagttaagtgagttttagtatattcacagaattgtgcaaccatcactgcaatcaattttagaacatttycatcacccccaaaagaaaccttgtactattagcagttgctcctcagtaccaaccctctcagcctttgggaaccactattctgctttctgtatctatggatttgcctattctggagattcctaaacacggaatcatacagtatatggccttttgtgactgacttctttcacttagcataakgtgttcaaggttcacccatgttgtagcagctatcagtagtttattcctttttattgcagtgtagtattctacwgtatggatatagcgcttttgtttagccattcatcagttgatggatattgggttgtttccacttaattcttcactttttgattcagtcatgctggccttttcactgttactcagtttcattgtgtttatccttaatttttgcttttcctcatcctggagtactctttcaatatatccttatccaacatacaccatctctaggatccagctgtaatcttacatctttcataaagtcttctctaactgcttaaaccacatggatcccaggcttctttgagctccgttatcacttagtggcgctttcttcaattggccattaatcactgatttacattccttaactgtgtgtgcatgttttcttcagtagattgtaaggtcctggaggacaagcttttagaggacaagggcaagctttcttgttgttgttctttcttgttcttcgctgtgatataaatatatgcctcttaatggaataaagagtatttaagatgaccatactgccagatgaattaaggaaytgatatttttgattttaggtattatgagtcatatcttgttccacaatttattatctatgtgacagtggtgaagttagttatggttttcgagccctgcttttcatttgtaaagtggaaataatcattcccttttcccagtgtggttgaagcacctggcacataataggcatcccgttactgttaattcccttctgtctccttttccctttccctacttccttgctacttaggtgctcaagttacatttaaaactttaaaagaggataatggtattaattttgccttccaataatttaataaacggacaaagtataccaactgaagtttgtgatagatatccattaacttcgtttgctaatagtatttatcagaaattagaatcttcacaaatcataattaagcatttttaactgagtaatagtaaggtcagcctgttgatttatattttcttaccaaatgaccctaagtaatatttgctattatgcattaaatgtattgattggttaatgtactgagactagcttttatgttgcttacttttaaagtcacttgtgactttaaaaatatttttcactttgtgctgtgacttttaaagcattttgaactttgctttcccagggcagtcagataaagagctttgcttttttttttttttttttcttttttcttttttaaagacagggtctcactgtgtttcccaggctggagtgcagtggctattmacaggcacggtcacagtgctctaactcctgggctaaaatgatcctcccacctcagctttctgaatagctgggactacagaaggcacacaccacctccacagccactgcccccgatcataaagtgcatctttatttggaacttttttttttaactttctcttcctattttttaaagagtaagtgctccccctagtgatatgaaagagtgagatttctgcagtcaaatcagtggaaataaacaagtgttgtaccatgtgagaactctggcgtacttcttcttgggttmaagactaggatagggtagcaatgagacagtaaggaagaactccagtgattaaagctttgctacycacctagcttttggttgtttttcttttaaaatacctatcttatttgctatcccaaagtggaaagttgtgtgaaaaactcctttgaatgccctcctttttatgacgtgtgtccccacatttactttcattattgtcttgatttctgtttttgatgcttgcttcctttcagtattgttttagtgaggcatggtttgtgtgtgtgtgtatgtgtgtgtgtgagagagagaaararagaggaagagagagagatcacatttgtgttgtgcatgcatgtgtatatgtgtatataggtggtcttgagtgaccagtattgcttgctcagttttctttagtgatacacaggagaggacttttgcattcttcacaattaagatagatagttggttagttaatacaaacaattggctagaatcataaaatcacaaatgttacatattttcaacatcaaattttaatgtaaactataaatatattttcatttgccaatcttttgatgtgaagtcatgatcttttctttgagtatgggtctgctgattaaagtttgaaattctccttctttcataaatcaccccataatgcatttacaatatcaagttcagttttctttaaagttgaacaagaatttaaatttgcttatgaagcagtctgaaagcatggttctaggtttttatgattttctacttgtgttttaaaagttttgttcttccatactttagtagcaattttctttgacaacttatgtttattgaatttagtttttctaaaacttttaacttaatttgatagaaacaaatatatgtgttcatatatttaggtaatatttaattaaattatgtaattgcaacagcaagtgaaatttgaaataaactagtttgagaacatacttagctgactcttaattacaactcaattagtgagagtggaattctgtgggctttccagagagtagcctattagcgacgagctttcagcttgcagttgcaagggagtagagagtattgcttaatcaggtcttttaacatcttgtcacatctcaaacayctttgtttgagagagatacataccatctcctttccaagtgtgctctgtgatgatcttgcttcattcttgatattcctctcctgtctctctgttgtatttgttcccatggtctggtttgttctttgtttgcctttatagatttaaaaaagtaatgaatttggaatatcagttaaagaagtactttcataagcttatattttattttttaacgcgaactttgaatgtatgcagaaatgtgcacaaatcataatacagcttgttgaattttcacaagtgaacacacccatgtacccagtatccagrttaaagcatagaacattatcatgttagcttagtagcttcctttgtattcctgtcccagtgccctgtacttcctgcaaagggtagctactctactgacttctaacactatacattgatttacctgattttgcactttatatagtaggaagcactctgtgtaccttttgtgtatagctgcttttgctcaatattttaaaaaagagatttatccatattgttgcatggagcaacagattgttcattctcattgctgtatactattccattatgtgaatataccacaatttattcattccactgctgatggacatttggcttagttttcagtttggggcttttatgaataatgctgttataatcattcatgtacaagtctcttggtgaatacatgtgtgcatttcttttaggtatcattatagaagccgaattgttggtcatagcatatgcctatgtccagcttaaaagatattgctaaacagttttccagtgtgctttgaccagtttgtacttctgccagcagtgtctgagtggtcccagcctatatatttttaggaaacaaaagtgacaaacttctagtacataatttctagcatatcaataatgaacttcctagttaatagcctttagatgtttcgtttctctgtgcatgacttacaccatctaactttttttctttccctacaagaaggggagttctataaggttttacttggctacactgttggttagaagactctcagttattagattgtctcttaggagatgaggcatgttgtgtgattagtttttcttagaaaaagagaaacaaagtggatattggagtctacctgcttatgggagtgctattctcagtccctgtgcttttaatgattctaagaggtcctcattaaaaaaattgcccacgttgtcatcctctgtgaagatgatgtacaaatgacttgcctttctacatggaaattgcaggcatcttcatttgtattttttaggacagagggatcactgtttaatatattaagagcagtatataatggattccagctgtataccttccattattgctaaggccaaattactgaagtctttggcaaaccttgaattccctgttttggaaaagtackaggtctgtgaatataaagggtttggagattgtttcccatctctgtttccttgtcttttgttatgagaacaaccatgggaggcatctgtgtcttttttcctacttaccaaacactcagaaaggtttctttgtgacatctgtagaaagcagaatgctctcatgggatctataggaaaagcttgaaaataaaaagtgaaatattttcatcaatgtaaaagtgacccatataatgtcattgaaaagacctctgaaagcgtaataacataatgtgatgtgagagaattgagcaaagttttcatcttgtaagcatagtgttttattactttaaaaaagcctatacaattctgtagtacaaaataatttcataatatagaataataaaatacattaaaattaatctataaaataagataatatataaagcaatataaaataaatgagtatacatatttgaataatgtgtcaagttatgtaactatcaatgtaatcatattataacatatgtatatcataaatgtatatgcatgtgtgtgtatatgtttattttcatgagcaattaattcatcccaacgctccctcttgagaagtagctaagtgagacacagggacataggaagattgagttctatcataaattataactaattagttcccagtaaaaagtgggagttgtactgcttggttcccagtcttgtaatgttgaattgtgcagtagtttcttagtattgacattaagaattagagggctcaccataccaagtggtaaaattcatagctttcttttttttttgagacacggtcttgctctgttcccaggctggagtgcagtggtgcgatcacagctcacaataaccttgaacttctgggctcaagtgttcctcctgcctcaacctcctgagtagctgagactacagsmactagccaccatgcctagctaattaagttttttttgtagagttaggrgtcttgctctattgcccagtcttgtcttgaactcctggcctcaagtgatccacctgcctcaaccccgcaaggtgctgggattataggtatgagtcaccaggcctgtcttccttcttaaaattaagattgcatgaagggaattaaagcactgaataaggtccaatgaacttttaaatctgtacgtctttcagtttgatattttgggtattatagtgtctttcattgactatgttggctatcaaatgtggaaagcatagagaaagtgtttagggttcttcatagtcatcacttttggcttatccttatactggtataatattggtatatggtaatcatgttagtaataattacaaaatctattatacccttagaatgtaattttccctccaatcagaaatgttaataatggaaaagatttgtaatgcaactaatagttgctttacagtatcttattaatttaagttaaaacatatatctgagtacttatgtgctaggcatctcctggggaatgaaggtcattatactagcagatacttgtattcaaggagatagtttaaggaagsaaatgcatttttcttaaatttcagtagaatagaggttatccccaattaacaggtactgggagtcagtgtgttgtattggaaatagtttaagacagacccagatttattcttggaggctgaggcttgctcatttacttactgagagaccttgggtaagttgcttatcttctgtgagcccaagtyccctaatgtaaaatgggaataaataggctgggcatagtggctttcacacttgtaatcccagcagtttgagaggtcaaggcaggaagatcagttgagcccaggaattcgagactagcctgggcaatatagcgagaccctgtctctacaaaaaaatttaagaaattatccaggaatggtggcttgtgcctgttttttggctacctgggaggctgaggtgggaggatcgcttgcgctcaggagtttgagcctgcaggaagccacgagtgtgccactgaactccagcctgggcaacagtgtgagaccctgtctcaaaacaaacaaaaaaaataaaatgaaaataataatatcttcattgcaggattgttgagaagatgagaggaaatgtatgtatagggcacagtgcttggtacagggtagtgttcagtaaaggatagttgttgctgcccttttaaatcatctgtttgggattaggaacatattttactttggatatataggaaacatcccatttggaaacatcccatttagaaacttcttgtgttacaaagtttcctctctagatcagttttctagattgggcaccaaattcccccatctccatttttggaaaataactttattgaagtataatttaaataaactaagtttatagtttgatgagttttgacaaatgggtacacctgtgtaactagcacaaamtatagaacattttcatcacccccacaaaagccactggtatctctttgcagttaatgccacaccctaaccctaagcaaccattaatctgctttttgtcactgtggaataattttgcctgttctggaatctagccatagttttttatatctcttggataaatgcctaagaatgtttgttgggtcatatgctgactatatatttttttcattttttgaagctttttgaggtataattcacatccaataaatcacatgtatttaaaccatgtaatttaatgatttttgacatatgtatacacgattcagatattgaacatatccgtcactcccaaacactacttgtgtgcttagattatctctctctccctcccgtgagccccttccattccaggcaaccactgatgtgctttccgttactataaattagtttccaatttctagaattttatagaaatggatcatacagtctactcttttgtctggcttctttcaatctaattattttgtagattatctttgatgttgcctatatcgttaatttactgctttttattattgataatgattccgtttaatgggtataacacatcttgtttatccattcatcagttgatggacatttgggtaattttcagttttcagctattacaaacttagtgactatacacattcatttataaatctttatgtagacatgtgctttccttcctctctggtaaacatcgaattgctggaccatatagtaaatatatgtttatacctttaagaaactgctaaactgtttctaaggtgatggtaccattttacatttccaccagcagtatatgagcgtttgagttgctccttatactctataacacttgatatgatcagtctttttaattttaagtcattctagtggtgtgtagtgttatttcattgtgtttatgatttgttctattgattacagagagtattgaagtctccaactgtaattgcaggtttgtctagtcctcctttaaaatatataattttttactagtagtttagtattttgaaactgtgtggtgaaatgcacawaaaattaggattattatgttttcttgaattgacccctttatcattatgtaatgtttattctttgaaatatactttgttaggccgrgcgtggtggctcacacctgcaatcccagcactttgggagkccraggtggrcagatcacaaggcaggagtttgagaccagcctgrccaacatggwgaaaccctgtctctactaaaaatacaaaaattacctgggtgtgttggtgggcacctgtaatcccagctactcgggaggctgaggcaagagaattgccccggaggcagaggttgcagtgagccaagatcgcgccactgtactccagcctggatgacagagcaagactctgtctcggaaaaaaaagaaaaaaaatatgttgttctgaaatctactttaatattcacatattcattccaactttcttttggctagcatttacaaagtatatctttttctstccttttaattaattttttaaatttcagaataattttaaattttcacaaacattgcaaagttagtatagaaagttcctatatatcttccaccagtgtcccctaatgctaacatgttattaatacataatcatggtacatctttcaaaaattcagaaattaacattgatacatcactccaaaytaaacttcagactttatttggatttcactagttttttcacttttttttttttctgtttcaagatcaactccaggaaactgcattgtatttagttgtcatgtctccttagtcttctcttggctgtgacgctttcttcacttttccttatttttcatgatcttgatagttttgaagaatactggtcaggtatttcatagactgtccctcaagttgggtttgtgtgatgttatttctcatcattagattggggttatgtgcttttaggaagagtaccatggtggtgaaatgcctttcttatttcatcatatcagggggttcatgctatcaccgtggatttatcatcagttatgttaatttaggtcattcagttaaggaaatacctgccaggtttctccactgtrggagtggtgagagatgacttgcagcctttcctcatcttaggagaaagcattctgtctcttaccattaactatatataatgtggtggtacttttttttatagataccattaggttaagtttcctctattcctaatttgctaagttttatcatgaacgggtattgaatcttgtagaattttttttctgtatctattgatatggtatatggcttttcttattttgtcttttagtatagtgaagtacgttgattaatttttgaatgatgaaccaacctctcattcttggaataaatcctacctgttcattatgtattagtctttttatatgtttctagactctatttgctaatattttgtggaggattttgtcatttatattaatgagaggattaatcttcagttttcttataatgtcttattttgattgtattttatgaagatgaccctacaatcaaaatgccttgtattctgttacactgcttagtttcttcattattactacataaatagcatatggacctagtctttggacaacatattgaaatcttgacagggatatgtctatcttgcctaatatatatatatgtgtgtatacacacacacacacttatataaacatttatatcttgatatagtacctaaattatttgctgttgaattacatatgttgtaattaataattatatttccttagacatttgtatagttgaaatttgctaagagagtagatcttaagtattctcaccacaaaaagtcagtatgtgaggtgatggacatgttgattagctttactgtagtaatcattttmcaatgtatacatatagcaaaatatcataatcactttgtagcctgtaaatacataatttattttttctcaatttacaattaaaaagggttaaaaaatcccatcacattgtatatcttgaatatgcagcatttttgtcagttatgcctcaataaaactcaaaaaattattttagaataactagaggactgataattcatatattgttgaatgataagtatgtctaaaacaattaccataagagaaatcagggagaaaattgactttttttctcttagagaagaaaatatacatatgtaaaatttatttaaatgaatagttatttaggaacccatgagagagattataggatcaatagtttttaaaaatttgctcttgctttgtggagatgacattttgaccctgatagtaactagctggttgacctaagttccataatctctgtagatgttggtttcttcattgtcacaatgtgaaggagatgtattttatttccaagacccccttttagtttgaacatttcattgtattctatcttatcctgtccttattattagagaacagaaataattatttcacgtagcttttacagattgattttggattgactgatgagtttttaaatattataattgatttgtttgtattacatttcttctgattcagtgccccatttacagtgataatcagtcaaatgaacagacaggagccactgtatattatttgggactctctttctgggtcagattatrcactctggatttcagtcatcatttccatggcatgatttccaaatgtggctgtagccttggcctttccttctcaactttggatcatttctgtttgctgggcacctccaccagggtgtctccaccagaatgtcttgstggcttttcaaactcaatgtgctcgaaactgcatttatcactttttatctaaatatgcctctgcttgttattgaagcctgaccatctttctatatcatactggagggaaacctgggagtaattttatactctttttctctcagtactcttgacagtctttattgtctgacacattctgtgctaggcataaagcattattggattgtgttggagaatccagaaccagtgcctggcacccagcagttcctgaatgattgaacatgtcactttacctatttaggttagttaattgggtctcttctccttcctgtaatacttgtcaccccttcttcctgtaggtgccagggatttggcttgcttttatctttttttttttttttgagatagggtcttgctatattgcccagctggtctcaaactcctggcctcaagcaatcttcctgacttagcctctctagtagctgggattacaggcagtgtgccaccacacctggtttgtttgtttgtttatttttaataactgtcggctactattctgttttctgagtttgtcttactggctgggttggcagtatgttatcttagctagcccttttcccctgctatgtcttaacatatctrtatatttttaaaaagtattttaggctgggatggtggctcacgcctgtaatcctggcactctgggaggcagaggtgggtggatcacttgaggtcaggagtttgagaccagcctggccaatatagtgaaaccctgtctttactaaaaaattagccaggtgtggtggygtgtgcctgtagccccagctactcaggaggctgaggcaggagaattgcttgaccccgggaggcagaggttgcagtgagccaagattgtgtcattgcacttaagcctgggcgatgcagggagactctgtctcaaaaacataaataaataaataaataaaatagaaagtattttaaaggaatttttwctgctatttgttaatgaggaaatagaaaggctggttaaaaaaattaacaggagggagcttacaatgttcccagaactcttccaagtttatgtagttattcctgaactaatgttttgcatacctttcaatattcctgctatagctcatatatttaggacagactttgataatattcccttttactctatgcaaaatactgtagagcagtgatttccaacttttttttttttttttactatgaccttatcatgtaaggaatacatttcaaactgtgaccctacatrtacagacacrtttgtgtgcatgtgtattaatatagataactgaaactaaaatttaacaattattcttccatgtataatacaataaaacatatcaaagttaatatcaaatgtaatctttgtattgcagtataatatggaacaaatccaagataaacaatacaaaaaaccaaggatttattaatgccacaggtgtacttgcaccttaataagttcttttcactccagaacaattgggagtcatacacatcttgttatactgttttgaaatgtgctgtggggtgtgaggagaaagggaaggttgaaataattctaaactgtatcctaaggaatcagagggctgtttgtaccctygttggtataaagagggaggggaaaaataagctcatctgtttttttcaggcaaattttgagcctttatttattttttcgtttaagttgacatgtartaattgtatgtatttatgggatacagagcatatttcaatacatgtatgcagtgtgtaatgatcaaatcagagtagttagcattcatcaccttgaacatttatcattcctttgtgttgtgaacattcagaattctctcttctagctatttgaaaatatacactaaattgttgttaatcgtattcaccttacactggtacagaacagcagaacttattcctcctatcttgctgtataaattgttgaagagccactcaaaaggcagtgttctctatatcattgatgataaaggtttaagctaaagaggagtttatctcttcgcaaggaacatgaaactttcgtatrctgttttgacatggcattgataataaaggatacatagtggactttattagtaaaataccttattgtaacataaatattaaatcatgaacataactcttacaaaattatcaacttagaaatccttttaggctgtcatttcagccagttcttatgatgggactatgacctgagatggtatgatggctataggctatggactgagaaatcataggttggaatactagctctaatctttactagtcacatgactttgggtgaatcccattttttttcctgagcatcagtaaggatagaaatataccgctcatatattgtgatgattaatgtgattatgtatgtaaagtgccttgtatagcacatagtaggcccttaaatgttaacttttctgttactctttctttggtcctactaaaaaatattatttgtttctctatggtcttaagcatgaagactataatcaggtttgaatggttttctacataaaccttttaaggcaatgttttaaagatttaacattattaagaatttcattttacaggactaacatatggaaatatgctatatttgaaaaattactgatgttagggattggtattcaatatcttctgcttaagcttcttgtgtccctctatcagtcatctttgccttacaagaaggttttgtctttcttggaaggttaattctctaaggtaatcatttaatttattttgttctattcattaaaacaaactgtttaataatttaatttgagtaaggaaataattaactatcaactatgtaaagtttagtttttattgtgaactcaaagcaaggytttgtggcatctgctttattgttataaattcaagcacagtatcagcagcttatgagttatattttggattttaagtgagagctgctaggagtaggatcactggctctctataactacaaacatttgatatcctgcacatagttgaacagtagcaaagctggagttctcagatatagtactgactgattatgtcacgtcatcrtttttggatagcatctgctcatctcctctctcttgtctaagtggtttaggattaaacaaattatgagggtgtccaggctaggaaaagaggactttgtgctatgtagycaaaatttttagtgtgtgaatctatcttccttattagattttaagttcttagaggtaggagcaaggtacaagaatagatgaagataatattgttagtacctggatttattctaacatgtggcttattcttcgtggaggagggcaaggatttcataaactagcacaggtagcctcattttgagagatcaaagatgtttctgaaaatgctttaggcaatatcgtaaactaagaatttctggttcctttcttgattgcaacaaattggttatcattttgtgtttttgtctagcatcattgatcattgaggacaaacttttttttttaaccatatgttttttaaaagcattaagcagcaaagttacacagttttctctagcagtgctgcatagcttaggagcaggagtgggataggaaaagctgatagatgtgtttggtattgtctggatgcacagtttggacaggagtcagtgtagtatagtggttggtatgagttttggagtagtacaggctgcataactttaggcaagtaccttaatttctctaagctctaatttccccatctacaacatgggataataataatatctacctaccttataaaattagtatgataattaaataagatgartgcaagtaaggtgcttatttattagcacaatgcctggcttatagtatattagatgctatttttattttgttgtgattagaaggaggttattaaagtaaggttattggcgagaatctaattgaaataatagggaggttcaggctggcaaggaggaaagtgaaactaggaagaatgttaggtactggagaataagaaggttaataggttagaaatgtgatgagggtgaaatgtaggcttagcaatagaaaagtagaaaaataagagttaatggccaataagtgagatcacagcttgagattctagagatggaatatttccagataatatccagcctttgacaaaaggaatgggttgctgatatgaagtgaagatgaattcattttaacaaatatttatgaagcctttaccgtgtgctgctttgctaggcattggggaatgtcacatttgggtaaaacatccttggattacaggaaatcagaaaccagctgttggtcactcacctgaatgaaaaagtttaccatgacaatggcagaagctgggacaacaagaaagactataaaacttattgtatctaagaatacttcagtggattgacttgtttttcattggcataagattttactataaatggctctaaaataggtgcatctcccagtagggataaaataattagtaacattaatttagagtttaaaagataggtgtcctaaattcatttatttaactagtcttgtttttttcagctttcctttttagccactagtgtacagattagatgattaacccaattctttttagttttagaggaatggtttgttgagtgggcttgtgttcattttgtttctgagtaagtatcctagaaaaggagcatgtcccaaagaatagcacaactggggcaaaaaggagcagctcaagttgtaaccatgatgattgtttcctgtgccggcttttcaataggaagttgtagattttaaaatctgggaagctgggaagcttactttgaaacaaaaagaataatgttgatcaaatatttaaaaattacatgtgtgctataaagcagcaagaaagtgaaatcctgtatgccatttttttgggtttcttctagtcagtgatggtagcatagatccacacatacttgttttttttgttttcttttgtttgtttttttcttaagagatagagtctggctgtgctggtcaggctggacttgaatgcctgggcctgagctggagtgatcttcctctcttagtctcttgactagctgggactataggcgcagtaccccacaccgggcaatacttggttyatttatactgattatgactaaagtcagcagaacaaaacaacatgttcacagccccaagaaattcccaggcatgcaagttaagaactcccattttaatgcaagccaagtctagtcagtgacccttttgtctgatacacaaccttttcacaaactccttatacttttctctaatgtacatttaagtagacttacatgttattccatctctgctattttttttccatattacttttaacatcattatgaggagcccagtagccaggactaacagaagttgtgaacatatgcagtctactgtcagatggaccttccgcttcatttgggcaaactgctactgtgcacttggctcatttcactcacatctaaaaaatgttaagattctgcagtctccttttcctcttttttgtttttgactgtccttctaccatagtgactctcactgtgtgatccccagtagtatcacctggaaacttcttagaaacttcttagaaatcaagttcccaggcctaaacaagaccaactgaaccagaatctctgggggtgggacccagttttaacaagccctgtacaagtggattccgacacatgctgaagtttgagaaccgctgctctagcatgttgtagttaccaacctgtatacattttcttgatgtcactgacttaatatatttctgctaagctcaacatatatgttgaactgtggccagtaattaatgttggtggtttcatgtggctcaactaatatttgctttgtctaaaccaggatttcttagacatattttgttgagatattgacattctttgttgtaggcagctgtcttgtgcattgtaggatgtttagtgtcatctctggcttctacctactagattacagtagtatttcctaaatgatgattaaaaaaaaatgtccctagaccatgagtagaggggaggggaagggggagatcactcctggktgagaaccactagctaacccagtttcttttccttcaaactcataatacccaatgtactacccataatgtatcagtttttctccctgggtaggaaaagggccagatataaattaattatagaaattaaagattatggtgattataattttttataattttacaaaatttatatttctttttatgttttttcatgtcctatttatagtgagcaatatcaccctatagactagtattatttgctttccttgtatcttattgctgtgaaagtctaatgataatttgcttttctttttgttcctaagtaacttgcttattttgcttggatgcccaaaggatttttctttttctttaagattcaacagtaaatctcagtattggttatattggattgattttctcargtttgtggtatgtgcttttgaatctttttttttttttttgacttaaaaaaaattccttcccttgctttggttttggttttcttcttcaggaactcctattgaaagttgttagatcttctttgtctatcttatatattactttctctcaagcctgtattactttctttcaaaggtttttttttttttttttttggagacagaatttcattctgtcgtccaggctggagtgcagtggcacaatcttggctcactgcaacctccacccgccaggttcaagtgattcctcctgcctcagcctcccaagtggctgggattacagatgtttgccaccayacccagctaatttttgtatttttagtagagacggggtttcaccatgttggtcaagctggtcttgaactcctgacctcaggtgatctgcctgcgtcggcctcccaaagtgctgggattacaggcatgagccactgtgcctggcctcaaatcttttttatttaaaaatttttcttcttttcaccttttatttctcttgaagtattattgtgtttattcatctttttcttctttctartttagtcttttttgaaatattttcttctaattctttcctgagttctatcacttcatttctgagttttcataattacgattcatgtgttttttcatatcttacacattaaaaatttctttgcttgtggagaaatagtaggttatagttacctgtagtttgcgtatgtctttcatggtctttgggaatattagtctgctccttattctctctttaaaaattaactatccgtgtaatttaatcatgatccttatttttcatttttatgtgaaattagttttcataaaccttaggaggtgtggttcaggatagcttttctaatttcagggctctagagctcccttttttgttgttttgtatagtgttcgaattaggataccttactttgtgaggtttctcggttctgtttctctcctgtacttttatgtggaccttcttgttgttcctctgctgctcaatttggattctgtttcccagaatttttcttcatcttgggtctttgttctagaagttttgaaagttcatggggataagactgcttggtcctctcagatgttactatggacttgaattcatcagctgttggaggatacaaaaccatttgcagttttagctgccattcacacgtggcatgcatttttggtttgtgtgggaaatcttatcacgtagttatggtgtagatgttatgcatggtttattttatttattttgkttaattttattatttttgtcctagttgctctgtttttaatgagggattcaggaaattttaaaaaatgatgtgttcactgctgccatcttcataggggtactttcatcagtctttttgtatttatatactttattttgcaccagtttattgaggtattgatgtacagtaaactacatatatttaaaatggggaatttgatgacttttcacatatgtgtattcccatgaaaccctcaccatgatcaagataataagcatatccacctccgaaaatttccccatgtcccttttgtaacccagctttcattctcctttcctcattcccaggcaaaaactgctttctgccactatagttcagtttgtattttctgtgattttctgtaagtgaaaacatacagtagtattattttttttgtatggcttctttcattcagtgtaattgttttgaagtttatccatgattttgttcatttctttttattgctatatggatatatcactgtatggaatataataatttgattatccacttgttagtgaacatctggattgttttatgtattacaaacaaagctgctataaatatttacattaaagtgtttatgtgaacatatgctgttatttcccttggataaatgtctaagtatggaatatctgggtggtttggtaggtgtatgtgtatcctttaaagaaattgtcaaacttttccaaaatgatcgtattattttatattccatcagtagtatgtgaaaggaccattactcctcatccttgccaacatttggcacgttgagtccttataattttagttattttagtgaatgtgtagtgatatctcattgtggttgtaatgtaattttacctaacrattaaaattttgttgagcattttaagatgtatttatttgccatttttatattttctttggtgaggtgttcaaatcttttgtctgctttttattggatgttcttactcttgtagttaagaattctstatatattctagatacaagttgtttgctaaatatttattttgcaaatattttatgccagtctatggcttacattttcatttttgtaacagtgcctttgaaaaacaaacatttttaattgtgatgaagtttatttggttgatttttaaattttttatactttaccttttgtgttttcttcaagaaatcttgtcaaacccaaggtcactaagattttctgctgttttcttctagaagttttacattattggctcttaaattcaggcctgtgatccactttgaattaaattctgtttattgtttcaggttgaggagagactcattgtgtttgtatacggctatttaattgtcccaccaccacttgttgaaaagattatcatctcctcattgagttgtcgtttcacctttttaaaaactcaattgcgcatttatgtttgggtctatttctggactttctgttcttttccattgatcatatgccagtattgcacgacattgtctgttgtagctctactgttgtagctctgtgataggttttaaaatcaaacctgctagtattagccctacaactttgtttttgtcagatttgttttagctattctatatcctttgcatttccatatagattttagaataagcttgttcatttctgcagaaagcctactgggttttagaaggggatcatattgaatctgtcttcaatttgtgagattgacatcttaacagtattgagtctttgatacttgaatatatttagttcttctttatttctctcagcatgttctgtaatttttggtctacaaatcttaaacatcttttgtcaagttttctaaatatatttcatattgaaataggaaaagttccccagaccgctcgcagggcgtgcagtgggggagtggcgtgcttctttggtgccccactgctcaaacctctagggggagcatgcagaygggcaggttgtggggctctgaccccatggcagtgtctagaggtagatgtttagagctcccgaagtcccagtgggcatgtgttacagggtgctctttcagttttgctgtccgtaggcggcttgtgttagtcagctcaattagacccttgccttattgcaaggtcagagggctttctgtatctcggggtttcttgccttggtgtactggaagaatcggatcacacgtggacttggagaataagtgcaaggttgtattgagtagaagtagctctcagcagatgggggagccagaagagagacagagtggaaaggtagttttcccctggagtcgggctgcttagcagcccgcgctctcctctgactgccccagccaaactccacctcattccgggggttgatggcttgcggacctgccagtgcctgttattgtgctcttatgcggatgcgctcctcttgacggcctcttaacatctagctgcgtgtgttttcttccgctggagtgttcctttccacgtccagccacttgcrtctctgcctgctagggtcttggggtttttataggcacaggatgagggtgtggtgggccagggtggtcttgggaaatggcagaatttggacgtgaaggcaggagttcctgtcctcacctaggtccgtgggcacaggcccaggggtggtaccctagtcagggaacagccyttcccttcccggcacttccctgcaccccctcccatatcaatattgttatgttaatgtaaattagattacttttaaaattataatttatatttcttttctattatatggagaatataatatataaaagtagagatacttttatrtattgaccttgtattctgcatactgctagactcacttattctagccattttgtagattatttaggatattcaccatagacaactatgttgtttgtgaataaagataattaaacttctaatctgtaagtcctttatttccttttcttgccttattgcactggctcagagctccaacacagtgttggatagtggtaatggcctagtttcaataggttggtaccaattcttctttgaatgtctgatagaattcagctgtgaatctgtctagtcctggatttctctttgttggcaatttttaaattacaatttcaatcttgctgcttgttattggtctgttcagagtttctatttcttcctggtttaatctaggagggttgtatacttccaagaatgtatccatcttctctaggttttctactttgtgtgcataaaggtgttcccagtagccttgaatgatcttttgtatttctgtggtattggttgtgatatctcccgtttcatttctaattgagcttatttggatcttctctcttcttggttaatctcgctagtggtctatcaatgttgtttatcttttcaaagaaccagctttttgtttcacttatcttttktwttttttttttgtttccctttcatttagtcctgttctgatctttgttacttcttttcttctgctgggtttgggtttggtttgttgtttctctagttccttgaggtgcgacctcagctagtctatttgtgctctttcrgactttttgatgtrgacatttaatgctatgaactctcctcttagcaccgcttttgctctatcccagtgattttggtaagttgtgtcactattattcagttgaaagaattttttaatttccatcttgatttcattgttgactcaatgatcattcaggaacacattattaaatttccatgtatttgcatggttttgagggttccttttggagttgatttccaattttattccactgtggtctcagagagtacttaatgtaattttgattttcttaaatttattgagacttgttttgtggcctatcatatggtctttcttggagaatattccatgtgctgatgaatagaaagtgtgttcttcagttgttgggtagcatgttctgtagatcatctgttaagttcatttgttctagggtatagtttaagtccattgttgccttgttgactttmtgtcttgatgacctttctagtactgtcagtgaggtattgaagtcccccactattattgtgctgctgtcttaggtctagtagtaattgttttataaatttgggagctccagtgttaggtgtatatatatttaggattgtgatatttcactgttggacaagtcctttttatcattatgtaatgcccctctttgtctttttaaactgctgttgctttaaagtttgttttgtctgatgtaagaatagctactcctgctcacttttggtgaccgtttgcatggaatatctttttytacccctttaccttaagtttatgtgagtccttatgtgtgtttggtgagtctcttgaagacagcagctggttggtgaattcttatccattctgtgattctgtacctactaggtgtctacccagaggaaaagaagtcattatatgaaaaagatgcttgcaaatgcatgtttgtagcagtacaatttgcagttgctaaaatatggaaccagcccaaatgcccatcagtcaatgagtagataaagaaaatgtgtgtgtgtatatatataaatatatatatatacatatatatacacactcaccataaaaaggaacaaaatattggcatttgcagcaaccttgatggagactattattctaagtgaagtaactcaggaatggaaaagcaaacatcgtatgttctcacttataagcaggagctaagctatgaggacgcaaaggcataagaatgatacagtggactttggggaccctggggaaagggtgtgaggggtgtgaggggtaaaagactacacactgggtacagtgtacactgcttgggtgataggtgcaccaaaatctcagaaatcaccgctgaagaacttattcatataaccaaacaccacctgttccccaaaaacctatagaaataaagtgcttagatacgaatctaagaaaatgtgtgtaagatctgtttgttaaaaattacataaaactgaataaattattcaaagatataaataaacaaagataaatattgtgtttatggattaaaataaagaagtggtaatggtcaacatccctgccttgttcctgacttgggggaaagtattctttctttcaccattaagtatgatgctagctctaagtttgtcgtagatattctttatctggttgaagaagttcccttctatttgtagtttgctgatagttttaaatcatgggtacatactggatttctcagatttccacatgcagtgaggtatccatgtgttttttgaaaattctgttacattaactgatttcaaaaattaacccttttggcctggtgtggtggctcacgcctgtaatcccagcactttgggaggctgaagcaggtggatcatgaggtcaagagatcgagaccatcctggccaacatggtgaaaccctgtctctactaaaaaataaaaacaaaatattggccgggcgtggtggcacgtgcctgtaatcccagctactcgggaggctgaggcaggagaatagcttgaaccagggagtcagaggttgcagtgagccgagattgcaccactgcactccagcctggtgacagagccagactccatctcaaaaaaaaaaaaaaatctttttattttgagaaaactatagattcacatacagttgtaagaaataatacagaaatacccatgttctctttatccagttttcccctatagtaacatcttgacaggatgttgacattgataaaatcaggatacataagatttcyatcaccatgggatctctcacattacacttgtgtagtcacacctatttccctcctgctcctgtatctctccttagcccctggaattcactaacctgttctctatttgcataactttgtcatttcaagaatgctatataagtggaatcatacggtatgtaaccttttgggattgaatttttttcacttagcataatttctggagattcttcaggtggatacacatataaatagttctttttttttcctttttattgctgagtagcattccacagtatggtgtactacagttcatttatccgtttcttcacttaaggacatatcattgttttcatatcttttttttgttgttgttttgttcaaataaaggtgttataaacattcatccacaagtttttatgtgaacagaaatttttatttctttgggataaatgccccagagtacaattgctggcttgtatggtgttgcatatttaatattttaagaaacttccaaagtgttttccagagtggctataccggcttacattcctagcagcaatgagtcatccagtttttttgcttttggtagtgtttttaaaattttagccattctgataagtgtgtagtgatatctcattgtccttttactttgtgtttgcctgatggttaatgaattaarcatcttttagtgggcttatttgcaatctgtatatcatcctcagtaaaatgttccctcatgtcttttacccatttttgaattggattgtgtattttattactattgagttttgagagttctttatatggtctcgacactagccctttttcaaacattcatttgcaaatattttctcccagtctgtggcttgtcttttcatccttttacagggtctttcacaatgcaaaagttttaaattttgatgaagtctaacttttctttcttgtggatcatgcttttactgtcaagtttaagaattctttgtctagccctagatctagaagctatttgcccatgtttttcctgacaggtctattgttatatgtttcacacttgatcttagtgaaaaggttgagaagtgattagttttatgttttaagtataagtctgtgatttactttgagttagtgtgaggcataggtcatgtcagtttttttttgtttttaattttaaacacctgtggatatctagttgcttcagtgccgtttgatgaaaaggctgtcttttgtctactggattgtctctgcactgttgccaaaaatcagttgggcatatgtgtgggggtctatttctgggttctctcttctgttctgtggatctgtgtctctctccttccaccaatactgtgcagtgttggttactatagctatataataagtcttaacagtgggtggacacaattcctcctacttcattcctctttttcaaaattgtttcagctatgctcattcctttggtttttcatacaaatttagaaaaaatataatctatgtctccygaaatcttgttggtattttgataggaattgtgttaaagctgtataccactttggggagaatcgccatatttaccatgctgaatttccyagtgtgtgcctctctgattgcttagatatcctttgatttctttcagcattgtgtattttcagcctacaacttctgtacatattttgttagttttttggagtgattataaattatattgaatttgtaatttcagtgttcatgtgttgacttttgtcacatgttttttctgaattggtatgatcatgtgatatttttcttctttagcctgttaatgtgatggagtacattgatttttaatattgaaccagcgttgcatccctgcaataaacttcatttgatcatggtatataattcttgctaaaattttgttaaatatttttgtatctatatatatgaggtatactgctttgcagtttttcttcatgaagtgatttaggaagtgccacctcctcttctcttttctggaagagattgtgtagaatagtgttaatttttcattaaatggtagtattctccattgaaaccatctgggcctggacaattttttaagactttgaaaatattaattcaatttctctaatagttgtaggagcattcagattatctctttcatattggataagttgtgactatgtttatcaaagaattggaccattttgtctaagttttcaaatttatatgtatagaagtattcatagcattcacttattatccttttgatttctgcagtctgtagagatacctaccgtttcaatcctgttgttggtaattcatgtcttgtcttgttcttttgtcattcttgctgagattagttgatttttatcgatctttaaaacaactaggtctttgtttccttccttttattttttctatttttattattaatctcatctctttgtttcttctgcttgtattgtgattattttgttctaggttcttgaagtggaaagttagattattgatttgagatgttccatttttttctaatggttacatttccctctttgaatatgttacctgtatcycacaaatgttgattttttattttcattagttcagtgtattttttgatttcccgtgagacctttctctttgattcatgggaaaatacagaagtttgttgtttagtttccaagagttgggagatttttctgttacctttcttttactaacttctagtttgattccattgtggttagagaaaattctgtattatttaaattttcaaaaatttgttgaggtttgttttgtggtctgtcttgatatatattcttcgggcacttgartggaatgtgtattctgctgttggatagagtgttctataaatgtctactaaatcttggttgatggtattcttragttcttctatatctttgctgattccctgtgtagttctgtcagttgttgagagatgggttctgaaatctccagctgcacctgtgtatttttgtctgtttttcttttcagtctcatcagtttttgcatcacatattttgcaactcagtttgttgtatacacacttaggtttgctatttcttggtggattcatctcttttatcattttataatgtccctgtctgtctctggtgattttctcttctctgagatttactttacttgataytcatatagccactcctgctttcttttgattcacatttctatgatacattattttccattctttattttcaaccactgatactgttatatttgaagtgagtktcttgtagacagtatatagtcgaatcatttttaaaatccactctgccaattccggtcttaaattgatatatttagaccacttatatttaatgtaattgttgatattttaaggctaaagtgtatcattttattttttatttgttctttttttgcttctgttttctttttcttgccttcctgtgaaaagttttgttttcacctccatgaggtattagagattatacccttttttatcttaattgcaaattagtgaataaaattcactgaacattcaatatttaatgttcctgacatctgttcatctagttagccatctattcattcatgttttcaagagatatttattgaacctctaccctgggccaggcattgtcattttctttttctttcagattattctctttcagttctttagcagtgtagtaaatttatttcctctggttgktgtaacaaattaccgcaaaccaggtggcttaaaaataatagaaatttattctgtcacagttctagaaaacagaagtctgaagtcaagatgtcagcagggatctagaggagaatccattcttgcctattccaacttttggtggttgtcaccattccctgacttgtggctgtattgctcaaatttctgcatctgtggtcaaatggccatctattgtgttttattctctgagtttttcttttaaggacacttgctattggatttagggcctagatagtttggataacccaggataatctctttatctcaagagccctttaaaaattaagacaataatcgcaggttctaggattaagatgtagacatatcttttagggggccaccattcagttcactacaaatagtatttttctgtgcaactttgatttctctttttttgatcctctctccatttggcatgggttctctatttcacaccctttgctattccttctgaattttgtytattaaargattctcctagagagtgatgagaacagtggaatgattatgatgtcctgtatttcatagcttaccgtatagcaacagaaaaagcctttcttcatgrcagggcagcttcatttagaatcagaatatgtttctttctaatagaacttactctaaagcaaaaataatattattttaaaaactatgtaaaacaygtattaaagtcttatgtacgtataactacaaatccatttgaagagataagtaaaaataattctaatcaataagtaaatattatggaatcagctatcaatatttaaattggtgtcagttaagaacaggtggaatttccctctgaggtgatgccatgtttattagcatctttttgatatatatatctatatctatctatctatmtatatatatgtatatttcaagtactttcagaacttaggccactttggttatatttgaaaacagttttttgctgtttgtggaaatggtttttttgggaagaatctgaacatttttttcaaggtatttaggccactagagtattgctgagattattttgataactccttaatgaatgttaatttaaaaaggagttatgtaaatataccctgctgatctttaagagtattgagtgtatctttaagaagtttctgacatggagtcaaatctagtgtaacaagtgatttcactgtaccaagagaaagttgtatgattttgctgtagttgattttattgctgtccctgttgctatgactattaatgttttaccgtaataaaatgttaccatttatatatttttataaastatggcaaactggcaggtcacaggaaaaaatgaggtagaattaaaaaatatgtatttaataatagtctcgaaacttytagacttaagacatataaaacaatagacaatcttgtttcagcacaagcataattaatatcttcatgtatttgttataagatttgcttaataaaatttcagttttggttttaattttatatctaaatgatgtatttctggcttaaaacttagaagtctgagtgcttaacattcaaagcagtyatttttccaattagtccatactttttatarctgtgcagaggaattcagcttataattataaattttaaatttgtgttttctttgtaagtkctggtcaagatgtccaaggaacaagtgtgattgcaaatctcccatttttgatgcgacagaatcccactgagacgcttcggagagtgttgccaaaagtcagagtaagttggtatgaaataagattggagtttcccattttttcccagtagcatgttgtyattgttgaaaggattttggagctttgatggctgatcttttgcacctwaaaattgagtkgaggaagtkttattatatacattttgaattataatgaaaatatttagggaaattagctgatggaaatggagaaatccagatcttaagttgtaaaatttctttagtcattttctcagtagagacattttactaaaggtagtttttagtagctcaaaaacacctcttaattattcttaaaaaaaagtatttagtattctgttgacttaaatctatattaatagtatttgtataacattgataatataattgagctgatattcctrataattgaccctatgatgacttctgaagaatcatcagataaagattgaattatagccatcacaattttagatgtgtatgtaatttattgctttataaatttcttcagaattagtttttctgctatgaacaaaaatgtttgatctattacattctttcttctgactaatatttattgattattaawataaaattaaataatttcaactattaaatatttagtaattatttatttgtacttatgtgcaaagtgcttttctttataagaacttgaatgaataaaacagacaccagtgtgtgtgtcctccaagagtttacctactaatggggtcagtgaggttacatactaatgaggattatgtttgctaatagaggttggtagattttgctttgttttttwatttggatatagctcttgtcataatttttaatttatgtgtttaaaatactgaagttattattgagtccttgagttttatttttaggcatgtgtagcatggttctagttactgtgatttagatcagggacataccatgttattttcatgagatgcccacctatgcaggcactgtgaacattttgactgattacaatggtgaattaagatgatatttattttggcattgcatgtgattcaaaagtaaatcaagcttttttatatctgtttttcccagaatcatgccatgtttcaaaggaattaggcccacacagaccaggtttatttttacgttcaatttcagtgatactaactgacytacacttgtcagcatgacacctggaagtgccagttaaacaatagcagaaaggaacaggtatttaggtcctcttggctacagagttaatgtaagtaagcaaattagatttatagctaagaatactgcatgctgcacactttgcattgagcaggtaaaatctggtccacagaaagcatattagatatccaaagtttcatatgcaagaataaaagatgaaagagagcagtgaactttagaggtctctaaattactttgcaaaattccttttgttgagttcacaataaaggaagttaagtaacagctcccccaaaaccttaatttcatgggagtatataaagaatattatacacttttttttattttcttactttctatttaaaatattctaaagaaaattttatacaaattttcattacttttaaagcttattaaaaccatatcttctataactcaggcataccttacagtttcaaaagatacatttgattctttgtataaatatgctatatatatgagtgtataatacaaagaatcaaatgtatcatatttatacaaagaatcaaagtgtataaagaatattatacactcatgtataacatatttatacaaagaatcaaagtgtataaagaatattatacactcatatgtatagcgtatttatacaaagaatcaaatgtatcttttgaaactgtaaggtatgcctgagttttagaagatatggttttaataagctttaaaagtaatgaaaattaatccataatacagagtatattaactgaataatggatacaaaggtagtatatactaatgaacatgtactaaggaaacctttatttatatgtgaatgatttcactcatttattttactaatcaacatgcaaccatttatttaggaccatcgtcttgctgtactccgtttaaaagagatgccgaaaaggtagaagagtccagattagactgtatattaggaaggtctagtgaccatggaaaacaatgagagaacaagtataatagagtattgtgtgcttgtgacttgatgtaaaaatgctgaagaataaggcaaatgagaagggctttatgggggtaactccagtaataatgacttttatygatagtctaatatataatgtagacagccaaacatttaatcactcccatttcaaatgataaaatctgtgtttctgtgcatattattttaaattcattgtattcagattttgttatgacttaytggtactcctggttagcacctttgtcaattccacctcacttctgtgagtgtctactttccagtgatgaaatgctgacagcatctcgggtaactgctttatttacttttgcttggccatgatttctcaattttttaaaagaaagtaatcttgagcatttagtaataatggcattctcattcattcataaatatttactgagtccttttataaggcaggcactgttcgaagcactgggaaaatagaagtgaacaaaagatgggggacttgccctcaaggaggaggctacagtccagatggagaaacagacattaaacaagtaaatccctcctcacccaagaaaggtataatggtcatttgtgataagcactctgagtgtacagaacatgagttgatgagataaagtaatatagtaacgagggcacctgctgtgcattgggatggcaaggaatgcctttctgaggagcagaaaactgaagggatggaaagaagcagccatttgagagtcaggaccaagtagttcaggtggagagaacggtarttagccctaaggtgaaagagctgggtgggactgagagagacaggtgtgttttggacccagtggatggkgtggggtgtgattgagaagaggttagagaaatggttgatgaaagagcatgcaaatgttggttttcattcttaggacagtgaaaagtcgttgaagtctttaaagcaggcagtgacttaattgtgtttctatttcacagtgatcattttggttattgtatggagaatagattggagtgggatagttaggaagcttcagttctggccctcatagctagtatgaggacaactaattaagacagtagagagcagtagacatatctgagatacatgggttaaggtagaatgagcagaatttcgtaacagattgggtttgtgaagtgagagatgacttccagatttctggcttgaccatgcatatggttctgctggttttcagttatagttgatagtctgttaaattcataaggaaaataatttgtgtacttgataatactagtcttttgtgaatgatttacttttagataatttaaagatatgaacaatacatattttatgcaagaagttaatcaataccaagatttttaccacatttataacagtggtgtgtgcagcttttagagctcactttttaccttgtctttacctttaagaatatcagatgaagtaatggagattttgctggccttatgtattataaactttcaccagtgatatttttgttttattgcatttgcattttgttcttatgataatggattaattgaaaagtgatttaaaaaataggttgctttcactgttttagagataaaggaatttaatgtttaaaaataaaatgtcagaaacagagttagtgttacaattgagctaatccatcagattgaggttgctgtctagaataactaacaaagaagaaaaatagaaagtaagaaaaatagaattaagccaatccatagtatttccccaatttattttctaaattgtgtgctaagtgggcaatgaatggtagtgcagttaggccactcatctgaaggttaaatttagctagaaatttagaaaggaaatattttgacctccaatttaaatttcttaaatgtggagacattttaaaatatagtttttaccatatattcatgttacatgatttaatcctagggtatctattgaataatttttttcctgtgattttattaagttttaattctttttccacagtatattaaattgaaatcttagatgtttgttagacttcaatatttgctttgaacttctcattatctagaagtgaaagaatttgattgtcaagataaatatccaaaatattawaccatggtcttttataaaattcagaataatagcgwtataattacaccacataacgaaggtgattccattacaatccaatgcaaaaaacactctctacttatcraggtattaaatttatttagttgtttttacacttacattttggcaaccataaatttgtcataaaattatataaaagaaatcgagcaattccaggcacagataaaaataatgtagccaatatttattgaggtcttactatgtgtcaggcacygtattctgtcagatattctacacattttaatctgaatactcatagcagttctataatgatcacttgacagtggaagaaacaacttagttaagtaacttgctcaacgtcacaaagcttgcaagtggtataattaggtttaaacaggaagtctgagccctgagtcctcactctttactactcattagctgatcatgactgtaacagatataaaatgtgtaatttaatgtctcaagccttagtcatctcctgtctgtactacagcagcctcctcactgagtctgttgcttccattttgcctcctagagcaaactcacccagagaaatcttttaaaaagcatcaatcatatcttgtctcccacttgcatgaaaattacttaagtggtgtgrtaggtagaatcatgctccttcccaaaagatattgggccctaatccctagaaattgtaaatgttaccttatttggaaaaggggtctttacagatacagttaaggatcttgagattgggagattatcctggattattggggtggtggtctaaatgccatcacatgtgtccttataagaaggcagacgagagttgacgtatacatgtagaagaatgcaatgtgaagatggaggtagagattggagtgatgtggccacaagccaaggaatgatagcaaccaccaaaagctgaaagaagcaaaaagcagattctaccccagagcctctagatggaatgtggccttgccaacactttgattttgaccaggtgatactgactttgaaattctggcctccagacctgtgagagaagaaatagctgttgttttaagccactcagtttgtggtaatttgttacagcagccacaggaaactaatgaaagtaacttcccatttcagatataatacaaccccctaccrtgtccttaaatcacccccatctacctttgtgacctcatcatctgccagtcttttccctttctttcataagggcagaatatttgtcagtctagtttctcactatacccccggaacctagaatagtgcctggcagataataggcactcaaaaaaattttgtaaatgagtgttcattgaacttaacatttagagacaatataaatatctacctgaaagaccaagggaacattggcctgatccactgatggcattcttggatgagaagtaggaacagaatttgtttggaaatttgacayktacatgtagaatggtatataacgctgatttatgttcgagagagactttttgggggtttggagaggattygggaaatatataataaagaaaggataaaagggacataatcaatgtgaaatgtgatttccttttatttcggtgcatgcccatagtctcagctgctcaggaggctggggcccaggagtttgaggctgcagtgaatagttactgactgcactccagctagggcggcatagcaagacyttgcctctaaaaaasaaaaaaaaaacagaaaaaaaaagaaagaaataataggaaaaaataataatttctcctaatatgattatttattatagaattttatgtctcctgtatatgggtagatttttttaacatcttattctagagtttttacagaaagcattcactttataaatacatttgtaaatagaaagcttaactttacttttttaaaagtcctatttcaagtagcatagttaagtgaacaaacaacacagattgagcattcctaatcctcaaatccaaaatcaaaatgctccaaaatttgaagctttttgagcataaatatgatgctacaagtagaaaaytccccatctgacctcatgcgatgaggtgcagttaaagtcaaaatgcagtcaaaacttagtttcatgcacaaaattatttaaaatattgtataaaattacattcagcctatgtgtataaaatgtatatgaaacaaatgaatttcatatttagacttgggtcctatccccaaggtatttcattatgaatatgcaaatattccaaaatcgcaaaacattcaaaatctgaaacacttctggttacaagcatttgggataagggatactcaagctgtaataatgtgtggaacactgtaggccaggcactatgcttaatgctttagatatatccttaaaaaaatcctcctaacagctccgtgtgatgtatttatactcattttacagttcggaaaatctaggcttaaaaaattcagtgtttatgaatattttattgggagatttctaggaagcatgaaagtatgtaatttattcttacagttcaccaagaaaaagaaatagttttgactaaaggaattaaagagcataaacaaatgatacagattgctttcttctttggtttgcagctaagaaaacagggatctgtcttcctcactgaagatgatgtgttctgagataagcataataagcagatcatgatgttccagacccttacagatcataaaaagcccacaatatagtattctttagacaggctaaacatttagggacactgataggaaggaatgtaaataagaaagtgaaataattcctataatgtaaggttgatagaagataatcatcagggtcagaattaagaggtcttgtggtttaggaagcataaaattatgtaacttattgtttatttcactcagaaaataaaagtattaatgaaaggarttagagatgaacagattgatacaaactgttctatggtttacagcttaaaaaataaaggtacatttaatgctatgcattttgagaataatgtcttttatgctttttctttttacatatrtatctatttgtatttaaggacaaaatagattgacattactaattacttcactattaataattaaagttctgtgaaacatttactgagtatatagtttttctgggtatatatagttatattagctggtatgcattatagacctaaaaatattgcctttcagtaaattcctagtggacacyagtgttttcacatatgcttcctagtcattcagtcatttgttatttttaccctatctgcaataaaaacgaacagaaacttctgaaattactttaaatgtgtagttaagcttgtaagtgagtaaggaatgatactagggctcaaaaacaaagcaatccgtttcacttccatttaggatatagaaagctgcaagagaacatcactcttattctaataacagtaggttatccacaaaatccacacagtcrtaacttcttgagcacatcagagttggtcaccaggcagccaagtgagctgaattctcaagagtaacaaacccctcttaggatagatgggacacaggaacattgacttggcagagcataggaggaagaggtgcccaccacataaagtagttagcagtatcagctaagattttaacacatttttaaagggtgaatgtgcrctcgcacagtttatgtgtttaggataacttgtagcttagacacagaggagctttgcatccatttgcaagctcttttccatacgtttccactgtttgatctgtgagaaagactaggggacaaggcaggagattggagagcatctcccttggtgataaaggtgtggtggtgatgagctgttgctgagggacaggagccaactctgcccatttcctgaaaaccttctcctttatgaagcaagagtctaagctgcagagggagaagcagtgaactttcctgcttttacagcccaggtgaagtgccattgctttgatgagtttggtaggagcaaaacccacttgcttctggaagagaggtagaaaaccctcactcctccaggaccatgcaaagatcacttacttctgggagaaaggtgggagcataagccttttgacactaggggctgggtgtggaaggcaggagatgttagaactaggaccctgcactgataaaaagcagaggtctgccaccagtggggatagggcaagaaacttgaccctggcaaaggtccccctcccgcaccccaagatacaaagttataggacaggaacactgaaaaagttacattcctgaggcccaggctcaaagaccccctacctaagatgaggctgcaccaagatatctgagaatactctacatccaccattagcctagtgtgtagtaacaagcaacagttgtctactactagagaagggacaagagtgtggagagagaccgcctgctgaaaactgagggtggagcaggaacactgaggcaaaccctttggcatctgaggctgcacgttaaacaaaaggtaatagtggcccactattggaggtctgaaacctgttgtgctgtgattgccatagcaacaaaaagcctgaaacccagctcaactgctaactagactggttattcaaccccctggacttaacagcctagcagaggtggaatgttcatttctgagcataaatactgttgcccctatcatcactgaatatccagcattcaacatttcaaaatcaaaaatttctgggcacacaaaataggaaaacttaccaaaacataaagcaacaacaggtctagtgtcagagatgacccagatattggaagtattagagaatttaaagtaactgtgatttatatggtaaaaaaaaatccactgaaaaaacaacatgcctggatgtatagggcatttcaacagagagaggatctataaaataatcaaatgaagatgctagaaataggccgggcgtggtggctcacgcctgtaatcccagcactttgggaggctgaggtgggcggatcacctgaggtcaggagtttgagaccagtctgaccarcatggagaaaccycatctctastaaaaatacaaaattagccaggcgtggtggcacatccccgtaatcccagctactcaggaggctgaggcaggagaatcgcttgaacccgggaggcggaggttgcggtgagccgagattgcaccattgcactctagcataggcaacaagagcaaaacactgtctcaaatgaaaaaaaaatgctagaaataaaaaagatgatatctgagatgwcgcatttcttcaatgggcttatcaggagtttgaacatgtctggtgaaagaatcagtgaacttgaaaatagaaactatccaaactgaaacatagagatagaaaagagtgaaaaatgagaacatccaatggctttgagacagcataaaaagagatctaatatatatgcaatcggcatctcagaaagagaaaggagaaatgggaaggaagaattatttaaagaaatactagccaggacaaagcatagatctaagaagaccagaggactcagagcaggataaatgcgtgcgagcgcacacacacacacatacacacacaccctcacccctagacaccgcacgcgcgtgcacacacacacacacacctcctcacccctagacaccgcacgcgcgcgcacacacacacaccctcacccctagacaccgcacgcgcrcacacacacaccctcacccctagacaccgcacgcgcgcacacacacacccccctcacctctagacactgcgcgcgcgcacacacacacactcacccctagacactgcacgcgcacacacacacaccctcacccctagacaccgcacgcgcgcacacacacacccccctcacctctagacactgcgcgcgcgcacacacacacactcacccctagacactgcacgcgcgcgcgcrcacacaccctcacccctagacaccgcacgtgcgcgcgcgcacacacacacacacaccctcacccctagatacctcataaactgctgaaaataaaaaggataatcttggaagtagccagagacaaaggtgacaattgaacaggcttctgatcagaaactatgtagtctagaggacaaaagaatatcatattaaaagtactgaaagtaaaaagcaaaaattaaaaagtcaactgaaatatatacccagttaaaatacctttccaggatgaagacaaagtagctttttagataaacagaaattgagagaattaattatatcaaatctataccacaagaaatggtaaaggaaaatcttttttttttttcttttcttttcttttttttttttttttgagatggagttttgctcttgttgcccaggctggagtgcaatggcacgatctaggctcactgcaacctctgcctcccgggttcaagcgattctcctgcctcagcttcccaaatagtggggaacaggtctgctgccatgcccagctaatttttatgtttttagtagagacagggtttcaccatgttggccaggttggtcttgaactcctgacctcgggtgatctgcccccaaaagtgctgggattacagatgtgagctaccgtgcctggctgtaaaggaaattatttaggtaaaagtaatgtgataccagatggaaattgatttacatgaataaatgagcactggaaatggtaaaaattagggtaaatgtaaaggaaataacaattctacacaaattctttcagaaaatagaggaggaggtaagaacttcctgataaactttcaggcccagcattaccctgatgtatatatactcatgagcgtagatgcaaacacccaaaaaatgagaaatcaaatccaacaatatatcagaaggataataatacattatgactagtcagggtttatctcaggaattcaagattgtttcaaaatttaaaaactagtcagtataaatcttgtcagaaacctaaaaaaggaacaccaccatctaatcatctcagtagatttagaaaaagtatatgacaaaatccaacaactatttctggaaaaaaaaatcttagccaggtgtgatgacacacacctgtaatcccagctattaggaggctgaggctggagaatctcttgagcccaacagttttagtctagtctaggcaagatagtgagaccctgtcttaaaataaaataaggcctggcatggtggctcacgcctgtaatcctagcactttcggaggccgaggcaggtggatcatgaagtcaggagttcgaggccagcctggccaacatggtgaaaccccatccctactaaaaatacaaaaattagccaggygtggtggcaggcatctgtaatcccagctactcaggaagctgaggcaggagaattgcttgaacctgggaggcagagttgcagtgagccgagattgtgccactgtattccagcttgggcagcagagcgagactccatctcataaataaataaataaataaataacctcacaactcagtaaactagaaatagatgggagcttcctctgtgagaaacctacatgttcagttaaaggtgaaagactttttcctaagatcaggaaaaggccaaaagtgtctgctcttaaccacttttgtttaacagtatactggacattctagccagtacagtaaggcaacaaaaagaaaaagcattcacattgcagagaaagaagtaaagctgtcttttttttttctcagataacattatcatatgtaggaacctgcaaaagaaaaatgctggaacttccaagcgagtatagaaaggttatgggatataagatcaatatacaaaaatcagctgtgtttctacaaaccagcaaccaacaattggaaactgaagtttttcttaaactatcaaaatagcattaaaataagtgatacttagagatraatctggtaaatgttacataagatctataaactgmaaactatagaacatttctgagaggaaataatgagagaactaagtgaactgaaatatagatcatattcgtggatcagaagactcaatattgtgaagatgtcagtttgccccagatcaatgcgtatatttaatgcaaaataatcaaaattcaagtaggttaggtttttgtaggaaatgacaaactaattctaagattcgtatgagaatgtaaaggacctagaatagccaaaacaactttgaaaaataggaacaaaattggaggacttrcattacctgatttcaagacataatatatagccacagcagttaatactgtatgattggtgtaaagacagataaagtaatcaatgagacatagagaaagtttaagaaaactcacacctaccccacaaattgtcagtttgtttttgacacggggcaaaggcaattcattatagagaggatagacttttcaacaaatgatgctcaaacagtttgaaaaataaatccataccttgctccatatgcaaaagataaaatagatcatagacctaaatgttaaagactgaaattattaaaacttctagaggaaaccataagagaaaatttttgtgaccttgggttrggtaaaagtttcttacatatgactctagaagcatgatccttagaagaaaaatttgataaattagatctgttcttcagaagacactattaagtgaatgaaaagacaagtcagaatgggagaaaatatttgtaaatcacatagatgacaaaggactgtgttcagaattcataaagaacttctcaaaacacaataataaaacaacccaatttttagaaatatggaaaaatttttaagatgcttcaccaaagaacattggcagatggccagtaaacataagaaaagatgttcaacatcattagtcattaggacaatgtgagtaaatctccaatacacttgttaaaatatctgtactaaaaataacaaaaaacaaacaaacaaaaaaacagcaattgaccatacgaagtattgtggaagactgtagagcaactcaaactcccttacactgttggtgggaatataaaatggtacaacaactttagaaaacaggttctcaaaaatttaaatatacatctactatattactcagctatttaattcctaaggattaagagaaaatgaagcatcttttcatataaagtcttatacatgaatgttcattgcagctttacttgttatagctaaaactggaaacaacccaaatatcagtcaactgttgatggataagtcaattgtggtataaccattcaatgatataatactctttacatattctggttatgtgttgaaatttcttctttgactctgtggcttctcctgatgttttagattttattttgtaaacaacatgattgggttttattttttaatccaatctcacactgtattttaattagaatatttttcccatttacatttaatgtaattgcataggtcatcttacaatttgctttttctttttgccaactgctctatgtttctatttctcttatttattttatttgaattgattaagtagttttattatttcactttccccctcatctattagcttggaagttacagactcttttacttttcttgtgttagtgagcttagacattacaaaaaggacatattatcaaagtcgaatttcattggtatttttacccttttcctagataataatataattattatttaatcctcttctgacttatatgttactgttgttagctattttatttatatatttcaggtctcctagatattgttttatctaaccaatatctatttagatttacccacatagctatcattttttattacctgtagtatttccatttggaatcttttttttttttctgcctgaagaacaccttttagtattcagtacaagtctgctggtaacaaattatctttgtttttgtctgtttgaaaatgtcttccacatgcattttaaatagatgtttttattagcataggattttacactgtatatctgtagatttctagaaatatggaggcatatttatggctttttgactctgtggcttattttctttggccagttttggaaaattctcaggtatctttttacatgtgcctctgcctaatcttctctctctcctccttctaakactccaattttatgtatattagatcttttaatagtatttccatgtcctttatcttcttttctttcttttccatccttttttctgtttgtgattcattggtgttttattctaatacaccttctgtctcactaattcatctgtatctaacctgatttttattttgattattgtatttatctagtctagaatttccatttagctttttaaaatctgccattttttatatcttagagaattctctgttgaaatcctcaattgtatcttttatcctcttgaaccatgtatgtatcatatagcactagtatctggagctccttttggcatgtttatattttgtattgtttctgcttattatcttatctccttatatatgtkgatattattgattatgtgcttggtcttgtatttgacaaattatttgtagaaatagtttgaggcctargatgatatctttctcatggaaggaatatattttcttctggcagacacctaactgcactagcaatagagtcttacttaacctgatttcaggtactggatgatttgaagctgggctgtcctcccctgcaaaggacagtctattcaggactgcccttattccctactgcagaggggcttaccagggactctgcaaggctgtcagagaagtcacttaggctctcagtccctcaagaccctcttctagaatcagcaaataccccccaggcccaaagcaggccccaaattacatgctcacttttctggatatttgttgtctcttagatcttggaagggtaattttttactaccctgttagtttccataggcctgtatgcagatgatttttatgttttgttcagctttaaaaattatccttgccaagagggttgattagagttacctagtctgcctttattgaaagaggaagttccctttcctgttattattccttcttgatttaatcttagaatgagattaaccccaacatttctatttatatacctgcataggttctctgtgcacatatatccctctaccataccctgtcaccatctccacatccacacagatcaactgattgttttctaacaatacgttagaagtaatcaagaacctaaaattaaatattttgccaaaacccttgtgatatatgtccttaatttacacttctagttcttaagcttccttattttgttggtatgacattacatgtatgaagagaartaattagatgaagggcaagataaggggagataggaaagcaaacattcccagcattgagaaggaaagagaagcatgcagattgaatktagattcaaagaactgagagaaaatcagtgtgcctagagcataaagcaaaaggagttgccgagacagtgaaaaagcccaaattatgcagatccttaggtgcattatgcaagagaatattcaaattatagttttaaatgctttgaaatctcatgctgactgtaaagtcgaaaatgaatcagaagagagtgatgtaggatggaatggaagggatgtagtgggtgaggatcacttggaatctgttacccttacctgagcaaaccttcaaagtagcttggactatggtggaagtagcctggttggagaggtggatggattaaagaaatagacaacaaagcaaaaccaggactatatgagcaataaaaaaccaatagtatcaacgataactcctgaaatcctggtttgtaaaccaggtgggtaacagtggcacacactaagataggagactagagaaagcccacattaggacaagagactggaggaggcccaggtgttacaggaaatactgtgagctcaattttggacttgttacctttgagatacctttgagacatccgaagtagagtttgcagagagttgtatatacggatgtgatactctgaacaggtctgccaataaaaaagtaaaatttatacagattacatttaaagtcgttggtgtggaggagattgtctacagagaaaatgaagaccaaaagtggagaactgctattggaaacataattttacaccaagaaaataaggaagcttaagaactagaagtgtaaattaaggacatatatcacaagggttttggcaaaatatttaattttaggttcttgattacttctaacgtattgttagaaaacaatcagttgatctgtgtggatgtggagatggtgaacagggtatggtagaggggtatgtgtgcacagagaacctatgcaggtatataaatagaaatgttggggttaatctcattctaagattaaatcaagaaggaataataacaggaaagggaacttcctctttcaataaaggcagacgaggtaactctaatcaactctcttggcaaggataatttttaaagctgaacaaaacataaaaatcatctgcatacaggcctatggaaactaacagggtagtaaaaaattacccttccaagatctaagagacaacaaatatccagaaaagtgagcatgtaatttggggcctgctttgggcctgggggtgtttgctgattctagaagagggtcttgagggactgagagcctaagtgacttctctgacagccttgcggagtccctgataagcccctctgcagtaggaataagggcagtcctgaatagactgtcctttgcaggggaggacagcccagcttcaaatcatccagtacctgaaatcaggttaagtaagactctactgccagtgcagttaggtgtctgtacattgttagtcctgctcattgctgggtctctaggtctctagcacctagcagcacagtgccttgaacataattgagcatttgagtgagtgtatatagtcaacaggaatcactgaaaggtagagatccttatctttgacttctttccagtttcccagaatacgtagtatgatgctgggacttgaatgaaattaaaatgatattatcttcagaattagattttctttgggctacttttgagagagattaggatagaaggtgaaagtattatgactgacttgggagaaaaaaagccctgtttcctctttcttatagatatttgctagactttccatggctgcttttttttctaagagaactgtgtataatttttggaaaaaaatattgaattaattaaatattgctatagtgaatcattcagaaggaatggttctttatcattcacatccattaacaagattatttctttgaaaagcacatcctttctttgcaaagttttgaattgctgcttatttacattttaagcctaaattatgaaattcctgtgattctaatttattacgtttaaaaatgacttagcagagtactgcagctggaaggctcagttgcaaaactatggtctttaaattgatttgtttgttttgatgttcttatgatttgcatggcagcatattttattgtatatttacaatagtcatatgatacttgtatttcctttatggaaagagttcttaaggatatttttatgtgtacctcctcatgaatcttgctaatcactgaaatacagacttaggaatggtaaaacatatctccctttgttatttctgtttattgtcttcacttcatttttccctctcagattttgattttcagtgatctcatctagtcctttacaccctttattttagtggtggaatgtggcaatcagggatagggaaaatgatgaggtataatcattaaaggtatcttagaacctggcatatttcaattattcatatttaacctatttgaaagtcttttataaatatcatgattttataatgaagagggctattacactattatgttaattactaaaacctcccacatttatgatctttaatagcccagatattttatatgtccctgatcttcagtgttttaatatagaagtccctattatttaatttcaaaataatcaatgctatctctaaaaatacacagatattttgtaattttagagttcctttaccttttactagcaytattcatgataaatatatttttcagttttattcaataagattcttttcagaatttgtgaaacttaaacacttgctcttttggagtaagccaatgatttatttaatgcttttctatattgtgtattttaaggagaaatatcttcctgatggatataatacaggcttgttggagacagctatttccctctctgcaaggagtgtattatgttgttttacaaaatgctttcttgcaccactcatgttaactaaagagcgaatttaaacacagacgtgtctactgcactttccttccttgaatgggtacagtttttaaaacttggaaacgtgccattaactcttaatgtctcatttcatttttgaggaattcaagttgggatgccagccgtacaatagtaatgtaagaggaatggtaactggcttaaggcatgcacttaagcaatagaggaatttacttttcagtgtcttccaaggtccatgaggatgcacacttatttatccagagagtatggatctcacatatgtttgtccagagggtgtgactctgtggaggagaacacttactggtaagtattgaactcttattgtattatgtttcagaaaaatatgtttagaaaatcagttgatttttagcagtgatgaamtctcttagtctgtgctggtttcttaacagtggacagtcccagatgttgaagtcagcacaacaagagaaaaacccaaatcctgataagacttgaggatttttcgaaaattaaatgcaaaatagttggggcaaatgttgctgcgggagtcaagactaagtaatacagtaagaagatatgaagttggagagcttctcatgttcttcctttgtataaagtttgcatacgtacaaaacccaggactttaatgactttaagagggggcagaattgcatctyttggaagttaacagactcatgtgaactggaatgtacgttgtggccctcacaattgattttaatatttatttgcaaagtcctttctgtttctaaataaaagctgtgccttctgaaacctgtaagtgatgtatactggccacatcaaatcttttaaaagtgttttccaaaccccaaattgttagtgtggaagaaatgtttcttttgggaacactaaaacaaaggggtatgggaggattgatttcagagaccacttgctgcttctgctttatactttaacattctttccctctttctctcagccaagaactctcatgatatgtaactgacttttggttgaaaaaacatgtaaaataatgtttttgtgtatgatacaaaagtttagaataaaacaaaaatcagccactctaatatgtggtaggttttctggcaattaaccatagcacatagacatttgccacaggaaatgccactgccagatctcccacaccgccacatgaaggcttagcattgctttaagtcatgccttaataaatgatgaatggaagtgcagagtccgtgaggaagaattcagtgcataggagtgttttggcatctggtagacaattgtttgttagagttgccagttattagcttgctggcctttatcaaagtgctttactattctgtttcttctgctgtagaaatccctgtgttatcccctattgtgatgactgacagtgtcccactgtgctgaatcaagaagactgggtatataggtccaaatcatggttatggagatgttagggtagaagacagcagtatggacatgatagaaagaggattgagaatacatttctrtgtgatccatttttgctttgccttctatctaattctgccaattcctaatctttaggactcacctcaaaatctcttgaagccactttttgggagatgtgcaaaatgtgtgtgaagggagagagcatcaagagcagaaagcgtaggtgagagggtaagagacatttagtcacccggcagctgcttactgaatgcctgctgtgtgctaggaggtggggacacatgaagcttgtgtccagttttgaaagataggccataaacaaataaatatgttgtgtattggatgatggtaatgaataaactggtaaaggggggtagtgagaactgggataaggaggtgactttcagctcgaagtagggtcatcagggaaggcctcattgacaaggtggtatttgagtagaggcttgaaagaggtaggggagccagccatatggaaatccaggaaaagtggaactgagaacacatactgtaagtcattaaaaggactttgacatttcctttgagtgagatggaagcccattggagagttttgagcagaaaagtgacattatctgacttatttcttaaaataattcctcaggctacagtatagagaatggatagtagaggaacagtgatggaatcagggactggttaaaggttttttgagtaattgaggctggagaagatggtgacttggactagggtggcaacaggagaggtgattagtgttcagattctggatttgttttgaaggtagacccttcaggatttattggtcttttgactgtggggagtgagggaatgagaggagttaaggatgaccccrcagtttttgggctgagcagctggaatggcagagatgacatttactatttatcaggatgaggaagattacaggaggagcaggttttagggagagatcagtgaaggtgcgagcaactgagattccaactagatatccaaaggtaacatagacagaagacagtggatatacaatagtaattatttaaacgttcattttgcacaagttgataaatcacaaaagttctgtttaaatgatttaaatcttcatgaagatgttgctataattcacattttatagattaggaaataatgcagaaggattaatattcctaagaycactgatatgaaactattttatgactaagttccaggttgttctactgactttattatattataaaataggcatataagggarattttcattattgccataattgagcaagtaatacttcttgttgcctttacatyacacacacaaacacacacactttctctctctatctctctctctcatagagaagtacagtaatatctttgaggcttacgtagaaagatagtttttttgaccctttggtgtgttgaaaacatactataatataggctttaattttggatatgcattttaaaattctttaaatggtgaatggagatgactatgaatataattaatttttaaaagcatattcttaagaaattttcttttgaaaacagtttacttcatggtaatttgtgttctcttcagttgtttaaaggggaaatattttgcatactcttaagtgtattcttttttatagtagaatgtatgatgtttattttttgaaacacaaatacaaataatggaaacacatgtgattgtctgagctttgacattgttctaggtaggatgacaaactgtcacaatccaaacaggaaaacagaaattaaaacctctctaaagtttctactctgttgcttaaaggtttatgyactgtttataatttttattcaataaagcgrtggcaagttactttatcttataaaatcctaagacacttaaattttatgtagtgtaatgagttaaatgatcaggagcagattaatatagttctctgaaataagtacatatccttaaaggtcatatgtcttaattttgtggaatatgactatttagtttctacaaccttggatttttaaaaattataatttgtgatctctcatctatgtaaatagcaaactctttctgattatacaggaagccctgcatgttgcaggagtggaaatgcagttaacggctgcgatgtcatttctgaccattctgcaggacgaatcagtgtcaattcatgcatatacccactcattcctccaagtcattctcctgcatctggagcacagggacacaggtcaggggcctggcatgcttaattatatacttgtttattgtttttttgtgtatggccatgatattatataaatactgttagcctgatgaggataactgagtaaggccatgctgcctakgagttgagcagtggaatgacttaaaatagctatggctgtcttataaaacccacaaaatttaatatccttgaaagctgaagatccattaattcatcttatgatttatactttcttgttactttttttccttttctagcagtcatgtttatagtattgtacaataaaagagcaaaccttggtttaaagatatctcaccaatactatttttaaaaatataaaaattttctagatgttgactgagacaaaataatagagaaactttttagaatagtaatgaaaataattatttccattttatcattaagtgctattgtaactattaatggctgagttgaaactgaatttgaagtgagacgtttaatttagtatgttttatctctgtcaaccaggtgtcagcaatgcatggctggaaactcttctgtctgttatagaagtattgccaaaagaaaccctacggcatgaggtaatactttcatgggggcaaatactaataagtaagtcactctaaggtttttttttaaaaggtttcttgtcaaaaatggtttttaaaaaagaaagttgtttttcattttgaatgtaacacgtgcacattggaggaaatttgagaaatataaaatatagaaggaagaaaaaagaattcatagctctgtacttgtccacttttaaggtcctgatgtatttcctttcagatttttttcctatatatggttgctgcttggcttgctatatcagtgatcatactgaatttatatatggttgtttttcacttagcattactttcctatattttttaaactcatttgatagtagctgcagaatattttacttgtgaaacatttaagcctgttttcaggcttatattttactattgaataggacattaatgagcatttctgtagagctcttcctgtttttcagataatttaattgtagctttcaaacaggaattaatggatcagagggcattaatattcttaagcttttgactaacaatatgtgaagatgctcttttcctagacttttatcagcaatagtgtttctgttacatttaatgggccaaaaatggaattacattttattggaatttttaaattattgtgctgttgaatattttctcatatttatatcagtttctctttattcctttgcaattgtttgatcctatcctttaatcactatttatatgtgctatttacctattatggttgccaattctttgttatatttacaaatattattcccagcatgttgtttgcctattaattttcaacattgaacagcatactcttctctaaagactttaaataaattacaatgacagaagaagaaaaatggaaagaaaagtatccactaatgaaaagattttgtattctttgaacattattcctatatacatttctttccaaatatgtcatgattgaaaaaaagagtcatcagccaatgaaatgtcctctactgacttcattaagtgtctttgtcctttctttgtcttcatacagtttatggtcctgtcacaaygcttaaatactggcttgaaaatgggaagattttctagttataaggatgtttgcatacttgatgccaaacatctagatgattatgcatatttaagtgctgaatgtaatatagacatgtgatttttatatttttttgaaaagcaatatgctgtataatgcaatttttactctagaataccatattatttaacatgtrgtttcaaagattttagatatgtaatttattctaaacttttcacttctaaattatcaatgcatattcagtaattccagctactttgagaggaaacaagccagttgactatagagtcatagaattttagaaattaaagagatcttagtaggacatattyttgtttccattttaaatagatgagaaactggagattagaaatagcgagattatgggctgggcgcggtggctcacacctgtaatcccagccctgtgggaggctgaggcgggcggatcatgaggtcaggagattgagaccgtcctggctaacacggtgaaaccccgtctctactaaaaatacaaaaaattagctgggcgtggtggcaggcgcstgtagtcccagctactcgggaggctgaggcaagagaatggcgtgaacccgggaggtggagcttgcagtgagccgagatcgcgccactgcactccagcctgggcgacagagcgagactccgtctcaaaaaaaaaaaaagagaaatagcgagattatttggacaaactagagaactgggactagaatcagagtctgatcttcatagtgttttatggtctgtcaggctgttgtagtatttgagtgtccagtatatacataatgcaatatcagacttggcttattgtactcaaatgacagaattatttaataggatttatttgaagctataatgtttttcatcccattaggatacatataaaaattaatctatatggaataaaaatacatttcaaggtatttagtcattatttgctcttttctttttaaaatatgtatttcaaaattctacttttatctgtgcatacagagcattgtaaaatcaccataaactttacttcagttttttcctaattgttttaattgcataatttgtaattatctttaccttaataactcagaagacaaataagataatccaagttattgagtcatgaacctcaaatcgtaattcaggttctttaaaaacatttagaactttaaaatactctgaaggaatagctgacatgagtggcatgaatgtataaaattttgtgaatttttttctctaaattttctctttagattttgaatccacttgtttccaaggcacaactttcccaaacagtccagtctcgtttagttagttgtaaaattttaggaaaattgaccaacaaatttgatgcccacacgtgagtatttgtatgtaattttcggtctactttattacattsgtttaaaatgtataatgactgtgtaacaatatatttgtgttatttcatactgcatacaaatttagttatcttaactrttttaactttatggaattctcatgacgaatttacttattcagatgccttycttttcaatctcataacttttcagaattggtaaggttaacttttttcctacttcctatcttaatcttccctatctcataccaaatatagttttgaggataaaatagcgttatcttattgactttcaaaattggcagcggcataaagatagaattgctgcttttttacactgttgttatgaatttgttattttgaataatttaacttattgtgaggttttatggagcatgtttataattcatgtgctacttcttgcctgcttattaaataccaaatgaaaagaatggaatgttttataattatgatacaagagtaaagctgaagartattttggttgatggttgctagactcagatattctactgctacagccttttatcttagctatagacatttcaactgccaatccaaaattaaccattattttaaaaagactgtgtgatatacataatttacaagtagctaataacatccaaatttaataacatgtaaaataccttgtaaactattattttttttctattaaagtacrtttgttattattaaggtgagttaagattttaatgataattgyttgggaatattattctgaaacactcattcatttgcatgtttcttttctccccaccttcagcattaagcgagaaatacttcctctggtaaaatcactctgtcaagatgtagaatatgaagttcgatcttgtatgtgtcggcaattagaaaatatagcccagggcattgggtaggtatactttgaattccttatgccatttccatgaaaacatgccattgaaaggctgtatttgatctttaaaaatgatcataacaagtamctcctctatgtctggattaaaagagataaagaggaatgtgcttagcatggtggtaggcgtttgattaatgttaatttctttttttctcaccttagttgcttagttatcattccagacacctagattcaggaaagaaaagatagcccaatataaaccatacttggaatatgtttgactggctattctttgactatattattgggtcatttcagatgggattgcagttgtccctccatatccttgggaacttggttccaggacctcttttggataccaaaatctgaggatgctcaagtctctgatataaaagagtgtagtatttccatatgacttgcttatatccttccacatgtttaaaatcatctctagatgctaatagtacctaatacaatataaatgctatgtaaatagttatgctgtattgttcaggaaatawtgacaagaaaaaagtctgtacatgttcagtaaagaagaaatttttttctgaatattttctattcatggttggttaaatccacagatgtggaacctgcagatgttgagggccgactacackctaatggaagcctttctatagctcctgtgcaacttcaggcttccaatgtttgttttgttgctctccttgktctttttttttttttttttttttttttttttgagagggagtctcactctgtcacccaggctggagtgcagtggcgcgatctcggctcactgcaagctccgcctcccaggttcatgccattctcctgcctcagcctcccaagtagctgggactacaggtgcccaccaccacgcccrgctaattttttgtatttttagtagagacggggtttcaccgtgttagccaggatggtctcgatctcctgacctcgtgatccgcctgcctcggcctcccaaagtgctgggattacaggtgtgagccaccgcgcccagctgttgctccccttgttctatgggtgcctgaagctccaggagaggcatagcagccaatctcttcacccataagaactgatctcatttcaatcttagaagtgtgatattaaagggagtcttacctaaaaaccatcttgggaaatcttttcttttaaaaacaagattcaaaattggtacaaaaatcaytggaacctctcatttttagcagaagttgcactgatttcatctggttctttgttgcacaagctaggacaatcagattgtggtcattggtacctttgttaattttttaaaaatctgggccaatatttaaggctccgaaaaggcttttgaatgtcacacagggtatggtagagtgtcacacagggtatggtggaatgtcacacagggtatggtagtgtactctgtcctgtgtccactgttgctaaatagtatttaagtgtcgtgttggaagtttaacacaattaatgaaagagttatctgttatgattattttcttttttaatgcccagagataattaagttgaatttgcatcactgtcacatgtttttgaaaaaaagagaactctgtttaaagattgaatggaaataacttttactatagagatgaaattatttttcttaaactattttctttcattgttaataaattcaaggatttcagtaggtatacaaatatattctgagcaaaatttatatgaaataaatttttatgaactttggatttgttctatcacattttactcttctacctcctctgtctatatcctgtatttgctgaatgtttgtgaagtactggtaatgttaacatctctatctgtatgatctagatcaatctcttagaaaaacatgtttttttgtggctcttcaattgcttaagtccttgtcattgtggtatgctgcctaatatggtagcccctagtcacatgtggctattttagtttaaaataaggaaaattaaagaaaattagagctttagttcctcattcataataaacttattttaaaaaatgctcaatagtaccctactgaagagtacaaatgataaacatttccatcattggagaaagttctacttgacagcattgtcttagagtctttgagatttgcgctgaaatttttaaaagttttctacaactcttaataactttcttggactctatcaacatcttatgtcaattataattgatgctgttttccatcttgtacccaagaaagctaaccacatcacaaggctctccttgatcagagtgtttgtcattacagtgacaccttatcatgaggaataagcagaaacaaaatgttgaatacaaactatttgtgattgtattataaatattgtatactccctaaaagtatttatattatgtttcattctgctaggtaggacacctagagtgatatatcatcttctatatagaaattagttaccataatttcatgtattaggtgaatggaaaataatttataccctgaaatctagatagaaatatattatttaggtttctgcagttactactgataagtttttctaattagtccagatttttgctgaagttgcttaaaatggaaaactatattataatttataaagtttgatataaactcttagttattaagatttctgtaggtaacaatattatgctggaggaagtgggattgattgaaatcattatgaaattactattaatgtttcttatatgtatggtgtgctttcccaataagactgaaagcttctggagagcaggaacagtatctttatgatttttcatattttctgcagcaactagcccmgtcactggtttttagtaagttcctgctacacatttattgatttgatttattttcttctattgcttattgtgcaggacagaacttacaaaaagtgtggtgctccctgaattaatagaactttctagggatgaaggcagcagtgtacgacttgcagcttttgaaactttggttaatctgcttgatatatttgatacaggtaaatcatgtggctacatctttgcttctgaaaacagtgtttttctacatgttttatgtcactaataaggaataaaagtagatttagaatttcctatgttaagcctcccttcctctccctctttttatgattcattctgttttcgtgtcttcttggctttcacttttaccctcatggtgtcgtagtccattttgtgttgctgtaacagaatacctgagaccaggtaatttataaaggaatttattttggcccacatttctagaggctgggaagttcaagatcaggcagccccatctgacctgtttctgatgagggcctcatgccacctcgtaatctggcagagaagtggaaggtgaagcaggcctgcaaaagggagagggaacaaaagaagctgactttgtaacaacctgctctccagagaactaacccagtcccacgagagctaacccagtcacttgtgaaggagatctcaataccacaggaacttcaccagtcaacccacgagggtggagccagtgggtggacccatgcggccccacctcttaaagatttcaccttccagtattgctgcactggggccaagccttgacaggcattttgatggagacaaaccatattaaaaccagtaccctatggcatacagtgttgctacatattccatctctcttttctcycatcaaaacttaactgacttgtgtgtgtatagggctaagaatttgactttaactttttcacctaattgacattaagacagatcctgagacattgtctacatgagtttcctctccttaataatattttaatgctagagatctcatggccattgggggagaaatttgggatggggtatttgagtgggagagggtaaagagatattccttagtgttatgtaaatcatgtcacaaagacagttaactgctctactgaatgtatggctagactcttgactaatgctggatattagttatcagtaaacattaactattttgataaagagaaatttggaggagtaaatgtcaagtacttaggtacagaattcaatcgtataattatagtattacatttacttggattaccaacattttatctgaactctaggaagcctcttaaagattattgcaatatggacaataattgtgtttggaaattccagaacagtcatttagacaatatgacaaaccagaggagtaaaactgcagtacatgataagtgaatgaataaatcttttttcctctaataatggggcatccccaggctccaaactagaaccttgccatcatctttgatcttttctcttttactgcccacacccatttatcacagagctgggcctaacctgtgtttgtggctttatttcctaccattctttcccactcctcttgtgtctgatgctccagtcccacttccttagcataccagattctttcacacctctagtcttctctcatactttttctttctctattgtttccttccctctatttttgtcctagccaactccttctgcttcttttttttttttattattatagtttaagttctagggtacatgggcacgacgtgcaggtttgttacatatgtatacatgtgccatgttggtgtgctgcacccattaactcgtcatttacattaggtatatctcctaatgctatccctcccccctccccccaccccacgacaggccccggtgttcgatgttccccaccctgtgtccaagtgttctcattgttcaattcccacctatgagtgagaacttgcggtgtttggtttttttgtccttgcaatagtttgctgagaatgatccttctgcttctttagttcccagtttaaatacagtttcctccctgacatctttctaaatcctttacaccaggggttggcaaactatggcccttagaccaaatctggcccaccgcctgtttttgtgaataaagtttattgggacagagccacacttatttgttcacatattgtctgtggctgtttttgtgatgcaagaacagagctgagtagttgagacagagcctgcaaagcctagaatatttacaaaaaaagtttatagatccctgccttataccagctattaagacagtgatcacattgtcttatattttttgtgtttggcttttttgctggtttacatttctcaaaatcagagaccatttattattcatatttctacttctacttagttacaaggcttgttctgtaagaaatacagtgtgttgaatgaatgtcatttaacaaaaatagtagatatggcaccgaaatgtaatgataatagtaataataatactcataagcctgttatagcattttatttagtatttctagataataaagaagtgattcatttctgaaatttaagaaaactgtgagaaatttggagagcatttagaattgagacttaaaaatcaccagtatgtcagatacttatgacctaagcagatgtactcaaataattgattaattttttaaagaagagccatctaagaagtaaaagtgatgaaattcaatacatagaacatattataagctaatgtaattttagtaawaaatgaaatgataaaatgggcttaagctgtagcatggtatgagatgtgtgtaaaagagaataagaaaagtttcctttgcttactrtttatctatttatgttaatggtgttagaattcttttagttattcaggctcaaatcctcaatcatcttagctttttaattcataatcactctttatattctgttcccaatggcctgcagtatgaagtccaaaccccttaacctgacattaaagtttttgatcatttcaagcctcctcttacccctttttcaccacccacctccatcgttgttgctttcaggtattttctattactatgaggctaacatagtaatttttctttctggaatttgtgtgtgtattagtttccacatgtgcaatgtggacgactgaatttaaagtatgtattattttgttttgttttccagatgacagaagtcaaactatacttcccttagtgaaatcattttgtgaaaaatctttcaaagcagatgaatcaattcttatttctttatctttccatttaggaaaactatgtcatggactatatggtatgatatatcctaagaattttgagactgtagataatttttcccttttttttctacctcagtcattaaactttggctcttcagttaattgtaaagcctaactcttaagtatataaaaatcttatgagatcttagaattttgatagcatcatttagagcacatttaggaatgactttttcaccaatagaacctatttgaaagaacagtgacagaatgaagtaagcatagctctttaaatctctgaatattttataattatgtattatttggtatgtgataatagaagctcaggcttattaactatttgtacgtagtaagtatacacttattaaccatttattgaataatttattatatcattagagaagttcagcttgggatgtagaataatgccataactcttggcattttgaacacatagttcttagctttccgtatcgatgtgagatagactgtttaataatgaactcgtaacaatatattatgagtttctagctccttgagatagttaatgaagtggaaccattccattgattaaaaatattttgaatttatttgctgtctttcagattcaatttttaagctccttccctgcagagacacatacacacatgcatgtgtcttttctgtcagcaattttagaacatttactataatagcagatgtataaatagccacaatgttactattagtgactttttagtggcctacaatatgatacatgctgcagcaattaatgcagctacagttcctgcgttatgtaagttatacttttgaaattaaaatattactggtattaacatgaggtaaaataatgtgatctgttagattcctaacagatactcttttcatgttccttttatttataaagtatctgtaaccatttatttaagtatttggctccaattatatttttattgtactttgattttccctttttaaattttgttttcaattgaaatgttgagctagttttttatatttgttttaggaattttcactccagatcagcacttgagatttttggaattttataagaaactttgtacattgggtttgcaacaagaaaatggacacaatgaaaaccagattccaccccaaatcctagagcaggagaagaaatatatttcagtacggaagaactgtgcttataactttccggtaataaatatgtatttatatttactgaggatttttattataactttaaaatatgtgcatagatggcattcaaaatattgccatttttgacacttgctgcttgcattatgtctagcatacatagtatgtgcagagtaaatatttgtgaaatttatatctctacgtataaatcagaataatagacacatatttggatcttycaaatatgatttttagttaaattacaattcagagaacatgatttcaatttaagtgaaacgattataatattaggtattgatgcatgtttttctttccttcccactcatctcctcccttccacctccaccaggccatgattgtttttgttgatcctaaaaacttccacatggaactctattctacattcttctgcctttgccatgaccctgaagtaccagtcagatacactattgctatttgcttttatgaagtaagtctgaagacttgatatcrctttacgtttgttgttaattctacctatgtatactagatgattttgtgcttatagattataagatatagactggatatctctttcatgttctagtcttaaatcttgtttaaaaatttccttaattttcttcttttttagtatgtttactgaatcatttccataaatacattatatttgtgtattcttttwttaacccattcattcagcatatctataccaagtgtttaaaccagacattgtggtagatatgggtgatgcggattttaaagtaaaatcagtttttatatgctttataatatttacagttaactttgcacctaaacttaagcacttgagaaccaatagaaaattgagacacattaattatttttactacaaatggatggtgtttcgtgagcatggcttttagattctgctattatgactataaagtaagagcaaaaataaattgaaacttttatgatgaatttaactttttaacccttgaagttgaaatttggggcatgtttcttgaatgacagcaagaagtgcacgtatgccgtggttgcaataaatacggataagctataactttcaacttcaaaactgacacataaaagcctctggataagtggtacaagttcttattctcagtgagaatatttcacccccttccttgcactgtgttcctatgtcagagcactttgatgatctgcaagtgtgcaggatatccatccatagcatcattattaatgttgcttagatttttttttggctattgggtgatagttttgcttttttaaaagaacgctttttctggtatgaaaatatatatgcattatacaaaatcctggacatcttctctttaaattaatttcagtgctgcacaattatatcatctttgtaaaacacacctgtagaactctgctttcggaggagcggggatagggcagaaagcactggccagctgagcagaatattcacctccaagatgcattaaatggtcacttaggcttggttaccatgtccacatgtacttgttagatcagtggtctccagagagggttgtacaagtttggagtctgagaatgcagtatttatgcaattttagactttctatttttttctcatcagtttaatatttaattttatttatgttttatagtagacataacatagcaccatataattaaacatatggaaatgtacatgtgtatacaaatatgtttcactggtggaagtgagtttgataatcattgatctatatttgctgggtggctagtttccatattctaccacaatcataccatgtaggtagggtaagaatgatgtgcctctccataaaatgaggggctagtgtaaattttttttttttttaaagtaatgaaaatccactggtggatttaaatttttctaacagtgtcaatgctagagtctgataattgcttttgtattctttgttctcatttttcagaataataacactttggaaatatttttgacaagtcaaaaacaaccctgttagagcaaagaattttaaaacactttctttatccagggaccattttttttttcaaataaaactttattcaagyccagtgtgttttagaaagaataaggtgaaatagaaactggtaaattcaccattgtgggctccgagtttataaggaggagacaaaaaaactactgtctacaaggggaactgtattattctggactctcccaactcctctcatgctggttaaagtctttgatggggaaaagtaaagttggtttgctttcttaggagttataactaccccgacatcactgtaggccttcagtagaagttaccctttgggaagttctgaactggtatgaacacttgtatgcctaggatatcctttaagaccctgttggctcctctaagactttaaaatgtgaactagaggcccctgtgggcttgttattgctgttgatgtgaaagtaatgactctggtaaatcccattcttttgtatttcctcaccccatgtgtgtctgcacattccagcatgtcacgaggcagactagaaagctggttatttgtgccactaatttttatagaatctaattttatatttgtgttataacatggctttattttagaagaaawatataacaaggatgtatttttaaaaattattattgtaacctgtatctgtctagtactctcaaatctgagagactttattgctatattttaggtatctaagcttctgaattctggagtatatttaatacataaagaactaataacattattacaagatgaatcactggaggtaatattttcttactctttgatttttaattcttttatgtttggtccaaatataccaatgccttttctccccttcttcttggaatcgtgtcaactctttcagctgactagccccagaagcttcaaattgttgtaccactatatcataaataggatattgggaagatagtttaaaaaataaggttttaaaatatattcagttttaaaacttagtatatgtatatttgtttattaagaaaaatttaggaagtgccaaaaaacagacaaaagaatgcctttaatttcaattactgttactatttgttttctttttcttttttatatgaatattcttttctatataaaggtttttattttactcaattgtaatcatatatcacattttataacttgtttctcttgccattgtgtagtattttaccacttaatatgtacttatgaagactttgaaatactttattttgatgctatatttagatattcctttcacctaaatgactgttagtttgccaaagcgcagctcatgaatattttgatatcactgagaatattatccaatttaaacaacgtttcgaaagtttggaggcagtttttgaacatgttagttttgtagaagtagctgtctcagatttagactatttggacaatgtcaagaggcaggtacactaatctctttttgaaggttggccaaggcagttgatcatgtttctaagacttttcagcaagaagatggcagagtaagaaaatacaaatcctcaaaatgttatttgggggaaaaaaaaaaaccactactactatatagaaattgacatgtagaattaatctagcaaaaacatagtaatcactataacagtaatcaatatctctgttaaaaggtactagatgctcttatagatcatcttccagaaatcttggaacttatgtctactggtggagaaagcagtgttcaagaaaataaggtaaacttcatctttcagaaacattctgagttgtgtaaatattatcctactctacagggtgttttgaggcatcaatgaaagaatgtttggaaaacttgtaaaatagtgcatgccacatagcaggtggtcagtaaaagcctattagagtttgaacagcttgaatttcctctatctttcttacattaataattttaaattaccatgattgttgtctattgtctttggagtttatgttcatattttcatttttcattagcattaatgattattccaagaatagcaaataggacaaaagggtagaaatttattctttattattattttttaagcctctgtgtaacctaagaaaagggtaggatttaggaggtcaaagcttattgacagtaataatatgtaatacattttactgtagttggaagagttgctrtgataatctgacaggaagaagaatgagttgtagtttttatttcaaaatttggttcccaggaatcatactttttacttaatgatttcttttaaaagtgtttgatttaaccagataattatctccttgtgacaactaagatgtctcctaaactctgaaatgagaaggagtattctcttccccaatgtgttataagactgagtaattttactgagtgctgcaatttatttataattgattttttgatgcgtttcattttcagttatcttctctgcctgacttgattccagcactcacagctgctgaacagcgagctgcagcctctttaaaatggagaactcatgagaagctacttcagaaatatgcctgcctgccacatgtcatatcaagcgatcagatttattaccgtttcttacaaagaatgttcacaatcatgatgacaaatgtgagctcagtacctttcatcttattcttttgaactcatggttggttctggaattaccaaaactcttcatattttcaaaatagtagaacaaactcagttcattccattctacctaggaggatgtcagcttcgtaggtccagaagaggggactcaggtttccctttgcctccccactaggtctccctctgagaatcttctctctagctggagagaggaacgactaggtggcactttcacctaccctttgtttatatactgccaagaacagagtagactcacttcaaacttgaaatagttcttcttaagaggaaggttgacaggactcagtgaccttgactgcaaaggaccttcttctgttctgatgtgcacctctgatgcatccacaaccttagtgtttgaccccagctatgctgttttgccaaggcaccccttaagcttcctactataagtttggttacttttagagtgtggcaatggaacagagaaagcttatacaaatacatggatgccctrctattgataaccttataattagtgttaaaagaaaaagactcctccctcaaaacaaggtggcactcaagcctccccacaaagttaattgtctacttttttcacagaaatttccaaggggattatttaactcataattcactgtacatttaacatgacatcctattgcaattttttgaaatatagaaacattccatggctctgtgatctcggcacagaaggcttgggacaagcccaactggtcaggcctgcctctggggcagatgctgagttggggtagtgcaagctgggtgggccccacactcatctgctgggctgaaaaccctgggctgcatgtgcctacctggttgtataccagttgtaccactgccctgcccagggatctcccatctttgacccactgcactgccagactaccagcagacataccttgcaagctcctctgagctggaatcaatcctactgaaactattcaaaaaattgaggaggaagtgttcctgtttaactcattctacaaagccaccatcaccctgataccaaaatctggmaaagacacaagaaaagaaaactgcaagtcagtattcctgacgaacatcaacataaaaatcctcaagaaaatactagcaaaccaaatccagtagcacatcaaaaagttaattcaccacaatcaagtgggcttcattcctgcaatgtgaggttagttcaacataagcaaatcaataaatgttatttgccacataaacaggattaaaagcaaaaattacatgatcatctcaatggatgcagaaaaggcttttgataaagtccagtgtctctttgtgttaaaaaccctcagcaaactaggcattgaaggaacatacctcaaaataataatagctgtctatgacaaacccactgccaacatcaaactgattgggcaaaagctggaagccatccccttgagaaytggaacaagacaaggatgcccactcataccactcctattaaacatagtactagaagtcctaggcagagcaatcaggcaaaagaaagaaattgaaggcatccarataggaaaagaggaagtcaaatgatctctctttgctgatgatatgattctatacctagaaaaccctaaggatcttgtcagaaggctcctagacctgataaaccactgcagtaaagtttcaggttgcaaaaccagtgtacaaaaatcagtagcatttctatacaccaataatgttcaagctgagagccaaatcaagaatgcaatcccaattttaatagccacaaaaaaaatatccagtaacacatctaaccaaggaggcgaaagagctctgcaaggggagctataaaacactgctgaaagaaatcatagatgacataaacaaatggaaaaacattccttactcatggattagaagaattaatattgttaaaatgaccatattgcccaaagcaatctacagattcaacacattcctatcaaactaccaatgtcatttttcacagaattaaaaaaattattttaaaattactcttgaatagccagcgcaatcttcagctgctatttcagccctctgtttacccagtgtcctatcagccttttacctgttagttgtagaatccattgatgatccttgcttgaattggtgatttcattataacttgaaaaataattttaaaattccatcatttatgcatttttaatggtggcattctgtgaagaagtgcattcctttgtccacattggttatttgattaccttgagctacgtttactaatgtaaagacaggatgaattcttaattttttcccttgaattatcaattttcagagctaggaggtggcgtagtagctatttttaatggtgacaaatgcactttgtttttaatgttgactctcttttagataaatgttattgcagttattattttttgtgcacaaattgttacaacttctttaagctggctcttatgtgcttttgacttgattacatttatctttgacttctggcccaaaagaataccttatgccataaactataatatatattttatatgaggtacaaaatatacatgttttcatatgactgttatatatgtatttgaaattctatcagtatatataaaatgaaagaaaagaataatatgcttttrtttagttcaccatttatcaaaaattcattttccttaagtctaatcatgtttctgcttatgtatattttttaaattttcttttctaaatcataggaaataccctctttttacattcaacagattaaaaaccccactcaaattgtacccgatagaatgtgaatagctcatataaaatatgagaggaggtagcaggcaacactgtctcagcaatgtaaagtttcaatttgaatttcaaggatccccactataatatttgggatctttagtaattcaacattatatttgtatgtaaatcaagataatgaacatgaatttatactggacacartacgtctggttgagagatttttctctaatatatggtttgaacccaaacccaggaaagataaatggccatatttatttagaattaaggttctgcctagtggtgtgacagaaattgaaaggacaaagggacttgaaatactggtaagaatgattgacatggtgtcctttggattctaaatgtcatctgtatcatgaagagctagaattaagccagaaggattgaagagtatacctgatcacaggatctctaaattaatatttcagtagtggcatatttttggtgatgtacctgacacatggcatgttatagcaaatgtttgtcagatgaatgaatgacaaagtccagggaacagctaaaagaataggtggcaggggtgtatttgatcatgtaagatgagatggcaaggaaatgagagtcaaatctggaggatttggacatgactatgccaaattaactttgtaatataattattggttgatttgcctgagtgattaacattaaattatgaagatacttccagaaggatgtaagttcartgagttgagaggcagtgaacactttagttttgtcaataacttaaaattgatttkgtggggtcaaattatctagactagaattagcctagtgtaactgtctgtcttacttacttcttcaagaatgttttacctgtccaaaaggcggcttcacgaactctatgcatttttctgcgttataatcgtaaacaagaacagagacatgaggtcattcaaaaattaattgaacgtaagtaatcattgtctactattttraaaaaggaaagtaaacaaactagttggctttagttatgtctaacttatgtatcattttgctgtgaataattaggttactattgggttttataagatgatttttattttctagaaatccttatggcaagattagatctgtgatgaatgaaagtaataattactctgttttcttttgtaaatgtctacactttagaaattaaaatatatttacttatattgaaagcccagtatctcccctgatgaaatagcatttggaactaaaatataaatagaatatccatgcatctaatcatttattttatggtcctatttcaatattcacataattaacagaatctgggatttttctttgaatagagttgatagtatatttgaatattaatttgatgagcctagttggtttataatgtcttaagaaactaagtcagtttacaaatgcaaatttattttaatttgktaagagctaaaatcaaggcaaaaacatttggtttatagtattgattctagaaatagttgcacacacctatatatacttagtgagtttgttaattattgtatatttgctttgcccataatgtcttaatatttttaccaaactatattatccagcataggcaggtaatgggattttctagttattggagtttaccagtttaagtgtgtatcactacttttcaaaaaattagagtacttttataaaattccatttaagaaaaaatatgctcagtatactttaatctttctttttatagtcttattttaattcggttttcatttttcagtggcaagagctcatgtttagaatgttttattttgaaagaagattcagtttggttttatttttgaacatttatgtaaaaagtagaaaattaaccttttaaatattgacctgaattattgtcagtaatgctgtttatatatgactgtatctactttaggcatttttaaggaaacaaagggaagaaaacagttaatttgattattaaaacacttagaagttatacagagctgtgtttgaattctagctctgcacctgccagctgtgtgactttaaactcactaaatcttagtatccttatcttttaagaggaagaagtatgtgcatcccttgggctgcttttcagggctaaatgagataatatgtgtaaagtacttagcacatagtgggtgataaaaagtagtaaatacagtcattccatagttaataaatgcttatgaaattgaatgaaatgtttgacaaaactgttttatggtttttgaggtgtcattttggggatttacaaacctgaggtatataataatgatatttttcctcttatgtcttgtatttgctagccaaattgtgggtatgaagaaacttcttatgcattttgtgtgtctaactttgtcactttaatttcatataggaaaaattaacttaagataatttttgttgttgtttctagaattgggccaaggaaaaagttactggaatagacttcgatttttggatacctgtgaatttattatagagatattttcaaaatcatttttctgtaaatatttctttctacctgctattgaactgacacatgatccagtagcaaatgtgaggtatgttatcaatgaaggaaaatattggaaattgtatttatttttatctactatagtgaacatatgcaaaatcttttccttagccaattaaaaacttaagtcaagaatttacacrtgctttgaaattcttagtattcataattgatgggcatcagtaagacttggaagcatactctttcaacactgtctcagatcttttgtctttactgggttgagagcagttagtcaaagccagattggtaagcttcttcggccatttggatatacacattgaaatgattagaagrttgagtagatgttattaatttatctaccattaaaactaaagaaaagacggtcagtagccttatcacttcaaagttgtttggtgagcatccgttagtttctagaggcccayttattcaaagaagtagaactgcttcaaagtcttcatcttgtcttctatgttttgccttatattattgaaatccagtaaaatgttaattgcatttgattaactgttaagttggaaggaacagacctgaaaatggcttgcctggaaatggaaaaaaataataaatatattttgtcctttttctctccaaaagagcacatcacttcctttttttttactgtggtaaaatatgtataatataaaatttactattttaaccatttataagtgtatagttgagtggcattaaagtacatgcacattattaagagctatttttgtacatttgataatagaatgaaaagaatgttaaaccctcagccattagatttctgtgttctaagtcctgtgtctctattttgaacttgaactcagatctgcaggaaagagagacatcagagtcagttggccaaaggcattcctgaacaaactctagaactccctgctgaattttcatacattggggcacttagtcttatgcatctgaaagatgcatatgtaccacttttataaacaactgatgtgaattttaggcaatatgtaaaacatcaaaactttttaataggaagagttggtgagataataagctaactgagattaatagtcttggtgttgagatatatatgaagatgaattgtcaaaagatacygaaaagttcaacttaagacttttatgagcattttttaatgggaacaaatctagaagtttttcttttgtattttaaatgtgagaaaatacagaaagcacaactgcattgactttagtttttgttgcatatttcttgtgctttataaatgagaggtggggtattgctgacatttaaagtgaattgaaaagaaccttttgggctgggcgtcatggctcatgcctgtaaatcccagcactttgggaggccgaggcagacaggatcacttgaggccaggagtttgagaccagcctggccaacatggtgaaaccccatctctactaaaaatacaaaaatgagccggtcgtggtggcacatgcctgcagtcccagctacttgggaggctgaggcaggagaatcgtatgaacctgggaggtggaggttgcagtgaaccgagatcacaccactgcactccagcctaggtgacagagcaagacttcgtctcaaaaaaaggaacctttggtaattctttagattttagctcttcctaaacaactaatgggtccatctttatgaacattttgtgaattaaaattgtgattctataaaagcaactttcaatgtgatgtattgtcacttatcaggcagttgacaaaaataatttgaaaggaaacgaaatcatctctactttgatcagtgtaactaagagcataacattgactctttgagaaagaaatctgccaattcaaaaaaccaaatgaagagtaattaaatattactctattaatttcagagatctgcagggcagcagattattgtataactgtgtgtcttggttcctactctcttgcctggccagctgccagccaagatatgtgtccagcaacactgtatgctaactggctttgggtataaaagcccttgctcagtgctttagggatgtgcagatagaatgaaagccatcacaggcaagggtggtaggatcatgttggttaggaggacagtttccggagccacactccctgagctgaaattccagctctatattaaatgtgtatctttagccaagttacaaaacttctgtgtgcattgatttccttagtacctaatttataaagtattctgaggtacaaataactgagataatatacataaattatctgaaaggtgtggtccctaatctcaagaatttgatcatctcatgggcccaggagtctcatagagatgaatcattaygatggcttgggtagcttctgctgaatatctgttttctagacatgccttgggttataaagaatggagtgtgcatagattgttaagtgtttttgtttttccttaagttaatgtttaaaatttaaattcaccaagtttagacaatgtcaagctggaaaaagactcttggtattcagagaagccttttccacagctgccagaaatgaaataatttatttggggggattgataytccttaattagagaaagcattactaggtttagctgtatccgtggtgagctgtgaatgagattgagaccattgttgctatttacaatgctggaaattctacaggaggagcttctttaccctttttggttaaatcaaaagcaaattttgttgtatatgaagaatcctcaagtaaaaattcagctgagaaagtgttctggaaactctaaaaatgggattcaggtgtctcaaggttgcaataaaaataaaaaataataatttgtagagcattcagatgaataaatgaatatagcagctataaaatagatacccacctagcatccctctctaaaacagccatggaaaaagagtagacttttagcttagcaaaggagagtatttcctctgaaatgcctcctcctggaaaggcttttttttaggctctgggattwactcttaacttcctggcattcttcaacctccttgtttcttcctttccaacccagtctagactgtggtagtgccttagaccaccttagactaggtccttttatccttttcttctctaactgtacacattactttggtgatctctcccatttcatggtttaaatatcatctccttgctgaagattcctcactctatctccagcattgacatctaccctggacagccaacttattgagcctgttgcccacttgcatttccattgcatatctgatagaaatctcagacttaatctgtccagaattaaatcttcatctttcttatctgcttttgctccttctgtagtcttctccatctcaggaaataaccatcacatctgcttagatgaaaaccttaaataaattcttctctctgtcattctacctccaatccctcagcacatcctgctgctggtaaaagatattcagaatccggactgggcgcggtggctcctgcctgtaatcccagcactttgggaggccaaggcaggcggatcacaagttcaggagatcgagaccatcctgtataacatggtgaaaccctgtctctactaaaaatacaaaaagaaattagccaggcatggtggcgggcacctgtagtcccagctactcgggaggctgaggcaggagaatggcatgaacctgggaggcggagcctgcagtgagccgagatcacaccactgcattccagcctgggcgacagagcaagactctgtctcaaaaaaaaaaaaaaatggtattcagaatccaactacttctcaccaccttttactgctaccactctggttcaatgtaccatcatctcttgcctgaattattgtaagagcttttcctattgtttctctttttctgttcttgactagctgcagtctaatttcaacacagtagacagatgatgcttgtaaaacattgtcagatcatttcacccctctgctgaaaacctaccaatggcttcttgtcatactcaaaataaaagacaatttccttacagtagccctcaaagcctcttatttaccactctgagctctcctgctagtctcaccttcactctgtttaggcatagtggccaatttgctcatttggaccaacagtagagacaagctctctatatttgctgtgatgctcttttccagatattcacatagctcattccctaattttctttaggtctttgcttaaatatcatcttttcagtggaaccttcaatgacaaccctctttggccacctgctttaaaactgattaatcccctgcccctggtackcccttgtctttattcytcactttatttttctccatagcatttaacactatctgacagattttacttgtttcttttctcttctctgctcccatactagaatgtaagttccaggagagcagagaattttgttggttttatttactgttgtatctcagcatccagaatgatgaatgtttgacacataatagacactccatgaatatatcttgcatgaataaatgaactctcaggctatctaaaacttgatttttgttttatgtttctgtyattcttagttattaamttcactcaagagtaaayactattttattgtagaatgaaactttgctacctgttgcccaaagtgaaatctactctgaagattcctgctgataagcatctacttcagcagttagaaatgtgtgtgaggaaactcctgtgtcaagaaaaagataaagatgttctggctattgtaaaaagagtaagtatcactcttgccacaatgttgcattttttgcattaaggcagtaagaatcttagcttcactatttcagcttgacaggatagcaatatattacaatatttttatccttgctaaaattgtaagaattagtaaatgatttggttgatatgtgctacaactggatatgaaactttcgaagggcacctagacattaaacctgtattactagtaatataagcccatgttgagagagtttgacacatgttaggtgctcaataaacactgttcaattaataatgaatgttttattcatcagactttctttataagtgattataatccagtgaaactttgttggtaaaattggcaaagtcacattttatagaaacttatccctggaagggccctttgagttaattcaggggtctgtttgactttatagaagttatatgcctagaaatattgtgtctacttgagatcatattagtaagtagcagaatcaggaggactagaatagagacctcttacctgctcctgagtgcatttctttgtaaataatgtaacattgtatcctatgagttttttgtttgttttagcatgagatcttagtatatggattctttggagatgttggaaaaactaaacagtaaaaatttgggttagtgagccacatcttagaataatttttactcttcaaaaattgtttatgctgaatatataactaatatttttataagttgaagtgaaattatttacttttatgaatctgaatataaacttcaggacacattgtttttgagcatttatttatagtgagggaaatttccttattagtgtcataaataaattagcatacatggtgagaaaagagagaattcttattttttctctttttttctagaaatcattgccagatgtcacatgaagaatcttttaattaagtgatytgatgacttagtatgaattastatagttttagttttaatgaaatgtgaattcttctttcattaactggtataaccagaaatacgtagagttgcacatgcatttaaatctacacacacacacacacacacacacacacacacacttgtttctaccagacagttccttccttactatttaatatttaagtatagaagtttaggcaatggagttaacttgtcaaaataataaacatgagatggttaattacttttccagaataatttattaattcaagagacaatataagctaatgctatacaggtgtaacagtgatgtaataaaattaatggattattagtctatagtggattattctggagtacagctcttattttcagtatgctgcatatagtgaagccagtctgtcmcatggaaattctgtagtataatgagacattagtatggaaaactcccaggaagctacacaaaacttttggataaaaattgaatagtttcatcagttttataatatgagaagtaactttatttaaaaagagagtctttcatggcatgcattatgaatttttcataaatttcagcagaaaaagcttccactaaattttatgtttgtcatggatagctttgggcatatgcatatccaaatgtactttattttggccattagggttactcttgtagaataagttttagaagtactgccctctatcagagacagaaccctgggttagattgaccattgttttgattgggataatttgtttcaaactagtgtattccaaaagacaaatagtaaattgagagaatattttcagagcagatataaaatttctacagaagggaactaaggattattaggccccatgatggcttgtctcattcrtatatagctaaaagactttttaaaacttcaaaagctacattatgtttctgaaaattcagaaaagattggcactgggagttactagaaattagttagattatatgcatttggtatttgaaatatgcctgtagacttggtcttcttaaggttaaaaactttcaaaagttaaaattgaccctggcatgattgtataaagaytgattgtaagtacaatgtagaatkgggcagaactttagttttctgacttagtcttccccctagtgcagaagtcttctatttgaacctccatttgcaaaataagttgctgagaaatgattggttgttttaatttaattactttagaataattttaaaaactttccttatagactgtattagagttggacagaatggaaatgtctatggatgctgtaagtatactctctttaccttattgtgttggtccattttcatgctgctgaaamagacatacccaagactgggcaatttacaaaagaaagaggtttaattgaactcacagttccacgtggctggggaggcctcacaatcgtgacagaaggcaaggaggagcaagtcacatcttacatggatggcggcaggcaaagagagagyttgtgcagggaaactcccccttacaataccwtcagatctcgagagactcattcactatcatgagaagagcataggaaagacccacccccataattcagtcatctcccacccggtccctcccacaacatgtgggaattaggggagctrcaagatgaaatttggatggggacacagagtcaaaccatatcatttatattgaaaggaatattttaaacttggcagaaactcatcactaatgtttcacaatttcattttaaactttaaacagtttcagaaaaagttttatgagaaagatttgttggatcaagagaaagaaagagaagaactacttcttttgsaaatggtatgttgttttcacatgcacacacatatactcttttctgattaataactgtgtttttttattaaacttaatcatttctttccatttcaccatttcacattactcttttttcttcttaaatgatagtccagttttttgaaatctgttcttttatgaactagatagaaaactatatttgagagccttttaaaraaactactttgctgaagtataattgacaactacatatatttaaagtgtactatttaatgaattttgacatatcgatgaaaccatcaccacaatgaaaatatgaaacatttctattcctttaaagatttctgcccctttgtaatccatgtcttctactctagtccccaacaaccaatgatatagtttctgtcactgtagattagcttgcatttccataatttatataaatggaatcatatattaggtattaatactatttttggtcctgcatctttctaccaacataattactttgagattcatccatattatcgtatgcatcaagaagccattcctttttatttctgagtagtagtctatatttcggatatatcacaatttgcttatccattcacctctttatggacatttggcttacttctaatttggggatattacaaatatagttgctttgaacattagtgaagaagtccttgagtagacctgttttcatttctcttgggtaaatacctaggaatagaatggctgatttgtatggcatgcttaacttaaaaataaaataaaactaaatttaaaaaaatggccgggtgtggtagctcatgcctgtaatcctarcacttttgggaggccgaggcagacggatcacgaggtcaggagatcaagaccatcccggctaacatggtgaaaccccatctctactaaaaaatacaaaaaattagctgggcatggtggcgggttcctgtagtcccagctactcaggaggccgaggcaagagaatggcgtgaacccgggaggcagagcttgcagtgaaccgtggttgtgccactgcacaccagcctgggtgacagagtgagactctgtccccccaaaaaacaaaacaaaacaaaaaaacctgctttcaagtggttgtaccattttacatctacattgtctatgctggaaagctttagttaccagccatactattgggtatgtaatggtatctcattttttttttaatctctttttctattcctgatgcctaaagatgtcaagcatcttgtctttgcttactggccatctttatctcttatttgataaagtttgttttcagaattttaagtgggttgtttattattgttgagaggtaagagcttttaatycattctgaatacaatttctttcacagatatacatattatgaatwttttcttggagtctgaggcttatctgttcatttattaatggtgtcttttgaacaacagaaatatttgattttgatgaagcccagtttatcaattctttctttgataattcttttttgttccaagaatcctttgtctgtcccaagatcatagattttttcctctattttcttttaaaaattytcattttaggttttatatttaggtttatgatccatttcaagtacatttttatataatatatgtttatttttttccatagggaatattcatttattccagcaccatttgttaaaaagccttcttttccccattgaattgtcttagcgtccttaagaaatagttgtacacatatgtgtctatttcttgacttcctattattctgttccacttatttataagtttatcttttaagcaataccaaactgtcttgatcactgtaactttatagcgttcttgaaatttggtaggatacgttttccatctttgttccctcttaaaattgctttggccagtctagggcctttgcattttgatatgaagtctggaatttatttctacgtattttatgtttttggcattattataartggaagtatacatttttttatttcactttccagttttttgttgctggagtataagaatactgttgatttttatatattaaccttgtatcttataaactttctaaatttgtttattctaaaaattgttttttagattttctaaaactaaaattttatacgtaagtgatcatatcttctttaaawacagcaatattacttctttctattcaatatttatgccttttgtttctttcttttgtcttattgcaagatccaggacctccagtaaaattaaggtggtacaagtaggcatccttgtctttttactgatcttagggggaaacagttcagtctttcatcatcaggtatgatggtagaaataggttttatgtagattccctttatcagattgaggaagttacctcttactcctagtttgctaggagtttttatgaatggttgttgcattttgttgtatctagaaatgatatttgatttttctccttcattctgctaatatactgaattacactgatttttcaaatggtaaaccaatgttgtcttttggagataaaccctatttggcaatggtttattgtcctttttctccattggatccttggctaatgtttttgttaagggattttgcatctgtattcatagattcatagtgaaattggcctataattcccctttttgtcatttttgggattagatttggtattaatgttattctggcctcataaaacaagatggatggtattcccaccttctctattttctgaccaagtttgtataacttggttttatttttgccttaagwgttttatagaattcactagtgaagttatctaagcctggaattttcattttggaaagtattttgataattgattctatttccttagtagacattagataatgtagatcttctgtttcttctgttgtcaattttggtaagttgcttcccttccaccccagtttacatgttrtttaaactgacaaatctgttggcatgaagttatttataatattctattatccttttaattatggcattaatctatgatgataaccattttattcttgtgttagggatttcctctctcctttttttggaaattttttttgcttgtttctctagggattttaatatccatacctaaccttttacagtctacatattgttattattatatcatgtcacttaacaataatacaaatctctttacctcctccacacccattcttcatgttacagttgtcatatgaattatatctgcattgaagaccccaccagtgttgtaattttgctttaagttgtcatatgtatcttgaagaatacactcttagtgtaaacttttacatttactcagatctttaccatttccagtgctcttcattcattgcttaagatctaaatttccctctggtatttttttccttaagataaaagaattttctttagcaaatcttgaagcacaggtcttctggtgacaacttctcttattttttctttatctaaaatgtcttatttttaccttcattcctgaaggatattttcactgggtatagaagtctgggttgacagccttttccttactgcattctaataatgtgtttctgtctgtcttctggccaccataacatctgataaaatagctactctcattgaattgttgatgcttctttatgaagcattgtttttctctggacactttaaatatttttttcctttagcttttgtttttagcagcttacttttgatgcatctaggcattatttacttgaaatttatccagtttggatttggtaatcttactgaacctgtaaatgtatatcattccccaaatttgggaagatttggtcattgtttatttaaatatatattctcttccaatttttctctctcttatttctgggtcaccagttgcacatatattagatcgtttattattgtccgtaggccaagaggctttgttctttctcaatttttaaaaaaactctgtgctactcagtgtgaataatttctcttgatgtatcttcagtgttaccaacccttccctgtcatctccattcagctgctgagcctatccarttaatttttttatttccaatattatatttttcagttctaaaatttccatttggttcttttagtgttttctatttctatgccaagaatttgtgtgactaaagtggaaattttattatttcagcagcctttcaaagcaagattagaattcaggattgccagtgggagaaactgtagggaagactctaaaaaattttaggaccaaatgacctagcccaagacaaaaacagacaatagaaagagaaccgcagataatcctgatactggaattagtagacaaggacttcaagataactgtgattaatatgatcaagataatagaggcaaacatgtagaaaatagataactcygttaatccaacccaatgaaaattttcagttttatgctttatttctgttttagaatttccatttgatttttttatgtagtccacttctatgtggaaattctttatcttattttctccatatttttccttagtttacatgtgcatttgaaaagaatatttattctccacttgttgactctagtattctrgcatgtcagttataccaagtttgttcagaacttgctgtgtttgttgattttcwtgcctattctgttagcataagggcctcctgtgttttggtaacgttttgtttcatgatattggagctggttatacaagtgcgtctattttgggaaaattcattgagctatgaatttgtatacctataatttgtgtactttctttatacatatttatgtatstatatttgagatggagtctcactctgtcacccaggctggagtgcagtggcatggtccaggctcrctgcaacctccacctcccgggttgaagtgattctcctgcctyagcctcctgagtagctgggattacaggygtgcatcaccatgcctggctaattttttttatgtttttagtagagatggggtttcatcatgttggcctggctggtctcaaactcctgatctcagatgactcacccatcttggcctcccaaagtgctgggattactggtgtgagccactgtgcccagsctctctatgtatattatacttaaataaagcatttaaaaatatccaagaccattttcttttctctcaatctttttaaagaaagatattatttagccrtttaccaatctgaaattgaaacgaccaaagtaatggatattttgctaatgtgatttaggaaataccgtctagaaaatgaagggtaattattacartgataccaaactcattgttttagcttgacaaaccctcaagggcataattctgtagatatgaaaagagcacaaatctgaaagaaccctgaattctttagacactaacattggaaaaaaatacttcttttaggcatttttatgaactttacttgaatctctaatgcttaatttctcagaacaattttctagacctacttcagttgtacctttaatgcaagatactgtcttaataacaggaacaattagagaaagaaaagcaacagaatgatggaaggcccatgagtgataaaatgtttgaaaagaaacgtaagtagtttttctatgtcttcaacacttaattacataattaatgttgcatcctggtattctgaaagaccatgctgaattttttatttgatatggaaaattgctttactttctttcatttttgaaaagtcgtttttgaaaattggccacttaatgtggtacagatgttaagagtacatgaatgaaaggcaggaaccagggtggaygttcagatgcttcaaaagaaaagcttcaagtctgataacagctgtaagattgtgaaattgatcactgaataacaaagattgaaatatgtaaatattaccaagtaagaatatttggaaaagaaagctgcttagctagggatagtgattcatattgtctgagttgtcttgtgtatttatggagattaataaggacttagaggaaattatacaacttaaagcagaatttattttaggtagagacactaagacaccaacgcaaagtctgcccaagaacatccccatttctgttcctggaccctcttctgtcaccccatcgacaagtaagaaataacttctttttatatctttttgtaatttttcttccttgtatacaaattgctgggaaagtcactctattagatgagatacagtaggataatrtatctcattctaaagcacttttcaccttctatcattaggtgttttggtagtttttaattggtagtaagggtaagagatacttcagtgagctcaaattaaggaaaaaaggctaaagccatctgtgttttactgaaaatgatggtagttggggagggaatgggggttggagcagccgaggatgaactgaatacattttycttttttctgcttattgctctaggtaaagaaatcaagaaatccaaactgattcgaagccagtcttttaataatcaagcttttcatgcaaaatatggcaacttagagaaatgtgctaggtaygatctgtaagcccttcaatttttaacataatttttatctttattcacatcttcatatatatgagtttacattttataaaaatcagaattaattttgaggtttttttataggccagtattttgtgagtgttcttctgtagggattgttayatttaaaaataagagacctccaacaattttcacaaaaataggtattctggcattctaggaagaatactgacatgatactatttaataatatcatagaatccatatattatttcatgagggagatagtagtatatcacatgtgccacttaacttttaatacgtatgagtatgttccattatctaaatgtatatagacatccctttgctactaatattgtttctgtctataaagaatccattggcatgttcatatgataaagtgatcacagcagagttagcgtgacaatagatgaatgtctggtttcccctttagcccaggagacaaaattacaagcagttaagattaggatagaatcaatataagttaaattaccatgattttttatatgtgctatacaaactgctgtatgtcaattgacaagcaaaataattttaagaaaacaaatatctttaaaactattcctttgtctatcaagataaattacatgtttcaggaaaaagtatttttcttttattaaagatagcttcttacagaatttcagctgtgtttttgggcattatcagtagatccatcaagagtacctggccagtagagtgatctcaagatagaaaaaagagattataactaaagataagttttgtttccaagaaaattttacccatyttagctgccttgcttgaacctcaaaagaaaaactgtaattctgatgaagcaaaagtttaaggaaatgctttcaagttatagacgaagtaagtgttgtgaggcatgaatataaaaaaaatgagaaataaaagcaacaaacgtttcataagtagaggaaagcattaaaaagaagattaaaacagcacaagtgttagatgactgagattgtaagaagtgtgtttttgtattttaaactaaatcatgttgttttctagtaaaagttctacaacaggatatacaacttctgtctcagggttaggaaagacttctgtgctttcactagctggtaagtagcaatctaagttcttcaaaaagttgctaaatttaacaaaatattattttccttaaatgacctatttctttagtactagatgtagtgttttcttaaatctawatctttatcaggtccctaagaaattaaacttttgtctagcaattgagaaaatatttgactaaactattttgtcttcactgtgtcaagactcaagagtttagtacttttaaaatagaaaaagaacaaaagtgatagggtatgttttgccatactgggaaggtttactgaggcacagacaaaaaggttttgcaataatttttagggaagttaaaaacaacaggacttcactgtaaatctagatgaacagctagacatttacaatattatgtatttggaagtttgtggcaggggtcagcacatttccctgaagggccagaaggtaaacatacaggctttgttggccaaattgaactctgctgttactgagtaaaagcagctatagacagtacataatgaatagatatggcggtgttccaataaaactttatctacaaaaacaggcagtggattgacccacagactgtaatttgctggcctctggtttatataatagagcatagaattatactataaataatgtagactatattgttaaaattactagtggctaaatgtgtgtttttaactttatgctttggagatactggttgaaaattttactattgatctatggtaatttttttaggtgtaaatagtagtgaatctgctcaaagatctgaaatttttaagagattagttacattttctttttaggttacattttgagtattctgtcttctttttctttttctttttaattcttaggaggaatgtatatactcattggctcttctgtaaactggttcatttgctggaagagaaaatctttctagcattaaagcatcgacattcacgtacagtatatagagtggttttctgcaaggtagatggtgattatcgcaagaaataatttgataacagaaagttgattaactaaaattttccccatatcttggactataaataataaaaccattgattactttcagctcagtaaagctgtgaattctttaggaggtactaaggaacattcagagtttaagaactttatttaaaatatagagtgcctttaaaaattttagtgtacaaaaccagtttgaattagcttcgagctaatggtgcagatgattatagatgttcataaggggttcttcagacttggatggatctcacctgtcctcttggtacttcttcacttagctgtaatgagcatgtttattcatgattttgtaacattttttgtcaagaaatttctttgtctaaatcattaagaatattgattcagaagtggtttttaaaagttttaattaagtgcattaatttatttagttttaactttgctagtttttaagtgaccttaagaaccaagagagtagatatggtccacagattctaaaacttacatccaaagtcttaagttatgtattttatgaggtgtatttgtctgttctcatgctgttaataaagacatacccaagactgggtaatttataaaggaagaggtttaattgactcacagttccacacggctggggaggcctcacaatcatggcagaaggcaaagggaaagcaagacgtgtcttacatggcagcaagcaagagggtgtatgtaggggaactgcccttttataaaaccaccagatctcgtgagacttattcactatcacgagaacagcatgggaaaaattygcccccatgattcagttacctcccaccgggtccctcccacaacacatgggggttattacagttcaaggtgagatttgggtagcgacacagagccaaactatatcatgagagtaaatattttattaaaatatttgaaaaatattctattttaatgtctcaatattatttttagttgagggagaactgtaggttgaatgaaatatctcctagagttcttggttagaaaaaggtgcttattattgttattcattacttaaaatagaaactgaaaatatttactatgtaatacatctataaagagaaaatggaagcagaacatcttttaacaaatttgtcagatgtttgcatagagaagagatcttatttgtyggactcaaaacaggcttcaagatgattatgtcatttgagatgaaccttaaggtatgctaggattttgacaggcagagatgtgtatagaataacattccattcacagtaccggtcataaacaaaagatgattgttggtgttttcagggagcagcagctgactagtttgrctggagtgtggagtgagtataatggagtagtgttacataaaactgtaaggaggccgggcgctgtggctcacgcctgcaatcccagcaccttgggaggctgaggtgggcagatcatgaggtcaggagatccggwtaatcctggctaacacagtgaaacactgtctctactaaaaataaaaaaaaaaaaatttagtcgggcgtggcgtcaggcgcctgtagttccagctactcaggaggctgaggcaggagaatggtgtgaacccgggaggcagagcttgcagtgagccgggagagagagcgagactccatctccagaaaaaamaaaaacaaaaacaaaaacaaacaaacaaacaaacaaaactgtaaggaaaggtcagagtcagagcttggaatgccagattggatactttttacttaacacgaatccactgttcattgtgtggggacttatgcctgtcttcagttatactactcaaaactgttcaggaaagtctgagaaactgtcacagccaaggagagcctaaggagaactaacaagtaaatgtgatatagtatcctggatgggatcctgagacagaagaagttgctattagataaaataataactactatggattttagttaataatgtatcagtattggttcattaaatataataaatatagcatacttatgtaagctgttagtagaggaaattggatgaggggaatatatgagaattattctgtcatctcaatttttctgtaaatcaaaactgttctgaaaaagacagtttatttaaaaaaataacatttacagtatcttcaaaaacactaagtgctcagggacaaatttaacaaaatatgctagagatacataaaaaactttgaaatattgctgaaagaagctaaagacctaaataaatggagaaatataacatgtttatggattgaaaaacttaatattgttccaatgtcagtttttttctaaattgatccagagattcagtgaaatcctaattaaaattctagtagtctttttgcagaaatttataagctgattctaaaaatctgtattgaaatgcaaaaggaccccagtgtagccaaaatagttttgaaaaagaaaaagctggagaacttaaatataagtttgatttcaacaattactataaaatgctggtaatcaagacattgtgttctatgttgtcatatatagtcagtagattttaacaaaggcttcaaagataaatcaatggtgatagaataatattttaaaaaatggtgctggatggaccaattcctggaaagacacaattcatccaggtgcagtggctcatgcctgtaatcccagcaatttgggaggcagagacgggtggatcacctgaggtcaggagttcaagacctgcctgaccaacatggcaaaaccctrtcaactaaaaatacaaaaatcagctgggtgtggtggtgtgcacctatggtcccagatactcgggaggctgagacaggagaatcgcttgaacctgggaggacgaggttgcagtgagccaagatcatgccagtgcacttcagcctgggagacagagtgagactccatctcaaaaaaaaaaamaacaacaacaacaacaaaaaaagactcaattcaaaactcacagaagaagaaatagacaatctgaataggctcatatctattaaagaaattgaattggtaattaataatcttccaaaacagaaagcatctagcccagatgggttcactgataaattctaccaaatatttgaggaataaattttaccaattatctacaatctctttcacaagatagaagcaacgggaatacaccctaactcattctgtgaggtcagcattacccaactaccaaagtcattccaagaaaagaataatacataccaacatctctcaagatcacaaatgtgaaaattatcaaaaaaattagcaaatcacatccaacaatatataaaaagaattatacaccaaaactgagtaggatttataacagttatagaagactaattcaccatttgaagaacccttaatgtaatacatcacactaacaggccaaggaagaaaaatcacatgatcatggtaatacatgaagaaaagacatttgacaaaacccaacacctattcatgataaaaaccatcagtaagctaggaatagagaacttcctcaacttgatagggaacatctacaaaaaacctacagataacatcacagtagtgaggaaccagaagcattccctctaagatcaggaacaagacaatgatgtattcctctcaccattcctttttaccatcatactggaagttctagaaaaggaaagaaaagatatactgattttggaaggaagaactcaaattgtctttgatcacagataacatgatcatctatgtagaaaatccacaagaattggcaaaaacactcctggaactaagaagtgattatggcaaggttgcagaatataagggtaatatatgaaggtcaatgtaaggttaatgtgcaaagttgagtatgtcctatattccagcagtgaacaggtaggaatttaaaattaaaagcaaaataccatttactatcagcactcagaaaaatgaaatactcaggcataattctaacaaaatatgtacaagatctatataaggaaaactacaaaattctgataggagaaatcaaagaactaataaagraggagatgtctcatgttcattgctagaaatactcaatattgtcaagacgtcagttcttcccaacttgatctataaactaaatgcagtctcagtcaaaatcccaacaagttatttggtggatatcaacaaactrttgcgaagtttacctagagaagaaaagtcccggaatagccaacatgataatgaagaagaacaaagctagaagattgacaccacctgacttcaggacttagtataaagctacagcgatcaagacagtgtggtattggcaaaagaatagtcaaacagattgaaggaacagaataggaagcccagaaatagacccacgtaagtgtagtcacatgatcattaacaaaggmgcaaagccaatacaatggagaaaagatagtcttttcaaacaaatgcagctggaacaataggacacccacatgaaaaaacaaaattagatcttttacacccttcacaaaaatgtattcaaaaatgaatcgctgttctaaatgtaaaatgcaaaactataaaattcctagaagttaacataggagaaaatctagatgaccctgcttatggtaatgacattttagataccatgtcaaaggcgcaatctatgaaataaagaataagctgaaattcattaaaattaaaactactatttgaaaaatactgtcaagagaatgagaaggcaagccactgactgggagaaaatgtttgcaaaacacataatctgataaaggacttttatccaaaatatacaaaaaacttgtaaaacttaacagtaggaaaactaacaacctgattaaaaaatgggcaaagacttgaataaatacctcactgaagaagatatatagatggaaaacaagcatatgcaaagatgttcctcatatgtcatcaggtttatgcaaattaaaacaatgaagccccatgacacacctattagaatggtctaaatccaaaacgctgacagcaaatgctggtgaggatgtgaagcaatgggaactctcattcattgctggtgggaatacaaaatggtacagccactatggaacatcagtttggtagtttcttacaaaaccagacattcttaccatatgatctagcagttgtgctccttggtatttatccacaggagttgaaaacttacatccacacgaaaatctgagcatgaatgtttattcataattgccaaaatttggaaacaaacaaattattcttcagtaggtagatgwataaacaaactgtgatacatccagacagtggaatattatgcagtgctaaaatgaaatgagctatcaggccatgaaaagacatgaagaaaccttaaatacatactactaagtgaaagaagcaaatcgaaacattccaactatatgacattctggagaagatgaaactatggagacagtaaaatgataagtagttgtcaggggttcgggggaaggagaaatgaatagatggagcacagataatttttagggcagtgaaaacactctgtatgataccaaaacgatggaaacatgtcaattatatattgtccaaatccgtagcatgtacgccattaagagtgaatcctaatgtgaactgtggactttgggtgataatgacatgtcaatgtgggttcatcaatgcaacaaatgtaccactggtgggagacattgaagttgggaggctgtatatgaatgggaagatatgggagatctctgtaccttccactcaattgtgctgtaaacttaaaactgttctaaaaaatagagtctacttaaaaagtagtgctggaaccattggatatccatattaaagaaacaaaaacaaaaacaaaccctgaaccttaattatttgttaaatttatataaatttaaggcatacaagttcagttttattacatggatatattacacagtggttaagtctgggcatttagtgtaacctaatagtgtacattttaccattaagtaatttctcatccatcatcccctctgacactcccaccctttctagtctccagtgacaagtattctacattctatgaccacatgtacacattatttagctcccacttataagtgaaaacaggcagtatctgactttccgttcctgtgaatctcaagtcttatcactatacacaaaattatactatactcaaaatgtattataaacctaagcataaaagtgtctatattttctaaagaaaatacagaagaaagtctttgtgattttggaatacacaaagatttatcttgaccataaaacaaaaatatcaacacactggacttaatcaaaattaaagcgtctgggctttgaaatagagcattaaaaaaataaaaggcaaggcatagatttggaggaaatactcatagcatatgtaccagacaaagaatttgtatccagaatatatacaaagatgtctttgtaaaaattaggcaaccaattttaaaatgggaaaaaggtttgaacatgaacttcacaaaagatacacaagtaagtgcatgaaaagatgcttaacgtcctaatcattagggaaatggaaatttaaaagcaataaaaaaagcacccaaggagatatcacttcacacttgctagaatgtctaaaactagaaagactcacaatatcaagtgtgtgtgaggatgtggagtaactctccagaatactcacatgttcctggcagaaatgtcaggaaagaaaagaaattctgcacatcaatttggcagtttcttttgaagttaaatatatatttagtctatgacccagcacttccactccttggcatttactgagaagaaactaaaacatatgtccacacacagacttgtacgtgagtgttcatagcagctttatttgtaatatataaaaactggaaaaaaatagaaatgtctatcaacagatattatgggtaaacaaattttgacagattcacacaataccagtcagaaatagaaaggaaggaagtattgatacataaaacatgaatgattttcaaaattatgctgaatgaaagaagccagacaaaaaagagtatatgctgtatgttttcatttatataaaattctagacaatacaaactaatttatagttgacaggagtggtttggagagggaggaggaggattgtgatggggtatgagggactgtttcatagtgatagacatgttcacatcttgattgtggtgatgacttcatgggggtgtacatatgtcaaaaccttaactttttgcagtttgttgtatgtaaattataccctcataaaattgatttaaaaggtgaaaaagttagctatcattaaccttttcttctctttggttaccctctttgttagtatatttggtatgtctgactttatatgtattgctttcagatgattcattccggactcgtaatgccagtagcgttccatcttccttttctcctaatactcccttaccgagtacttcccgtgggacaggtaactcagttgaccccaagagcagtggaagtaaagatacacaaccacggaaggctaccttgtaagtaatcaagtgatgtcagactgagtgtattatcctcctcttttgcttaacacactttccttcccacttaagtactttccaaagaatagaaaatgtctgtgatgagaaaatgttataaattaaagggtattattgtcacatgtgactctgttatgttagtttatayagaataacttatatatggcaaaggcattataaccttagggaatcaacaggaaacatttaaatggctcccactaatgtctgaaatctattttttttctatgaaatgtttacatttagggaatttatctctaagaaggcatccctttaaacacctagcttaaggatatggtatttaatcacccagtgtgcagaaagattggtaaagctgatgtcacttaagaaataagtggcagcatkgaacccagaattgtgagtccaataaactgaagagatttacagactgtacttgtgtcttgaagctgaggttataaagggcctcctttctccttttcccccatgattccttttaatgtgctgtttgtatcttgatttgctgaagtctttcttttaccttaaatatttaagagaggggtaccataaaaatcaccatgataagagactatatcagggtataaatgattcagccaggatacccaaaccatagttacaagttagccatttcatataggacacctgaaccttctggttggaacagacttttaacaagatttagattttcttttaaatgtattttagtgaatgcatgggcatttttgaataaagtttcttaaatrcattcttttgcaaaaactgtgctggagtcccttttaggatctgatttaggctgytttgcattgctatraagaaatacctgggcctgggtaatttatgaagcaaagaggtttaattggctcatagttctgcagactttacaggaagcatagcggcatctgcttctggggaagcttcaggaggcttattatcctggtagatggtgaagcaggagcaggcacatcacatggtaaaaacaggagcaggagagagaaagtggggttgggggaggtgccacacacttttaaatgatcagatcttgcgagaactcactgtcacaaagaaaacaccaagccgtgagggatcagccccatgatccaaacacctcccaccaggcctcatctccagcattgcagattacaattcaacatgagatttgggcagggacaaacatccaaactatgtgtattccaaattgtaattggtcgttgggtatatgcccaacttcattcaaaatttagaaataagtttagaaataaatttattgactagagctcaaggaaagaggaccaatgtactattacaaaaatgtaatagtaatagaaaaaaatgaacattgatattacaggttaatgtcaatgcagagtatatttttatttacagagaatgctctttagctatacaattattgctcccatgattatacgatggaagttccacttaaaagtcatgaaagtgccaggtgcagtggctcacgcctgtaatcccagcaatatgggaggccgaggcaggtggatcatctgaggtcaggagtttgagaccagcctggccaacatggtgaaaccctgtctctactaaaaaattacaaaaattagctagctgtggtggcatgtgcctgtaatcccagctactcaagaggctgaggcaggagaatcgcttcaacccgggaggcggaggtttcagtgagctgagattgcrccactgcactccagcctgggcaacaagagtgaaactccgtctcaaaaaaaaagtcatgaaaacagaggcaggacatggtaatggtgtatagagagctttgtgtgcctcgttcccagcagcagctaagtggttgtgcaaagttcaactcagcgcactggccctcgctgtgcatgtctgtcacatgacagggctgtctcatggttcctcctcctctaaggtgccttctagctctggcatcctgaaatcctctttattaccctaaaccctcttcctctgaaaagattgccctgaaattcttctgttgaagagcatatttagtaacatcaaaagtaatctcttgtccacttgctatatttttctaaatgccataggcattttttacagtaaagaccattgaaacccagtatatttatgctggttctcctttctttcagattactctctttatctgttgtttcactgttgagcatgcttttccttttcatagactgaattttttcttgttcaacatacgtagtatgtagttatttatataatttatatatatgtataattgattaaaaagtgaatctagaaacaaacattttgataacacatcaggtttatttagtcttttctgattctaaaggagggacgttgatatccacagttgcttttttaacttgtgactgggtatacaagtttgtaactatatttccatctgatgtggcacttatatggatctctcttgagtgcacactgccacrtggctggatgggtgatgatatccacattggtctttcttctgtgaaatagtatccacaattcaaaacaggccatatccaagtgaaaatatgttcttttcatttaaaataagcctatgaggtgattttggaaagtataatttatcttaatttttgcttctcaaattctatgcaatacattccccagcttttcagtgtcattgagatgacacatttggtatttaggaatattagtgtcttaaaggaagcataggtatgttattatatcttgtcttttaaggcagttcatatatttatgcctatgtaacttccattatggttatacaaaattaaaaatgtaggaaaaatatgaattaaattgaatgctatgttatatatatacacagaatttttggtaattaaagatcattccaagtaatctttaatgtgtaattcattttttcccttaatcagacttctcatatattagaattattcaaagtagagtatctatatatttttaatttactttgtacacattatatgaataacatttttcatatttttttctttttctccctttctcactccctccttccccaccctccctctcttccttcatttctttcttcccaaagaaaatccagaaaatccaatccttaaatcaactgcttgatgaaggaggcaaaacaaaggcagcaggagataatgtgattggtacacaaaagctaaagcagtggctggggctttgtttttaaattttgggtttttttttttgttgttgttaatgagcagaaagagagacataatgacagctgatgttaaacttttcatatttcaaattagattccctaggaggtataatatatatttcttgagtaataatgtggttacggaattccaatgttatagtgaagtgtaatgaaaaacatctctaggaatgtgctttaaccactgctgcaaaagagacaagtctgcatttatttgtgcaggaaaccagccatttaattgttctagagttttagcatttaaaaatcgtatgaaagtctacatcagctgaattgtcctagcttgataagcacttggagggggacttggaaggtgagaaagatactgcattttctcatgagtctccaagcccacttgaaaagtcacactgaaaggatgcaaatagccgtctgcgattttggcggccctccggattgtggtgacaatatgttgtacccggacattcccaaatttaaatttggcartgaaaattccacaaagatttctggtaactttgagctataaataccttaaaaataatagattgatgattttctttatttcctagagaatttattttataaatactttgtttacattttagattgtacttgtctttatttaaaatgatgaatctagtctgaatcagctgttattccaagctatcatgcttaagctatgtcaacagcatttatttgtactaatgctaatatttccatcaaaatttgcctgtggaatatatacagttcttaattttaaactgtcagttcttgagatataccgtgtgaagctattgtcagcttctctatttcaaaatgcaatcagcatataactatattgatattagaagatatttgttttttaaaatatattgatgtatgataaagatgatctaatttgtgaatgcatatgtatgtgtggttactttttataatgtgaaataatgaataatgaatttactcaaaataaaacataggttaatgagatacctgtgtttgtgaaaaaaagtcttaaatactttcctgcagtttttattctataattaaagagtaagatagttcatttttaggtagtgaataaaagaaatataccagcgtcaactataagagcatagttactcagtgagagaccttttcatgccatttgttttccttcttccttccatatggcttctttatggctatttttagtgattcttaataatatcctttgccaaaggacaatcaggtaaatggaattgttactgctcattttgtcagtagttaaaattcaataggtatgagaaatttgacagtactggttaatcagtatactcgctgtggatttcatttaactgttttcattatgtctcctactagcaccaataatgtggaactgaatatattaagatctggagaatgtggtacagaacgagacatcaaaattgcatcagtttttttggtgctttgattcataacattctattaatttaataaaatggagaatttcaatgtatttgttataataaatttagcagaattataaggtttcactttcccatgatgcaaatgggaaaaggggacactgatttgacagagagaaacaactactgcttataaagttcaggaatgtagagcagtcaattgcagtcttagtcctagttagtactaagttatcaaaactgttcatcaaaattacttttggaagttttttaacagaacatgacatttcctaaaatctttgaaatatttattaaaattatactctcaaggacagatatatagaaacaggataaacagcaaattactgacagttatgaataactacatgtatctccatttatatcaaaaacaagatggatacttttgtgaaagttctcagtttaacaacttatcaaattaatcctttaagctagttgtatggcaaagaaaaatctccctccatctgtagttgtagggaaaagggacatcttcatcatcattttgttaattactaaaacttgcatttttaagaacaagtccaggaatttcactagttagccttacaagctaactgtagagctcacttttactgcagaaatggagataggtctataaaggattttacttaatagaggttaaataaggagcacataaagtttttctttataacctcttacacatttaaaaaatcatttctattatttgacttcctgagcttgaatatcttagtctggagatgagtcagttttgccatacaattagtggatatatgagaaatctttgaattgaaatgaaacaggctcttcagctggagtggaagttttacaatgaagatagaatgaattagattaagtcagtaacctgttctcagttgttacagcatatatatgtgagaacgtgtggttgagtgtgtctgtgtaggaacaatttttaagactcgacacttggccgggcgtggtggctcatgcctgtaatcccagcactttgggaggccgaggcgggcagatcacaaggtcaggagatcaagaccatcctgactaacacagtgaaaccccatctctacttaaaatacaaaaaattagccggtcgtggtggcaggtgcctgtagtcccagctactcgggaggctgaggcaggagaatggcacgaacccgggaggtggaggttgcagtgagctgagatcgcaccactgcactccagcctgggtgacagagcaagactctgtctcaaaacaaaaacaaaaacaaaaacaaaaactcgacacatatatagtgaagacttctacaatgttaagatttcccccgctcggttggaaaccctgaatttgtgtgtatgtatttgtgtaaggtaagttacattttttattggtstgcgtttttctgtcatgcctgtgtacttgggaaatctgaaactgagtgtcttargaacttcttaaagcaaatgtgrgggaacattaaaaagtatatttaaaatatagaataggtccattttctaccttaaagagtagtatattaaatacaattattatgctgttgttgctttgcagtgtatgtggtgggaagaaggcaggagttttttatctgcatgctatatgaatccttcaataataatgtacctttttattactgggtttggccatattgatttcagtgagtattgtgctctcacagacttatttttccagatttcatctcttaaaagtgggaaattggactggatgctactttattcctctttctactatttttccacaaacaaatctgactaattgaacacaaacaaggtgacttaagaatgtcagwtagagttagtcctctgtctttggccctctagggcctagaattgcctgtcccttcataagtgtcaattagtactcttggaatgaatacaggaatgaattttattttattawwatgcagtctaaatactgacttttcatcagtccaggttatggaatgatgaaaagtcagtatttagactgcatattaatattattacctattcacattactctgaattatattaaacaactaatcaataaatgaattttaggtttttttaaacattagatagcagacagacagaaatccaattaggcatttagttaacatagttcacactgtaaatcagctctattcaggattctctgaatatagtcttttctgtttctgtgacagaaaataactgcctaaggaagatcagggatatttacgattttccttttcaccctgggacaaagttyrtgcttatattctgtttaacccccatgggtagctgtagtgcatgctgtttacctggtccccatcagatgttttagatggaaggaagagtaaaaagggcttggagactagactcaggaaaggtaggcttctgactctgccattgccacactggaagaccttggacaagtattttgttcccactggtatataaggtatgacttatccactagatgcagaagacacagtgcccaaggctgacagtactgtaagggcccatgaaggtgttttgcttattgccatatgctagacatataactttgaagctagatatgcaactttgaaagacgaatatattcatctttctaccaatgcagccatagaacatatatatcttcatgaaggaaggaggagtctacaaggttaaacgtgcctagggcccatgaaagtaagaatatggacctgtttctgggtccctctttctttcctttgtaaaatgaaggtattgaactagatgatctgtgattcagccaatgcctctgccaagcgatttgatgcaccatggaagcagatgctgtgatcaggactggttagagctattttcttctgatgtcagtcagcaagaaatgactccgtaatagattaaaataaaacacttattttgcaccagagagaaggaaagagagagaagcacatgactcaaggagaatgtttacatgtgttcctcccaaaggctttatcttgacatagtgttctcatctgcaactttttaaaaatgaaaatatgtgagcaacagagaaaagatattctacccagctagtctttagccaagtaactaaggttcttagaaacaagcttaaaataccagacagattgcacaaacatcttaaaaaatatgtatcaatttaatgcttttgtagtagtcctcccttatccatggttttgctttctgcagtctcagttaaccatggtcaaccatggtccaaaaacattaaatgaaaaattccagaaataaacaatctaaaagtcttaagcagcatgccattctgagtagtgggatggaatcttgcatygtcctgctctgtcccacccaggatgtgaattctccccttgcccaatgtctccacactgtctatgctcctcgcccatgagtcacttagtagccttctctataatcagtttgactgttatggtattgcagtgcttgcrttcaagtaactcattttacttaatgttgttattattgttaatctcttactgtgcctaatttataaattaaactttatcataggtatgtatgtgtaggaaaaaatatatataaggttcagcactgtccaccgtttcaggcatctgctgggggtctttgaatgtatccccctcagataagtggggactactgtatttatttgagaacaccctaaactagttaagaacaaaaggaacactctcccctgccatccattgctggtatcctgtgtgtgtttgatacctcagattcagcatctactacagcacgaagtgcttatgcrtgtcctgaattataggagagtcggattcaccaccctgcccagaaacagaagcattccagaggtttcttcatagatcatgaaatgaaatggccggtccactttgatgacaggaggcatggaataagcagtaatttctgacaagattccygccactgcctcagtgcccctttcatcaacttcaatcactgttcttygtaaaacctggaaaaaggaaataatgtgaaaaaccatttgtgtggcagtgcaaaggaggaattaaatgagccccttgaaattcttcacagtggtcctacccatggggtcatgctcctgggatttagtggagcaggcccatctacgttaagaggagtggtctggggttgcaccagggactgccacaggagtcttaaacaataccaggagacctcaggaacccaatgtgaagtattgtggaatatgtgaaacacattccgggcrtggactcaggatgcactcatgcatcaaatctttattgagcatgtaatttatgctactaattcttgagctgagctggtgctcctaaaaggttttcaagctgcctggatcccttgatccctggatcccttgagtcctctgactttccttttggcaggcaaggtggaggcagggaatggctagtcttctgtagcagcttcccarcrcctggtactactctgaggcatttttctgggccaagcccaggggtccctggagccttmctgaattctggctgcctatactgtggctgcttgctatgtttgggaggcccttttttacagaaacaagatgtgatatgagtgatgtacctatataattactgtgttataagagataatgaaaacataacatgtaattacactgattttcactccaggaaattccctgatttcctagaggaaaattaattccccagagcaaacagagggagaatatttaatcatttacagtttaaatttcatgatgacccttcataaagcagcagcgcatttcagtttttcatgtgttcatagcagaaacactttcaggtgctggtctgacggattgttttatttaattgtcttacctctcttgaggttgtaagacctgattccaggccacagttaccctactgtgtcctacttaagtggatgccatttttagtctctcttggaattgaaaattgcaattgtataagaaaatattaaaccacacagctaaggaagaatgtagagagatgtagctgccatttggaaatgtgtgggagcatttttatagtgatgactggagtttcctactggcattagtgaacatgggccagcaatgctaaccagttccctgcaacatgcacaactgctctggacaacaagcagttcccctcaaaaccaagaacccttccactgagaaacactgagtaactgaagggattctatgtggatggtgactaaacttgttcttagaagttttagagatagaactaggaccaaaaagtatgaatcagaagttacaggactctctctctctctctctccatatatatatgtatgtctctctscatatatatatatatrtgtgtgtatatatatatacacacacacatatacacacatatacatttatacacacatacatatatacatatatayacacacwtatatatatatacatataacaattttagctatttgtggattgggcagctcttcaaagaaatggtgagtttgatgtcactggaagcatgaagaggaagagaagttggagggctatttcgtagggctatggaggggatttccacaaggagggagaa

SEQ ID NO: 9939 - DNA, 25871 bp, Homo sapiens
cagcttctttacttcaacctgttttattggcaagctctttatgaccttgtgctgacctcctaactcatcctgtgacttagaatctcttaacaatctgggaatgtatcccagtaagtctcagcctcattctaaccagtccctattcaagatggagtcactcttattcaaatacctttgacattatgaagtgtcttctctatgctggtcctctctgtgtactcatttatttcatcttagcaaccaactctaagacctcggaactataaactccacttacacatatggacagtaaagccataaggagttaagtaacttgtccacagtaaactgagcctagctctaactctcccaaatctcataatcttgccatagtctacactatttcrggtggtgtcagggccatcattttttccagagcccttaaaataaggaaggagacccccaaaagtcttatgtggggatgttagtgtgtgtatgcacatgtgtgcaaactgtttgtcttcagcaccctaagtgccttgycctgccctccctggtaaacctgagggctccatcccaagagagcagggcacttctccaagtgtgtcctcagctccctgaatcccatccacacagcttccagtacctgagcctaagtcgcttcacagrgtcttccctatctgcttcccacgtagccccgctggagaacagaggtagagggaagagggcagagaagtccagaacacacacgtcctcattgtttgctaggagggctgatgttgacccagcttgtgtttgcccttcttgcccaatgctctctgagggggagagccaaacaccaggtcctgagaaccagtttaagtagaatggaaatcattgatttttcactaaattcctgaaacaacgttgttttttgttcccagtcatttcactgaattaaatttctatttgtctgccatcagaacaacaggcacacagtcccaagggtgaaagagtaaggaaatactatttattcaaccaggcactttctgtaatcctcactgcagccccaccatgtcaggactatcatctccattccacagataaargagatgaagtcgctggctctgggttcttggtggttaatggcagatctgggatttgaactatgtccaacttcttttccacttaattcctggaatccttccaagacagcaaggaaaggggaaggagggaagagaaaaaaaaagcaaggagtggagagaaaagggtttttttttaatacagtttatcatactctacaaatagccattccacccaaaagaaatgaaaatacaaagacttctacatgaatgctcttagaagcttcacccataacagaccaaagtggaagccacccagacatccgtcaataaatgggctaattgtggtccgcccacacaatgatgatggaataggactcagcaagaagcataagcgcactgctgatattggtgacaacatagatcaatctcagaaacatgatgttgaactaaagaagacagacacaaaaacatargtagtgtattatcccatttacatgctcttctagaaggggaaaaaccagtctatggagacagaagtcagaacagaagttaccttcgggaggcattgatagaaagaggactttgtggatgggagaatttgctctgtcttgctcagaatggyggttacacagatgcacacacatgtaaaaatgtatygagctgtgtatttaggagttacagttttactacatgcaaataacacgtccataaaaagtaaatcgataaagacagggaagggatggtggcacaggggagatgcggagaggctggaggattcaagagaggctttatagtgtcatcttatatattctcttcaatcctaacgtgcaaagtaggtataataaaaccttccttgcagagctgctggggaaatgaacgtttgtgagcacaaatttctgacagaggccttggcatctggtaaccaatcagcaaatgggttgctttggctgggattctgctgatgagctcaggaggggccacaaggagaatggaaagagggacggcaggggcatgatgcaacctccttcctcatcggtggatttcatcatgacagctcagtccttgctctgttgtcctcccacggactgtttcccttttctcatggggcagacagaggaggcgggtggaaaagcagcttgggtggtggtggaagcccaggcttggcactgggttctaggtcctggctgggaggctttggcagcctgctaacctctccctcctcagtgttagactccagcttgaatagtaaagcaactgggtttgttttgttttgttttacctaagaagttgcacgcctcacacaaatttttagcatatgcgaggttttcacactttcaccctggcaagacacctcagccatctgattaaagaaatgctccatttccatgacccttgattaactcagttcatgaagcaacctttgatcacctattctgtgctcagtacaaagccacagagatggaaaaaacacagtccctgccctccrgttacttgcagcctggtgatgccaccgagctttggggtcatgcgcctcacagcctggttagaatctgccctccaccacttgccagctctgtgacccagggctaggtgctcgacgtctatgaacctcagtttcctcatctgtaaaatgggatracagaaatatcgacttcataggcttgatgtgaggacgaggagttaatctgtaaccaatgcttggaatggctctggcatgagccacgtgctcactgttacctattatgctaatgttacaaagggatgtgtaggaagtgttggggaagcagcaagcagggagaaagagaggaagggagagagggaggtacctgtttcagcatcagggtaacactctgcctcagtttcctcatctgttctaaggcagtaacagtggtactcactgcacaggatagagtgaggtgatgcatgtgaagtgtttaagacagggcctggcagaggccacatgtgcaaggagtctcagccgcgattcagggggtggcacaccaccgctggagtatttggagatttatattataaaatttcggaagcaagaggcctgttaaaaccaagcaaatagaaatgctcaaaatcaacatgaaggagtcaacagggtaaatcgaacaatttgaagccaaggtcggagttgggcaaattaagagccctattgctctctgttatctaagccacccacgcagggcatgtatttctgaataataagccctcaagtcctgctgggtctcccatagtccccacgcaagggtgagtcttgcacgctcagccctgcctgtggttcccagaaggcctctgtcactgcgtgcttgctttctctcccagggaagataccccagtgccatgtcttggggcaagagaaaatgaagacagacctggaacatgaacatggtggccttgccagaaagcaagtgtgtgttgctgaaacatcagcagagattgtcaaagggataaagagataacttaaaagggttcctattgaccaaaatgcgacaagttgaccatctaaaatcaaatcataattatagttcaataggacacattgagtctcttaaaagcttccaatccgtaatgaccatcaaggcccataacctcaaaagagtaaagttaaaataaagttcagaaaaggttagctgcaataaaacatgagttttagtaattttaacaagaaggggatgaagctatagatgcatttttattccttcttttaactatgttgccccttataatgtatagctttgccttatttttctctgtctgagtaaggataaagagtaaaggccaggcacagtggctcacacctgtaattccagcactttgggaggccgaggcgggcagataacttgaggccaggagtttgagaccagcctggccaacatgstgaaaccctgtcactactaaaaatacaaaaattaactggaattggtagcacatgcctgtaatgccagctactctggaggctgaggcacgagaatcgctcgtaattccagaattcgagaggtggagtttgcagtaagccaagattgcgccactgtactccagcctgggtgactgagtgagactctgtctcaaaaaaaaaaaaaaaaagaagaagctrtgagtaggccacatagttccagaaaatgcagaaatcccccctcccctccccaacacacaggaagtggctcaggagattacacacagaaggaaagtgtgtctgctggggttttgcaagttggctaatttgaaaggtgactggaggaggtgaamaaatggtgcaaacttcattcattcattaaatgagttataagaagacagacacaagtgtccattatgctaacagagctctgtgttaaacaccccaccagcatcgcctcatctaagcctcagaagagctatgtgggaaagaaacttttatccctattttatagatgaggaaaccaaggctcagagaactgagggcctcccccggatccaagtccrcctagctgcagtcaccccacatcctctgcatgtcacaggtgctcagaaagatgctgaaggcacctggcccttcaccttcggaaagccaaaatgagcacggcccctaaagaggggattgacagcctttttctggaaaaaatggaagtttgaatctgaggaggtgtccctcaacaacaggtgctgctccccaaatctggggccaaacgcagcagttgttcccccacttagacccctgagacccatctatatggtttttcagagccaggacacatccccaaaggtcatggcctttggtggttagcattgacttggggcccatcacatgccagaggctgcccgaagtgcttaartgttattatctcattcgatcttcacagtcctgatggaagtgactcttcttagagtcttcctatctcacagatgaggaaaccgaggcacagagaggttaagtggcttgtctaagagctcacaaaaagagcgatggagctaaggcttggccccagatattagatcccgaacccacgccttaaccagtgacctgcactgactctcaaagaaggaagctggtgcctgggaaggagggtgcatagtgagggtgtgcatggggtgtgtgtgtttgtggggtggccagcactctccgggggcactttgccaatgagttcagctcccatgaagtccactgttgttctcctgaccagccactcagtcttgatttacttggcccagggccactggcacacctcacccccttacccgattycttgctgcagaccccaaatctcgactctcacatccctatccagcccataccacsaggctcccatctccaggcagggccctgtggtggggcagggcctcccccagatgccccttactcatgaccagctcacaggatcttcccatgatgcatttcctctggggggatcagcccagatgctgcaatagacaattgtggaagtaaccaggtggacaagactttccccctcatgtcctggggttcctgggggcacagtatccttgtgaatggccactgagtactcccacccctcccaccacaacccccgggattttgtcctggtgcgtttttccagattatcctagcccttcctcccaggatggatgtccagagcagggcgggggctgagcctagagccctgccaaaagagcaggaccccaaattctgagccccttacttgcctcacctgctcccacccatgctttcttcattcctcctccaaaagccccagctccccactgcaatcccttctgcacccagccaggtcctatgacacacacctccccagtgcacacagacctgcccaactgtggggctgcccrctgggcatttcataggtggctcagtcctcttccctctgcagctggccccagaaacctgccagttattggtgccaggtctgtgccaggagggcgaggcctgtcatttctagtaatcctctgggcagtgtgactgtacctcttgcggcaactcaaagggagagggtgacttgtcccgggtcacagagctgaaagggcaggtacaacaggtgacatgccgggctgtctgagtttatgagggcccagtcttgtgtctgccgggcaatgagcaaggctccttcctgtccaagctccccgcccctccccagcctactgcctccacccgaagtctacttcctgggtgggcaggaactgggcactstgcccagggcatgcactgcctccacgcagcaaccctcagagtcctgagctgaaccaagaaggaggagggggtcgggcctccgaggaaggcctagcygctgctgctgccaggaattccaggttggaggggcggcaacctcctgccagccttcaggccactctcctgtgcctgccagaagagacagagcttgaggagagcttgaggagagcaggaaaggtggracattgctgctgctgctcactcagttccacaggtgggaggracagcagggcttagagtgggggtcattgtgcagatgggaaaacaaaggcccagagaggggaagaaatgccyaggagctaccgagggcaggcgacctcaaccacagcccagygctggagctgtgagtggatgtagagcagcggaatatccattcagccagctcaggggaaggacaggggccctgaagccaggggatggagctgcagggaagggagctcagagagaaggggaggggagtctgagctcagtttcccgctgcctgaaaggagggtggtacctactcccttcacagggtaactgaatgagagactgcctggaggaaagctcttcaagtgtggcccaccccaccccagtgacaccagcccctgacacgggggagggagggcagcatcaggaggggctttctgggcacacccagtacccgtctctgagctttccttgaactgttgcattttaatcctcacagcagctcaacaaggtacatacmgtcaccatccccattttacagatagggaaattgaggctcggagcggttaaacaactcacctgaggcctcacagccagtaagtgggttccctggtctgaatgtgtgtgctggaggatcctgtgggtcactcgcctggtagagccccaaggtggaggcataaatgggactggtgaatgacagaaggggcaaaaatgcactcatccattcactctgcaagtatctacggcacgtaygccagctcccaagcaggtttgcgggttgcacagcgggcgatgcaatctgatttaggcttttaaagggattgcaatcaagtggggccccactagcctcaaccctgtacctcccctcccctccacccccagcagtctccaaaggcctccaacaaccccagagtgggggccatgtatccaaagaaactccaagctgtatayggatcacactggttttccaggagcaaaaacagaaacaggcctgaggctggtcaaaattgaacctcctcctgctctgagcagcctrgggggcagactaagcagagggctgtgcagacccacataaagagcctactgtgtgccaggcacttcacccgaggcacttcacaagcatgcttgggaatgaaacttccaactctttgggatgcaggtgaaacagttcctggttcagagaggtgaagcggcctgcctgaggcagcacagctcttctttacagatgtgcttccccacctctaccctgtctcacggccccccatgccagcctgacggttgtgtctgcctcagtcatgctccatttttccatcgggaccatcaagagggtgtttgtgtctaaggctgactgggtaactttggatgagcggtctctccgctcygagcctgtttcctcatctgtcaaaygggctctaacccactctgatctcccagggcggcagtaagtcttcagcatcaggcattttggggtgactcagtaaatggtagatcttgctaccagtggaacagccactaaggattctgcagtgagagcagagggccagctaagtggtactctcccagagactgtstgactcacgccaccccctccaccttggacacaggacgctgtggtttctgagccaggtacaatgactcctttcggtaagtgcagtggaagctgtacactgcccaggcaaagcgtccgggcagcgtaggcgggcgactcagatcccagccagtggacttagcccctgtttgctcctccgataactggggtgaccttggttaatattcaccagcagcctcccccgttgcccctctggatccactgcttaaatacggacgaggacagggccctgtctcctcagcttcaggcaccaccactgacctgggacagtgaatcgtaagtatgcctttcactgygagrggttctggagaggcttcygarctccccatggcccaggcaggcagcaggtctggggcaggaggggggttgtggagtgggtatccgcctgctgaggtgcagggcagatggagaggctgcagctgagctcctattttcataataacagcagccatgagggttgtgtcctgtttcccagtcctgcccggtcccccctcggtacctcctggtggatacactggttcctgtaagcagaagtggatgagggtgtctaggtctgyagtcctggcaccccaggatgggggacaccagccaagatacagcaacagcaacaaagcgcagccatttctytctgtttgcacagctcctctgtctgtcgggggctcctgtctgttgtctcctataagcctcaccacctctcctactgcttgggcatgcatctttctccccttctatagatgaggaggttaaggtycagagaggggtggggaggaacgccggctcacattctccatcccctccagatatgaccaggaacagacctgtgccaggcctcagccttacatcaaaatgggcctccccatgcaccgtggacctctgggccctcctgtcccagtggaggacaggaagctrtgaggggcactgtcacccagggctcaagctggcattcctgaataatcgctctgcaccaggccacggctaagctcagtgcgtgattaagcctcataaccctccaaggcagttactagtgtgattcccattttacagatgaggaagatggggacagagaggtgaataactggccccaaatcacacaccatccataattcgggctcaggcacctggctccagtccyyaaactcttgaacctggccctagtgtcactgtttctcttgggtctcaggcgctggatggggaacaggaaacctggrctgracttgaggcytctctgatgctcggtgacttcagacagttgctcaacctctctgttctcttgggcaaaacatgataacctttgacttctgtcccctcycctcaccccacccgaccttgatctctgaagtgttggaaggatttaatttttcctgcactgagttttggagacaggtcaaaaagatgaccaaggccaaggtggccagtttcctatagaacgcctctaaaagacctgcagcaatagcagcaagaactggtattctcgagaacttgctgcgcagcagkcacttcttggcattttatgtgtatttaatttcacaatagctctatgacaaagtccacctttctcatctccaggaaactgaggttcagagaggttaagtaacttgtccaaggtcacacagctaatagcaagttgacgtggagcaatctggcctcagagcctttaattttagccacagactgaygctcccctcttcatttagccaggctgcctctgaagttttctgattcaagacttctggcttcagctttgtacacagagatgattcaatgtcaggttttggagygaaatctgtttaatcccagacaaaacatttaggattacatctcagttttgtaagcaagtagctctgtgatttttagtgagttatttaatgctctttggggctcaatttttctatctataaaatagggctaataatttgcaccttatagggtaagctttgaggacagattagatgatacggtgcctgtaaaacaccaggtgttagtaagtgtggcaatgatggtgacgctgaggctgatgtttgcttagcatagggttaggcagctggcaggcagtaaacagttggataatttaatggaaaatttgccaaactcagatgctgttcactgctgagcaggagccccttcctgctgaaatggtcctggggagtgcagcaggctctccgggaagaaatctaccatctctcgggcaggagctcaacctgtgtgcaggtacagggagggcttcctcacctggtgcccactcatgcattacgtcagttattcctcatccctgtccaaaggattcttttctccattgtacagctatgaagctagtgctcaaagaagtgaagtcatttaccccaggccccctgccagtaagtgacagggcctggtcacacttgggtttatttattgcccagttcaacaggttgtttgaccataggcgagattctcttccctgcaccctgccgggttgctcttggtcccttattttatgctccyrggtagaaatggtgygagattaggcagggagtgrctcgcttccctgtccctggccccgcaaagagtgctcccacctgccccgatcccagaaatgtcaccatgaagccttcattcttttggtttaaagcttggcctcagtgtccgtacaccatggggtmcttggccagatggcgactttctcctctccagtcgccctcccaggcactagcttttaggagtgcagggtgctgcctctgatagaarggccaggagagagcaggttttggagwcctgatgttataaggaacagcttgggaggcataatgaayccaacatgatgcttgagaccaatgtcacagcccaattctgacattcatcatctgagatctgaggacacagctgtctcagttcatgatctgagtgctgggaaagccaagacttgttccagctttgtcactgacttgctgtatagcctcaacaaggccctgaccctctctgggcttcaaactcttcactgtgaaaggaggaaaccagagtaggtgatgtgacaccaggaaagatggatgggtgtgggggaatgtgctcctcccagctgtcaccccctcgccaccctccctgcaccagcctctccacctcctttgagcccagaattcccctgtctaggagggcacctgtctcrtgcctagccatgggaattctccatctgttttgctacattgaacccagatgccattctaaccaagaatcctggctgggtgcaggggctctcgcctgtaaccccagcactttgggaggccaaggcaggcggatcaagaggtcaggagttcaagacctgcctggccaacacggtgaaacctcagctctactaaaaatacaaaaattagccaggcgtggtggcacacgcctgtaatcccagctatttgggaagctgagacagaagaatttcttgaacccgggaggtggaggtttcagtgagccgagatcacgccactgcactccaccctggcrgataaagcgagactctgtctcaaaaaaaacccaaaaacctatgttagtgtacagagggccccagtgaagtcttctcccagccccactttgcacaactggggagagtgaggccccaggaccagaggattcttgctaaaggccaagtggatagtgatggccctgccagggctagaagccacaacctctggccctgaggccactcagcatatttagtgtccccaccctgcagaggcccaactccctcctgaccactgagccctgtaatgatgggggaatttccataagccatgaaggactgcacaaagttcagttgggaagtgaaagagaaattaaagggagatggaaatatacagcactaattttagcaccgtcttyagttctaacaacactagctagctgaagaaaaatacaaacatgtattatgtaatgtgtggtctgttccatttggattacttagaggcacgagggccaggagaaaggtggtggagagaaaccagctttgcacttcatttgttgctttattggaaggaaacttttaaaagtccaagggggttgaagaatctcaatatttgttatttccagctttttttctccagtttttcatttcccaaattcaaggacacctttttctttgtattttgttaagatgatggttttggttttgtgactagtagttaacaatgtggctgccgggcatattctcctcagctaggacctcagttttcccatctgtgaagacggcaggttctacctagggggctgcaggcwggtggtccgaagcctgggcatatctggagtagaaggatcactgtggggcagggcaggttctgtgttgctgtggatgacgttgactttgaccattgctcggcagagcctgctctcgctggttcagccacaggccccaccactccctattgtctcagccccgggtatgaaacatgtattcctcactggcctatcacctgaagcctttgaatttgcaacacctgccaacccctccctcaaaagagttgccctctcagatccttttgatgtaaggtttggtgttgagacttatttcactaaattctcatacataaacatcactttaygtatgaggcaaaatgaggaccagggagatgaatgacttgtcctggctcatacacctggaaagtgacagagtcagattagatccyaggtctatctgaagttaaaagaggtgtcttttcacttcccacctcctccatctactttaaagcagcacaaacccctgctttcaaggagagatgagcgtctctaaagcccctgacagcaagagcccagaactgggacaccattagtgacccagacggcaggtaagctgactgcaggagcatcagcctattcttgtgtctgggaccacagagcattgtggggacagccccgtctcttgggaaaaaaaccctaagggctgaggatccttgtgagtgttgggtgggaacagctcccaggaggtttaatcacagcccctccatgctctctagctgttgccattgtgcaagatgcatttcccttctgtgcagcagtttccctggccactaaatagtgggattagatagaagccctccaagggcttccagcttgacatgattcttgattctgatctgrcccgattcctggataatcgtgggcaggcccattcctcttcttgtgcctcattttcttcttttgtaaaacaatggctgtaccatttgcatcttagggtcattgcagatgwaagtgttgctgtccagagcctgggtgcaggacctagatgtaggattctggttctgctacttcctcagtgacattgaatagctgacctratctctctggctttggtttcttcatctgtaaaagaaggatattagcattagcacctcacgggattgttacaagaaagcaatgaattaacacatgtgagcacggagaacagtgyttggcatatggtaagcactacgtacattttgctattcttctgattctttcagtgttactgatgtcggcaagtacttggcacaggctggtttaataatccctaggcayttycacgtggtgtcaatccctgatcactgggagtcatcatgtgccttgactcggggcctggcccccccatctctgtcttgcaggacaatgccgtcttctgtctygtggggcatcctcctgctggcaggcctgtgctgcctggtccctgtctccctggctgaggatccccagggagatgctgcccagaagacagatacatccmaccatgatcaggatcacccaaccttcaacaagatcacccccaacctggctgagttcgccttcagcctatacygccagcyggcacaccagtccaacagcaccaatatcttcttctycccagtgagcatcgctacagcctttgcaatgctctccctggrgaycaaggctgacactcacgatgaaatcctggagggcctgaatttcaacctcayggagattccggaggctcagawccatgaaggcttccaggaactcctccrtaccctcaaccagccagacagccagctccagctgaccaccrgcaatggcytgttcctcagcgagggcctgaagctagtggataagtttttggaggatgttaaaaagttgtaccactcagaagccttcactgtcaacttcrgggacaccgaagaggccaagaaacagatcaacgattasgtggagaagggtactcaagggaaaattgtggatttggtcaaggagcttgacagagacacagtttttgctctggtgaattacatcttctttaaaggtaaggttgctcaaccagcctgagctgttcccatagaaacaagcaaaaatattctcaaaccatcagttcttgaactctccttggcaatgcattatgggccatagcaatgcttttcagcgtggattcttcagttttctacacacaaacactaaaatgttttccatcattgagtaatttgaggaaataatagattaaactgtcaaaactactgacagctctgcagaacttttcagagcctttaatgtccttgtgtatactgtatatgtagaatatataatgcttagaactatagaacaaattgtaatacactgcataaagggatagtttcatggaacatactttacacgactctagtgtcccagaatcagtatcagttttgcartctgaaagacctgggttcaaatcctgcctctaacacaattagcttttgacaaaaacaatgcattctacctctttgaggtgcyaatttctcatcttagcatggacaaaataccattcttgctgtcaggtttttttaggattaaacaaatgacaaagactgtggggatggtgtgtggcatacagcaggtgatggactcttctgtatctcaggctgccttcctgcccctgaggggttaaaatgccagggtcctgggggccccagggcattctaagcyagctcccactgtcccaggaaaacagcataggggaggggaggtgggaggcaaggccaggggctgcttcctccactctgaggctcccttgctcttgaggcaaaggagggcagtggagagcagccaggctgcagtcagcacagctaaagtcctggctctgctgtggccttaskgggggcccaggtccctctccagccccagtctcctccttctgtccaatgagaaagctgggatcaggggtccctgaggcccctgtccactctgcatgcctcgatggtgaagctctgttggtatggcagaggggaggctgctcaggcatctgcatttcccctgccaatctagaggatgaggaaagctctcaggaatagtaagcagaatgtttgccctggatgaataactgagctgccaattaacaaggggcagggagccttagacagaaggtaccaaatatgcctgatgctccaacattttatttgtaatatccaagacaccctcaaataaacatrtgattccaataaaaatgcacagccacgatggcatctcttagcctgacatcgccacgatgtagaaattctgcatcttcctctagttttgaattatccccacacaatctttttcggcagcttggatggtcagtttcagcaccttttacagatgatgaagctgagcctcgagggatgtgtgtcgtcaagggggctcagggcttctcagggaggggactcatggtttctttattctgctacactcttccaaaccttcactcacccctggkgatgcccaccttcccctctctccaggcaaatgggagagaccctttgaagtcaaggacaccgaggaagaggacttccacgtggaccaggygaccaccgtgwaggtgcctatgatgaagygtttaggcatgtttaacatccagcactgkaagaarctgtccagctgggtgctgctgatgaaatacctgggcaatgccacygccatcttcttcctgcctgwygaggggaaactacagcacctggwaaatgaactcacccacgatatcatcaccaagttcctggaaaatgaagacagaaggtgattccccaacctgagggtgaccaagaagctgcccacacctcttagccatgttgggactgaggcccatcaggactggccagagggctgaggagggtgaaccccacatccctgggtcactgctactctgtataaacttggcttccagaatgaggccaccactgagttcaggcagcgccrtccatgctccatgaggagracagtacccaggggtgaggaggtaaaggtctcgtccctgggracttcccactccagtgtggacacygtcccttcccaatatccagtgcccarggcagggacagcagcaccaccacaygttctggcagaaccaaaaaggaacagatgggcttcctggcaaaggcagcagtggagtgtggagttcaagggtagaatgtccctggggggacgggggaagagcctgtgtggcaaggcccagaaaagcaaggttcggaattggaacagccaggccatgttcgcagaaggcttgcgtttctctgtcactttatcggtgctgttagattgggtgtcctgtagtaagtgatacttaaacatgagccacacattagtgtatgtgtgtgcattcgtgattatgcccatgccctgctgatctagttcgttttgtacactgtaaaaccaagatgaaaatacaaaaggtgtcgggttcataataggaatcgaggctggaatttctctgttccatgccagcacctcctgaggtctctgctccaggggttgagaaagaacaaagaggctgagagggtaacggatcagagagcccagagccaagctgcccgctcacaccagaccctgctcagggtggcattgtctccccatggaaaaccagagaggagcactcagcctggtgtggtcactcttctcttatccactaaayggttgtcactgggcactgccaccagccccgtgtttctctgggtgtagggccctggggatgttacaggctgggggccaggtgacccaacactacagggcaagatgagacaggcttccaggacacctagaatatcagaggaggtggcatttcaagcttttgtgattcattcgatgttaacattctttgactcaatgtagaagagctaaaagtagaacaaaccaaagccgagttcccatcttagtgtgggtggaggacacaggagtaagtggcagaaataatcagaaaagaaaacacttgcactgtggtgggtcccagaagaacaagaggaatgctgtgccatgccttgaatttcttttctgcacgacaggtctgccagcttacatttacccaaactgtccattactggaacctatgatctgaagwgcgtcctgggtcaactgggcatcactaaggtcttcagcaatggggctgacctctccggggtcacagaggaggcacccctgaagctctccaaggtgagatcaccctgacgaccttgttgcaccmtggtatctgtagggaagaatgtgtgggggctgcagcwctgtcctgaggctgaggaaggggccgagggaaacaaatgaagacccaggctgagctcctgaagatgcccgtgattcactgacacgggacgtggtcaaacagcaaagccaggcaggggactgctgtgcagctggcactttcggggcctcccttgaggttgtgtcactgaccctgaatttcaactttgcccaagaccttctagacattgggccttgatttatccatactgacacagaaaggtttgggctaagttgtttcaaaggaatttctgactccttcgatctgtgagatttggtgtctgaattaatgaatgatttcagctaaagatgacacttattttggaaaactaaaggcgaccaatgaacaactgcagttccatgaatggctgcattatcttggggtctgggcactgtgaaggtcactgccagggtccgtgtcctcaaggagcttcaagccgtgtactagaaaggagagagccctggaggcagacgtggagtgacgatgctcttccctgttctgagttgtgggtgcacctgagcagggggagaggcgcttgtcaggaagatggacagaggggagccagccccatcagccaaagccttgaggaggagcaaggcctatgtgacagggagggagaggatgtgcagggccagggccgtccagggggagtgagcgcttcctgggaggtgtccacgtgagccttgctcgaggcctgggatcagccttacaacgtgtctctgcttctctcccctccaggccgtscataagrctgtgctkacsatcgacgagaargggactgaagctgctkgggccatgtttttagaggccatacccakgtctatccccyccgaggtcaagttcaacaaayyctttgtcttyttaatgattgamcaaaataccaagtctcccctcttcatgggaaaagtggtgaatcmcmcccaaaaataactkcctytcgctcctcaacccctcccctccatccctggccccctccctggatgacattaaagaagggttgagctggtccytgcctgcatgtgactgtaaatccctcccatgttttctctgagtctccctttgcctgctgaggctgtatgtgggctccaggtaacagtgctgtcttcgggccccctgaactgtgttcatggagcatctggctgggtaggcacatrctgggcttgaatccaggggggactgaatcctcagcttacggacctgggcccatctgtttctggagggctccagtcttccttgtcctgtcttkgagtccccaagaaggaatcacaggggaggaaccagataccagccatgaccccaggctccaccaagcatcttcatgtccccctgctcatcccccactcccccccacccagagttgctcatcctgccagggctggctgtgcccaccccaaggctgccctcctggggrccccagaactgcctgatcgtgccgtggcccagttttgtggcatctgcagcaacacaagagagaggacaatgtcctcctcttgacccgctgtcacctaaccagactcgggccctgcacctctcaggcacttctggaaaatgactgaggcagattcttcctgaagcccattctccatggggcaacaaggacacctattctgtccttgtccttccatcgctgccccagaaagcctcacatatctccgtttagaatcaggtcccttctccccagatgaagaggagggtctctgctttgttttctctatctcctcctcagacttgaccaggcccagcaggccccagaagaccattaccctatatcccttctcctcccyagtcacatggccataggcctgctgatggctcaggaaggccattgcaaggactcctcagctatgggagaggaagcacatcacccattgacccccgcaacccctccctttcctccyctgagtcccgactggggccacatgcagcctgacttctttgtgcctgttgctgtccctgcagtcttcagagggccaccgcagctccagtgccacggcagraggctgttcctgaatagcccctgtggtaagggccaggagagtccttccatcctccaaggccctgctaaaggacacagcagccaggaagtcccctgggcccctagctgaaggacagcctgctccctccgtctctaccaggaatggccttgtcctrtggaaggcactgccccatcccaaactaatctaggaatcactgtctaaccactcactgtcatgaatrtgtacttaaaggatgaggttgagtcataccaaatagtgatttcsatagttcaaaatggtgaaattagcaattctacatgattcagtctaatcaatggataccgactgtttcccacacaagtctcctgttctcttaagcttactcactgacagcctttcactctccacaaatacattaaagatatggccatcaccaagccccctaggatgacaccagacctgagagtctgaagacctggatccaagttctgacttttccccctgacagctgtgtgaccttcgtgaagtcgccaaacctctctgagccccagtcattgctagtaagacctgcctttgagttggtatgatgttcaagttagataacaaaatgtttatacccattagaacagagaataaatagaactacatttcttgcayttatgagctttctgtgaatcagacatccctatgaagtacctcccctggctgtttctcatttactcactgtagcagcactgcgatgtgtgagtatatctgctgtgctcttaaactccaaatctgaggaaactgaggctcagagaggctactggtctcycacaatgtcacacagctcataagtggcaaagctggcttgatgggctacttgttcctctgaaccataccacctcaccacactctycccttcgagggtcacgctaaacttctgcagaggtaattcctccttaaaccagaagggttgctggtggcccacwgctcacgcctagcacacttcatgagaaaaacaccctgtgcccagtgtggagcaggcattgagctgaaggtggtgagcagaagctcatccaccagatgttgacacagcccgcagccttgggcgacccacaggactcctcttatttaactggcatttggtaggagaacaggggcagagtcaaagacaagttggctttctggagagcccagggcagggaaggaggtggcagcgctgagggcggtcaccttagacaccatcgttttactttgaagaattgtctgtcacacacgagttgacagtcaggatgggagagaccccattcaaactagcataacctcccagagggaattcctgggctcccctgggaatcaacagggatcagtcaaggatgggcagagtgtcatgacaacctcattatgaggaagacaaatatatgtcacaagtccgtgatgggacaaccataagacctcagcttcactgtatcttccagagttttaaaaaaatgtattcactgtccaacgtgatcctccagacaggttctgcaggacgcagcctaggactcattatccccaaagtacacatggggaaactcaggcccagcaggtcaaatgctctgtccagtgtrggcctggaaggcaggtcttctccactgttaggcctggctgtccccaacagcacatacttcctcagtccatatgggatcacgataaacaactccatcctccaggaccacactgcatcaacctgctgtgccctaacatcagctgaaggccaagctgcrgggcaccctgggtgttccaagtcactttccctctgcaggcaggaacctcatcctgctctgaaacagatgagagggaaacgcagaaaacagcttccagctcagccaggaaccttagagtcctgaccttttacctcgcctaggagtttgcaggggagagaacacacraatttyrgattttaagcctaaataaaggaagccttagtttgaagtgcaagctctgccggacagggggcaccctgtgagccccatttgttaagaggacaatagtcagagagcttccaggctctcacaccagaaacaggaaatacagatttcacaytgatctccttcccaggagcaacttgatcytctccataaatccgagcgggaagcatttatccaaacaacaaacaagcaaacatgagctgtgtatgggggatagagagaatgaaacccaggtccatcccggggagaatgctggtctatggcagtggggagcagtgaataaakgaggcgtacatccatggatctgggtggagagggtcagggtgtaacccaggacctttccagaggcatgagaaacagtcagcctacacccacagatgacctcaaacaccccaagtgctccttgaaaggctgaggcytttgtgttgctcttggttggattattcacaggcaatgaagtaaacaaggcacaccacaggactcagaaccagggacagcttccgcaggaacctgggtcagttctaaaaggacaaatggaatgaccctgagtagagaagtcagagaaaggcactctcactgaggcaaactccctccccagcagggacccaggcagcaactcggaaaagcaggagtgtcactattgtatcatatgggagagggcaggctgtgtgctctcagggaagttcctcaacttctctgtgccgtagtttcctcatctgcaaaatgtaaatcaaatttgaggtttcaatgcaatgacttatttctctaaagttccttgtccttgtcccatgtagcccagaaatcttcctctggcctagttgtggagcctggcctaagtcgcacattgctggagatggtgaagctgaccagcatgagaggtcagtttctagaagcccaaatcccaacaggcataagcctcaccctccaatatcagctctatcagaaacaaacaaacaaaaacatgtcttattcatttgtccttttcctcaaatgggtggcacttgggcagggcagaagggctggttatccaagcttggaagatgctgacagcagacgcttcaatggcagtaggagttttctgatcactgtcattggtatcacgcttactgttgaaatcgtgacatcaggaatgatgaaaggaactagagtcagatggtctggagcggggaagtgaggagctgaaacctccttcagtctggttgctgtgtccccagggtgggtagatcccctctgttcatcccacatgggacaagtagagcgggagaggaatcaaccctttctaaagggttgaagcattgagctgtgagcttctcggttgctgcagcacaatccttgcccatcctgactgaaacaaccagaattcatgaaatgcatcaaagaagtcttcacctactacgcaagcctggaagggtgactaagatctgaaaaacaccgggaaggctaaaggaactcccacaaggaaaccccattagaaagttctagttacaagatgctcagcacaggccatgcagaaatacgcccagatccggtggtgagcaaggaacggtaggaatgtgagcactgagtcacgcaggagagactcataggggctcaagccagcaaggggacggcctccaccccacgcactgttggccaacagcttccaggggcatttgctctcagaagtcaaagctgattttccacaattgaagtgctcactgtttgggatgatttaggaacaacaccaacaaaaaggaatgaacaatcagagctaatagaattgtgtttaaactctgctgggcttccttgacagagggcacggggagcaaacaaagtcagcagtgtgtcttaagtaaaaaactttttttccttttaattggcagttaataccctcaaaatatgttctgagattgatcaagtaagtgtctttcagcattaaaatattaggatgaaattgctaagggcttcttagcaaagtggaaagaacacaggaatcccaactccaccttctccttagcatacaatcctgagtgggctgttacagctctctgtgcctcggcgccctcacctgcaagacaggtaaaataaaactcctaggttactttcatgaataatatgcaaagcatcaccctaaaaaagtgctgctacttaawtgaccaccaaacattaatgaatactgtggattccaaaaatattagttaatgtgagtggtgtggctaccttcccccagtgccccgtgctctgtcagggaactaacagaggaataaattacagatattcacaagtttgttaccaatgaccctgagctaggaatcagcctgggatcttttcccargtctaccactaatgtgccacctaacactgcrgacatcctctcctctccctgagccccagtttcctcaccagagaatgtgagcattgaggtccctggagtcctgacattccatagagctctgagggcttcaggccggccccacgtcagtctttcacctgtgtgccctgtgcccactgctgatctggggcagaggaggcacagggaaagggcccaggctgctcttaaaaatcrcatctcacattgagaccgacgcatggagactgcggcagaagcagcagaggtgaggaccccgtgtgagtcccctgtggctgccgtagctgatttagctgattaccatgagctccgtggtttccaatagaatgcattctyttacagttctggaggccagaagtccagaacagtatcactgggacaaggtcagggtgtcaggaaagccgagtgtccttggaggctctaggggatgtgccacttcttcctcttccaatttctggtggctgcyggcattccttgacttgttgcccctccagtcacggcctctgttgtcacactgccccctctttctccatctgtgtcaggtctccctccccctccccctcaggaggatacttgcgatagcatttagggaccacctggattgtcttctcctaccaagacccttaacgacatctgcaaggacatttcttccatagttggtaacatatctctggggggcgctgttgagcctgtagaaygccctactttaccagtgaggggatgatggggctggaagagggaaggaatgaaaggagtgtgaaggaagcgccaccaaggagagctgtggaagcccaacccaaagaccgcacctgggatgtcgggaagggccaaggtacagaaggagaaggaagagggttggaggtggagggccagcagcaccaaggctcggagccagggtgaaactcccccgccaggggatggagagaaatggtggggtcgttctctcaggcagtggcacagcagagccagggccagatctggaggtggctgtgcccccctggggggtgcagactcacagcccctccaacagggagcccctccaggtgagagcgaaatggagatgagcgcaaaaccccgactatcaggcagattctgcagcaaaaatgacttcagaggtgaactgtgtgtagcctcaggaacgggatagaggtggcccttgtaaacctaccctgcaatggtgtctaggtcccatgtcccctgttccagacagaggcaggccttggcctcctgaggagggacagcaggagggcaggtccctcactgagcctggagtctctctctctgtacagcaggcaccttctcccgaccactcccaccaccaacatttcattctattccttccctcagggggcagctacaatttctctcttagcccaaggaaaggaataaaacaaactgccttatattgaagtgaacatggctgatctgggcttattgggagccctcccaaggggcggggtctagttctcattatcttctccatcaaggtggctaagaatttttgcagtttcttataactcacaaagtactgtcctagaagctatatccccatgaggggaggtagggcaggtattatcaggttcgcttacaggtggtcaacagagggtcagagaaatcagtgatttggggagctcatacagctgctagatgtagcctggcatcagtcaccgcaggagggcccaccccggcctgagtgcaggcagaacgctgtgacactgagtgacatggacaagtcaccatcctgagcctcccattctcactaacagagaatcaccaccctcggcctgaaggacaggttgtctgcaggtgactgccggggtcacggcaacagcttcccccctgccaggcctgggacccgagttgcagggagtcaggtgtatggccttttgtggtgtctgtgtggtccaggaagagaggggctgcaccgtgtgtgtgtgtgtgtgtgtgtgtgtgtgtgtgtgtgtgtgtgtgtgwktgtgtgtgtgcatctgagtatccgtgtctctgtgtgatgctatatgtcaatgtgtctttgtgtgtgtgtgtgtgtgtgtgtctctgtgtgttggcatgtaactgtaatgtctttcct

SEQ ID NO: 9940 - DNA, 18472 bp, Homo sapiens
tgaatgccctgttgactcgggagcctaagccttctctggtgggtgtgggaaaaggatgatcctcagtgccttaggccagtaccatactctgcactatccaaccccccaatccccctaccttatatcccagagaatctacttgattcatttctttgacttcttccttgtcttggtttatgttgatctcctgccaccaaatccaagtccctgaatatcctcagatatttaactgcatgttttgtggaagagattgtgaacctcatctgttggcaccaaggggggtagaattaggttcaagaaaaggaagttggtctaaagaaaaattcccccttcctttttttttccttgctcctttgattaagtaataactttctttcttttttttttttttttttgagatagagtcttgctctgttgctcaggctggagtagagtgccatgatctcggctcactgcaacctccgcctcctgggttcaagcaattctctgcctcagcctcccgagtagctgggattacaagtgcccaccaccacacccagctaatttttgtattttttagtagagacaggktttcatcatcttggccaggctggtcttgaactcctgaccttgtgatccacccgcctcggcctcccaaagtgctgggattacaggcgtgagccactgtgcctggcagtactaacttycttaaaagtggatgtatttaacagagacacattggccaagtctctgggtcacttacactatccattttctgtcctgaaattgtgaagcaaggtattttgaatcagttttcccacttgcacgttgctctctcctgccctcccctcagtacaatctctgtgccctaggaaggaagggatgggactatgttgaatgaggattmattagtaactcaccagtttygcaaaaaacagacaaaaacagaaaacaaaacaaaatgaaaaaaacagcaaacaaaacaaaacaaaaaaacaacaaatgtcccagagaataaggagctacgcatttacaacagccctcacaggtccacatccctagacctctggggaaagaactatatgaaagtctttttttttttttttttttttgakactgagtttggctctgttgcccaggmtggagtgcagtggcgtgatcttggctcactgcaacctccgcctcccaagttcaagcaattctcttgcctcagattcctgagtagctgggattacaggagcccaccaccatgcccggctaatttttgtagttttagtagagacagagtttcactatgttgaccaggcactcctgacctcaggtgatccgcccgccttggcctctcaaagtgctgggattacaggcgagagccaccacacccggcctgaaagtcttttttayttttatttatttatttgagacggagttttgttcttgttgcccaggctgggcgcgatctcagctcactgcaatctccgcctcccaggttccagcaattctcctgcctcagcttcccgagcrgctgggattacaggcatgtgccactacacccggctaattttgtatttttagtagagatggggtttctccatgttggtcaggctggtctcgaactcccgacctcaggtgattcaccygcctcggcctcccaaagtgctgggattacaggcatgagccaccgtgcccggcagaaagtcttttttaaattcccacttcctctttaattgagaaagaagtagctgcagatttgtccccaatccaaacaagaaggctcatcactgccccctgcgggtcctgttgggcataccccaatgcactgggccatgccctggtgccatgccaggcctctgtgatatccctgaggaccaagatatgattatatctgactcaaagtcagatagccagtcttggaatcccagctttacgactgagkttatgagacttgggcctcccttctgtaaaatggagatgatagtattacctgtttgtgagtaaagtctttggcacagaaacacatctttttagtgtggtcttgatgactagtcttctttctcagagtctctgctttcagagaactcaggccactgaagtctgacacctcatcatcttaggggaggcactctgggtggggagttccaagttaagaggggcagtgatggttctgcaaagatctccaactcacagcttgattcaacaaatgtctatcatttgtctaccgagtactagggttgstagaaagccctgggacacagacatgacaaagacaagtccctgaagtgctccaggaggtgggtagagcaaacatgaacccagaacttccgtccatagtgcagagggctcttaaaagaagagaaaccaaaggcttgtgttgttgggggagaggggtggaggggaggaacatggtctggagaaaggaacagccagccctgtacaagacaggacatggggctggttcttacagggttaacagtgttgctagacaggtagatacagaaaggcaatttgggcagctgtagctrtctgagcagacactgggcagaatatagcttttggctgggaacttttttcatcttccccacctggagcacatgtgggttttgttgttgttgttattgttgttgttttagatggagtttcactcttgttgcccaggctggagtgcaatgatgcaatcttggctcatcgcaacctccacctcctgggttcaagcgagtctcctgcctcagtctcctgagtagctgggattacaagcacgtgccaccacrcctggttaattttgcatttttagtagagacggggtttcaccatgttggtcatgctggtctcgaactcctgacctcaggtgatccacctgcctccatctcccaaagtgctgggattataggcatgagccaccttgctgggccaagtgtgggtcttaraagctagcctgggttaggtgcagtggctcatgccwgtaattctagcactttgggaggccaagctgaaaggatcatttaaggctgagttccaggctgtgataagccatgattgcactactgcactgcagcgtgggcaaccgagcaagaccctggctcaaaaaaaaaaataaataaataaaataaaaataaaaaagtttttcttggggaaataagaaaataaattttttttaattaaaaaattaaaaaaagaagccagacagttgcatgaggaagggctcaagatccaggccctatccctggccagagcatggtgcacagcaggtactcagtaaatggctctccaggggctggatggatactgggagagaagatatggaggatggaatgatggcctgtagatattttaacatgctgttttgtggaagagattgcagacttcattgattaactccaaggggtagaattaagttcaagggaaagaaattggttttaagaataacctttttcctagatttgtacttaattgaacctttgcctaagttatatggctttttaaaaattagaggtttcytgtaaaaattcttaggtgccaccgggaccctaatcttctggagctgccaagggggtctgggaggagacaacatcaaataattacactataacttaatgatagctgtgaaaagggttgtgaagaagctgggtcattggtacaatggttctgagtaggtgacactggacttgacatgttgagaatggtgttgagggaaggatgctggtagaaagaaaagggaaggatgcaggcagagaaaacagcttgtgcgagagcctcccccaagagtgggagtagggtggaggagaaaaagaacagggcttgttgacaaagagaaggtcccagaagaggtgagtccagattggagaggtatgcaggggttagaccatgtagggctaagtcggccacaattccaattttgaatgtgaggaacacggttttttattcactagtgtttcctcagtgcctagtagactagtggcactccacatttggtgaaagattttatcctaaaaattatgggaattcagttttatgcagagaagtgaaataatgatatctttctcattttcatcacatataaaatgagaataatggtcattgtggtgaacattctgtaaagcaaaaataaaattctaaggccgccccccacaaccatctgaatggacttcctcctcagccagggctctttcaaaattaaacccgagtgaccgtttcaggccatgatgggaagtaggggttgaacgtgcctcattatacctctctaccgttaacatcaacacagactttaagtttgataagaaacattttacaacccattctctctgaagcctaggatttgaaggtttcctctgcaaataagaacttgggtctccacaatcctttatcttaacccagacattcctttctattgatttcaggtctttagagaaactcaaccaattgtcaaccagaaaaatttaaaatctacctataagctggaagccccccaccgccccacttcgagttgtcccgcctttctgttgtcccacaaaccaatgtctttctctctttccccctcccctctcttcccttcctcctttcctcttttcttttctttctttcttttctccctttctttctyyctttctttcttycttyctttctttcttttctttctcttaggaataacgctcaaaatcctaagggaaattgaacactcgaacaaaggattattagcaaagcaattttacttctgctcagaggggtgtctgcttggccagtcgccatgagagcacacctgaacaaaggggcacgagagcctttattcctgacgcaagtcctgcccctgtaccctttccccattggccggggtcgggtcatacaatstgaactaatcccggttggctaaacatttgatttttttaggtaatgtgggcacstaaaagaaagtggagaggaaaggggaaggggtgcctgtaatgaactagaaagttagtcctctttccaaataatgaaaggaatgtgagctggtactgataacgtctggtactgataacgtcttgtactgtggcgtgcctcggcatctaacgaaggcaaaaaggagaaaaaggaaaacaaaagtgtgtgtgggggggagtactatgaattaaagaataaaagattgatctaattatttgaagagaaacctcatcatatcccagatttctttctttctttctttcttttttttttttttgagacggagtttcgctcttgtaccccaggcaatggggcgcgatctcggcccactgcaatctccgcctcccrggttcaaacgattctcctgcctcaggctcccgagtagctgggattacaggcacccaccactactcccggctaatttttgtatttttagtaaagatggggtttcaccatgttggccaggctggtctcaaattcctgacctcagytgatccacccgcccaggcctcccaaagtgctgggattacaggcatgagccaccaggcccggcccaaccagtgtatttcttgaatgaactgaagtctcatatctccctaaaatatgtaaaaccaagctgtaccggaccaccttgggcacatgttctcaggacctcctgagggctgtgtcaagggccatggtcactcatatttggctcagaataagtctcttcaaatattttacagagttggactcttttcgttgacaattcaatgacgcttcaagcgtttttggcagctctcatcagtgggatccgcattaatagtgaaacggcatcatggcgcttcccgcagttcgggattgttttgaactttcatytagagcgtattgtgggtggggaagttgtgtttgctgagtagattgtgacactgctggcttgggtcactcgaggtcagggatgagagactttttttcctagaattggtaagacaggaaatcaatcagaggcagagcgacgcctctggctctggtctagtggtgcagcgtctctagccctcgccccgcccaccgtccccgcgaggcgtccactcgccgagccccgccctcacccagcacccaccccgctcctcgcgccctccccgcctgttcccgccctgtgctgaggctgcgcagtcggtgccatcttctacgcccctgggagcrttgtggctgctgtttccttcggctttcctcctcctgctccaccatgtggagccgacggcagggccgcctcaggcccacggtctgcggggtggaggagctacggcgccgccggcgggagcgggaggcaggtgtgggcggccgagggagcgcgggggtatatggcggtcggggataagttgagaccccaggctcggagccgcgggttctgggttgtggtcgtccttcccacgctcagccggctcctctgcccccagcactgcggaaggcgcggagggagcagcagctggtcagcaagaggctgctgagaaacgacgccccagaggaagctggagagggatgtgtggctgcgatcctcggggaaaccgaggtgagggggcaaggtagggtgcgctggagtccacgcccgctggcgccagactcccgggagtactcgaggtctgccccaaacctgaacgcaatccactctacacttccacgcatccagtgggtcaagccagaaacaggggaatcatcctgcacaactctttgacccacaaccccatatcgatccatcatcaagtcctagttgtttacctcctgaagagctttggagtctttacatgcctcaccatcgaagctgccaccaccacctcctctctggatactactgcagtctcctaaaaggtcaccctgcatctatgcttgtcaccgtcactacgtcctttaaaaacacgtggagaccaaaatctttcctgtgccttgcaaagcatagcatggtctagcctcttcctaactcaaattttatcagttttctcatcctacccaccgtcctctttttagttcctgcaacgatatatcggatttgtgtctcargcccttggcattcgctacgtctaacgttcgtttcttttggtattctgtcttgagagcctattttttttcttttcttttctttttttttttttgagactctcgctctgtcgccaggctggagtgcagtggcatgatctcggctcactgcaacatccgcctcccgggttcaagcgattctcctgcctcagcctcccgagtagcagggattacaggcgcgcgccaccactaatttttgtattttaagtagaggcggggtttcatcatgtttgtcaggctggtctggaacacctggcctcatgatccacccgccttggcctcccaaagtgctgggattacaggcgtgagccactgtgcccggccacctacttgtttcttgtagaatattaatcattatctaatggtttgtctattgttatttctccaactagactttaattgcaggaaaacctagatcctgtgttgtcattgaaaacccggttgcctgcacattatctggcatatagttaagtactcagtgtttattgaatgagtgaatgaaaggatttattcagtaagcattgagtatcccctgtatttgtattatgtttacgtacatagtttaccgtacataccatgttgacatatatattatcaacttattcctaggtcatactattccattgtatgcttactttatgccaggacactgtgctggtcactgaggtacacaaagatgaaaggatagagtccttttctttgaggtgctcacagcccggtgaagaagacagatgtcacaagggaaggaaacatgaggaacaagagaaactcctaagtctctcaaaaagagctaacttcccagaggaaatgaggagcagaaacctgaagagagtgggaagctggagagggtatccaggcagaagaaatagcatgtgcaaaagctcggaaatgtaaaaaaaagaaaaagaaaaagctcatgttaggctggttgttgttagagtgtaggttgcatggggagaatggctagaggagtaggttttgccaggctgagaggtttaaatatccttgaaagaaccctgtatgaaggcaggatagatattgttattctcattttcaggtgaggaaacttaggttcaggtcccatatggagtaagtggcaggtatggtattagaactcagttctgattctctgtccactccactgcaaggtagatgcttattagttgcattagtgtgaatgacaagttctgaaggtgtgatattggaaggctcacaggtgaagtgggcagagagagacttaggacttgctttctgtgaaccgtgtgttctcctttccctgccctgaactccaggtgcagcagttcctgcggcaagcccagcgggggacagaggaaaaggagagagagggggctctggtcagccttcgtsgaggcttgcagcaccctgaaacacagcaaaccttsatccggtcagtgtggatggtgtggtggagggaggagttggggctctgagggatggaccacaarctaagcagggctctggtactcactcacataggctggagggcagcatgcggaccctggtygggctcctgaccagcaaccaggccctgctgcagcttgaggcggctcggtgcctgcatgagctctctcactccgagcagtccactgttgctgaggcctgcctgccagccacttcttacctcctcacctacctctccagtcacagctcagacttcatagtaagccctgtcccttcctatcttgttcttggtttagattttaaaattgtgcttttgggaccagtttgagctggcaggtaggaggaagaaaacatgtttgcccttatgcctacagccatggctacacccatcatctccccaccctcttgtgagccgcaaggatagctgctccagcgtccccatcacctcccctccccatctccccacacgcagcctggcwtgaaacaggccaagcccagtgcttttgttgcctgttctcaggagctgtgtctgtatacactgggtaacctgatcgtggagagtgaggctgtgagaaggcagctcctgccacagggcattgttccagccttggctgcctgcatccaggtgactcctttcttcctccctgggcaacccttcctttgctcctccccacatgctccatctactttggttaggtagctccagcctctgccctgtgccaaggggctgaaagtctctgaagacctgatgacccagcttccagtcagatccttaccctgtctacttccagtccccccatgtggctgtgctggaagctctcggatatgccttgtcccagcttctacaggctgaggaagctccagagaagatcattccgtgagtaaaattgtctttagatgtgcagccagaggtgacccactcagtagtatagctcccggatgcctgaatgatttccaaagctgttgcacattttaaattcatgtgtctggctaggaagggctttgggtttggacactttcccatctgggcagggctttgggwttggacactctcccrcctgctatcagggtttggyaagaaccactggcatcttcgtggttcctacttacagccctgcttctgccagcagctccatcttggcctccactctccctcagcacatgctacaaatgttgcaacctggcccaaagctcaaccctggggtcgctgtggagtttgcctggtgccttcattacatcatctgcaggtaacagggcaattgggaaagtaccacagatcttccctggggctcccttccatgacattcaactctttgaacttgtgtctggaattgctatagtgagttttcctccctccactgtcttctctttttggagcccaggagacccacagaccttagctgtttctctttttttttgagacagtctcactctgtcacccaggctggatggagtacagtggtgcgatctcagctcactgcaacctctgcctcccgggttcaagcgattctcctgcctcagcctcctgagtagctgagactacagatgcgtgccactatgcccggctaatttttgtatttctaatagagacggagtttcgccatgttggccaggctggtctcaaactcctgacctcaggtgatccacccacctcagcctcccaaagtgctgggattacaggcataagccaccacgcctaggcaactgcttctcttcttaaaggtggaattgactatatacctagggactgcttgcttcctgttgcccagccaggtcagcaatcctctgctcattrgccatggggctctgtctactctggggttgctgctgttggacttggctggggctgtccagaaaascgaggatgcaggactggagctggtaggtgaagatgtcaggtgaaattctgggagatgtttcttgatactctggaatgcaggtaacctcttccttcttacacctgaccccccaatttgtctttgcagctggcatgccccgtgcttcgatgtctaagcaacctgctaactgaggcagcagtggagactgtgggagggcaaatgcagctcagagatgagcgtgttgtggcagccttatttatccttctgcagttctttttccagaaacagcccagtctgctccctgagggcctttggctcctcaacaacctcactggtacgcaccataatctgcccaggcctggacatttggataatggggatatttcctcatggcctaggctgaggtgggtagtattgacaggggtggtgggggaaagcagtttttcaccctggtacttctcttccagcaaacagtcctagtttctgtacctccttgctctccctggatctgattgagcctctcttacagctgttgccagtatctaacgtggtgagcgtaatggtatgtattggggttacttgaatccaagatctggtagtyggattgtatgggacagcagtcctgagccctcagatgtacccttagttgagagccagcaggtggtggtgtgtggcctcagggcccaaccaatctaggtgtgtgtcccttaaactggattatttatccttggacaaatcaactaaccaccttaagcttcagtctcctcacttataactgaggataatcttgcatcatagggtagttgtaggagtatgagaacatgyatgtagaagagcttggcatggtgcctgggcatgtggtcaccatgtcatatattttagctattgttatgatctktgtgtttcattctttgtagactatatatgtgtctatctgcaggtgctcacagttctgtgcaatgttgcagaaaagggtcctgcttactgccagcggctrtggccagggcccctgcttcccgccttgctgcacacactagccttttctgacactraagtagtaggccagagtttggagctgctgcatctgctgttcctgtatcagccagaggtataggtttctggcccacatcctcagtcacccctgttctgaagccacacagtggctcccttcccatccagtcctaactatagttgtttctctgggcctggctaacytatataggttccatgtcagaaacttcatcctcttgttggggaatgcaccctctggagtrggctgacccatgaggctgtgggaattgagtcttaggacacagagaccaggtgtgttgaattttcttccctgcccctaggctgttcaggtcttcctgcagcagtcagggctgcaagccctggaaaggcatcaggaagaggcccagctccaggatcgtgtgtatgctctccagcagacagctcttcaagggtgatcttgtttctcaatgtcactcattcccctctctcttaacatcaagcttgtttgtccagtagagcctttggagatttaggaccataatgaggtctcatgttctctgctcccacacctaagccaagacctttgggtcccagctcctccccttccactcagcactatccaggcaggaggaccaaaagggactcagtgtggtctacttactctggggccctagaatccctgmccccccgccacccttcatgtttgcttcagcagctggtagcttttgatgagacagaataaagttttatttttatattaagctactttgcctcagtggttgcacagtaaggggtagagggtagatgaggacaagaacaccctgagaaagtattttacagcacaagctttatgaggaataggagaacacatttttttcacattatactaagtccagcagagcccaggctctggggctgttgctcttaatcctcagtggaggcttcaggctttaccacttagaacgttctccagggctctggttacctgatcagcactgaagttgttcaaagggacattcgtctcttggccaaatgctgaagagagagagggaggtgtctttaactattctgcaccctggaggctaccaaagtaaaataaaagatctttgtctttatcttagtcttgttaagacaggaagagtattaaagagatatgatcaaaatacatttggtatgcctagaattaatacaataggtctcaaacacatctaggaagcccaagtccaaatagaattttggctgattctggatggccrcaatgggttgtttcagggaagctttcgggggcactgtaggcatttattattaactacggtgagcaatgtattgcatgggtccagcctcagctgggagcccattctctctctttttttttttttttttttgagacggagtctcrctctgtcacccaggctggagtgtggtggcacgatctccactcactgcaacctccacctcctgggttcaagcaattctcctgcctcagcctcctgagtagctgggattacaggtgcccgccaccayayccggctaatttttgtatgtttagtagagacggggttttaccatgttggccaggctggtcttgaactcctgacctcaggtgatccacctgcttcagcctcccaaagtgctgggattacaggcgtgaaccaccgcacccagctgggtacccattctctaggctcccataggctatctaacataatacccagcacaatacactaaagttactcgtgtctatctcctcctgtagtctactggcttttggaaggagaagcttttttccttctccaattattagtgcatgtctaatgtctactgtgtctcacagatatctactctsagaaccaatctgcttaaggtggtcactctcctccacctcctcccgtcattcccagggcaccatatagttaaaagctgtgattaaaatcctgttattcagtatgtataaacatttattgcatacctacaatgtgttaggcaacatgataggaaaatttsattttgcaatacattgccatgccagtcttagaggggtaagtgcattctaggaaggggaataaatgtaaaggctcaatcctgttaaactctagctgcatctaaagttgcagctagagtttaacaatagtgcaaaacaaagttttgattccgttttctaatctctacagtgagaaaagaagaacacgcttcctcctaactaatgaagattaaatgagttaggcagggaagcactcagcacagggcccagctctatgtgcaaaattactgagattctcacacactacctggactgacwctggctacacgttatttggagaaactatattgactaacttctctcctgtctgaagcccattcttaactacaaaaacgtcagctcctggtccctacgcaggattcggtcagcctgcatacttatgttgcccggaatacaacgcatcatataaccctgcgaatataaatttcttcatggaaacaagatcaacagcaaggctaaagtccgagttctagtttctccacgggtttctgcacgaccttgggcggtcccttctcttctcaaacccttgttcccctaccggagccccagacccytggcgtcccgcactcaccgtagcgggcccagagcttgggctgcacatcggagcattcgcggattaggatgggtaggtcgggattcgccttcttcagctccacgtagcgtttctcaatgaagtccctgcggggccsgagagagcgccgcgcgtgctgtgggcgggggcttccctcaacttcagggaggtcgaggtcgtgaccctggcgtcccgaagccygcccgcctcaccacgccgcgcctcacctgacgccctggctgccgggcgagcgctgacataagtggatgcgaatctcacgcaggcccasctttgccccgactcctcgacttgctgcggccgccgccatccttgttaatatcgaagtcgccaattccaggtcttcaggccaagtgcyccggtctgaccaaccgcggaccctaaagcctagcccataggctgcatgaggcaggggcggggtaaagcttggccaatgatataaaagyattgtaggaccgctgcgaggtcaatttctttgcgctcggggttggtcggagggaaaaacaggaagcggaaaggctgcgaacgcaaagcagtgtgggttgattctgaggtgcactgtgggaaagagcttgtcgctgcggtgttgytgttggagactcgattgttggtgacagcgaaagaacgataacaaaatgccggagcgagatagtaaggctcaggccatccgttatttcttccccatggcacttggggcacttggcgcattattgtagcttctgagcttaagccgggtgtgtgtgtgtgtgtgtgtgtgtgtgtgtgtgtgtgtgtrtgtrtgtatgtgtgacgcttgagcccggagaagccacagggtcctaagtgaggccgacagctccaaactccgtccccagtcctcactcctactccaagtgatgatgggcggcttttgtgcgtggatcgctttcccccagtcctgtccccatacttaatcctgggttgcgcgtatttatcttttacgtagtattttagacgtgatcttccggaagtcttctctgatcctccagcgcaggattagggtcctctgctttgtgctcccacagcttcttgtagtttcctatttcagcacttattacatygtgttgacactgtcgctgttctaacttttgttctgtattgttcactactatatctcaaatttttgcataggatctgacacgtaagagactgattaaattaacgtcaattttttttgtcaggtgagccgttctccaaccctttggcccccgatggccacgatgtggatgatcctcactccttccaccagtgagtattttgtgctaggaccatggaaatgagttgggcaatgaatagaaaagtggtggtgatggtgaaagaattctgaatgtcttgtcatcaaggatggtaaaaaattatacccgctggccctttatctctgtgagccttaactggatcaggccaagtgcataagggtattagaagggaaattcctgcaggaaaggtgttaagtttttttttttttttatacgtgttgtgtaattacacattatataggaattacttcttccaatagcaaattaaaacataggaaataagggtaaaatcatctttttattttttttgagactgagtttcgctcttgttgctcaggctggaatgcagtggtgcgatctcggctcaccacaacctccgcctcccgrgttcaagcaattctcctgcctcagccttccgagtagctgggattacaggcatgttccactacgcccggctaattttgtatttttagtagagatggggtttctccatgttgatcaggctggtcttgaaatcccgacttcaggtgatccacccgcctctgcctcccaaagtggtgggagtacaggcgtgagccaccgtgcctggcccccgataaaatcatctttgataacatccccaattccagtccatttcttttttyttttcttttcytttcytttctttctttttttttttttttgagacggagtctcactgttacccaggctggagtgcagtgatgcaatcttggctcactgcaacctctgcctcctgagttcaagcggttctcctgcctcagcctcccaagtagctgggactacaggcatgtgccaccatgcacgactgatttttttttttgtatttttagtagagacagggtttcactgtgttcgtcaggctggtcttgaactcctggcctgaagtgatccacccgcctcagcctcctaaagtgctggcattacaggcgtgagccaccgtgcccagcctcagtccttttcttagaagtaaccacagttaccttttttggcatatcttttcctcccgttgcccaggctggagttcaatggcattatttctgctcacagcaacctttgcctcctgggctcaagcaattcttctgcctcaktttccccagtagctgggattacaggcatgccccaccatgcttggctaatttttgtattagtagagacagggtttcgctatgttggccaggctggtcttgaactcctgacctcaaatgatctgcccgtctcggcrgcccaaagtgctgggattacaggcgtgagccactgcgcctggccctcctactcttttttaaatgcatttatacacatacatgcatatctgaggaaaacacaacattgctttgtgatttaaaatatttgagttaaatgatattatgctgtatatatcatttttgcaacttgcttctttttaaaccctgctcagtgtttctgagattatctttcagagcagtgacaagcattccctccttggctaaactttagtcaggttccccaaagagtcccatttttcagcaggactcatccgtggcctgctgagcacagttttaacaaagaaatcaaccaccgctccacccccatacctaaccaagttgcttttagtaattttctataaattctcacttgtccctgttgtattcrgaattaagttcagtctctctactctattacaatggtcttgactcttgttacagtagtcttcaataaagtcttccttggggagaagaggaacttgattagatatcaagttggattggatatcaagagtgggaaaactttctgtgaactgacttaggattcctttttaaaactgaggtcrgcaggccaaggaagagccctagtcagaagagagctttaaaggagtctgactttaatttgatcaagagaggagtctttgttagtgtaccaattaaaataatctcttgtaccattagtgctgtctttccctctttgggaaacaccatcatagtttagtcagtctccagctaataaacgcttagtctgtttcagactgattcttttcttttttttatttttttgagacagagtcttgctctttttgcccaggctggagtgtaatacctagatctcggctcactgcaawctccgcctcccaggttcaagcgattttcctgcctcagcctcctgagtagctaggattacaggygcccaccacaacgcccagctaatttttttgtatttttagtagagatgggatatcaccatgttggccatgctggtcttgaactcctgacctcgggtgatccgcctgcgtcagcctcccaaagtgcggcgattataggtgtgagccactgcacccggccagactgattattttcaaggctataactgaattaaatttacaggccttcttatatacatatgtcagtaatggaccaggctaaatataaataaatggagttgctggctcataggatatatatacttaaattttaacaaatactgcaaaattgcccttcaaattggttatactggtttacattctcatcagcattatatgagagagtccccttcccaaattctcactcacacttgatttatcaaactttytggtagttaacactctgatgcattaaaagtggcatggcatatctggtcgggcgtggtggcttacacctataatcccagcactttgggaggctgaggtgggcagatcacctgaggtcagaagtttgggaccagcctggccaacacctctaataaaaatacaaaaattagctgggtgtgttggcgggcacctgtattcccagctacttgtgaggctgaggcaggagaattacttgaacccaggaggcagaggttgcagtgggctgagatcatgccactgcactccagccggggcaacagagggagactctgtcttaaaaaaaaaaaaaaaaagctgggtgcggtggctcatccctataatcccagcactttgggaggccgaggtgggtggatcacaaggtcaggagttcaagaccagcctggccaatatgggtgacagtgagactccgtctcaaaaaaaaaaaaacagtgtcatatctttgttttaatttgtatttccctgatttctgttaatttaatcatgatttttacttgttcctttttcatttcttattgagtcctaatatttaaaatctttgccttttcttctagatcaaaactcaccaatgaagacttcaggaaacttctcatgacccccagggctgcacctacctctgcaccaccttctaagtcacgtcaccatgagtaagtctttgggtgatccaacctgtctcccaacttgtttcttgctccttcctatttctttctactaagtagaatg

SEQ ID NO: 9941 - DNA, 48285 bp, Homo sapiens
  misc_feature (37088)..(37107): n is a, c, g, or t
agccaagattcagaatgaccatcctctgtgggtcatcatttccctctatgcaaagtcagtgcaggtattgcagccttgataatgggtactgaccactttgaaatggagattaggtgttgccacacttaacttatgtctcagtagctcctcacagcaagaagcatcaatcatcttagtgaaatatgcctatagggcagttctgttccagggaagcattgtctctgtgggtcacattaaggccttgataggaaggtaaagatttagtgtgaatgattccaagtggatgatggggagacaccactgtagggaaagcagattttcctgtctatcccttttcctttttttcagtgtccatcctcctggaaggggcactcagaaagacatctacctccttcttagtagagttctgaaaattctcttttacttagtaataaaaggtaggttcatatgcaggaataagacacaggagatgtaaaagttagcaaaagagatcacagaagagctagctaaggatgctggtttaatcgctgcctccccatttcaaaatgtcttttgttgacaggattctatcttggacattaaagtaccgatatttaaaggacctggagagatgcctgaaatccgatcctacatggaagagttcccattcccatactatatcattcttcgagatgtaaacgcacttcctgagacactcagcgatgccctcagacagtggtttgagttggtgacagcctctgaccacccatagaacagaaagaagagtccaaagtgagacttaactgtggtcagaaggtcacattgcttacccaggtgctcccttttggacaactacaaaaaattttattgtaatatttttattttacaacgtgatcttacagcctacagaatgctctctggctcccggctttgcctgggctgaggtttttataccaaacctggaagcagcagcaggtgcctgaactcgtaactagagaagagttatccttcttccctgccttggaagccctggcctgggaggaggtcataccccaccgttggagcccagctgcctgttttcttttgcaggggatctgggcacctgtgccttgaggagatgctgccaggagcatgggactctgacagtcctttgtataaaggactaaagggagctgcccttttgaccctgttctaagctctgccttgccaagcccatagtgtgtgcccaaaagctgtcaagtggccaagacagctcgtttctggagagtatgagggtgtgttttcttattgtgaaaggaactaccttctcttagagggtaggaagaatgtggtgtgtgtgtgttctcataaagcaactggacattataggtgcccaggtcatctataaaaacgatccttgggctgtgtaaaaatgaagtggcttttcagtatcctctttcacacttgctgcttcgggagactatgcaatgatgggaaggtgattgcccctttatttcattcagtgccatggtccctgttgttgtagtaatttatttgtttagttcatttttttttttcttaacagtcaaggggaagagtgattcctcacactgctttcaagctggactgagccagtctcattctgggaaagaaaygctgtgtccagaactcagcagctccatctatttwttccagtcgaaagaaactgatctttaggcagtttttacttggccagaaagcagtgctgaatacttgaaactgtgtgctctgttctacttaatgttctgtcagaatgttcttttgtaggcagtatgtcatgatgtaatcatctatctccttgtctgtttccaagttacactgtgaagtctgcgacccttttgaggtggtcatcaaagacacagattccttgtttaaccaagtgtcccaaagcatgtacctgaagttatatcattttttattctaaaaagctatgcagcttatattctgaaaactattaaaacatataccactgttgttgatgtaatttgtgactcttcttaatggaagatgacaggattgtaaaaggtatgctaggggactgatcttctctgctggatcagtcagtcagctgttactagttgatgctgtgctaacatgatcccctcctacttccatgttgctcttactacaaaggttatcatttgcatttatgtccatggtaggctgagctataatatgctggctttgcagcagaatgaaaaggatgagttggtgtagccttataaggaggcttataaaaatwaattatcctccataaatgatgatgttgcatcccactcacatttcattggctaaagccctctatggggcagggagtttaatcttccagtagggttgagtctgggagggaaagacaccaatattatgacaatgctgcagtctattacatctgcctttggaagctccatctttcttagacctcaaactggtgtgcccagagtgattcccttggccctgggttagctcatgagatcatggacagtaggaattccaggaagcaggaacccaagagtgccattttcaacttgtgctgccaacaggggcttgcaggagtagtgatcaattaatctgccatgttgatagttgacatttgtgctatcctgcccacccccccctcccccaaccccccaggccttggccaaataggtaagtaagtaagttctgatatttaaggaatggacagcagaacacaaaagtcctccatgctgtcttaaaaatctcactttggggctgggtgcagtggctcacgcctataatcccagcactttgggaggccaaggtgggtggatcacttaaggttaggagttagtttgagaccaggctggcccatatggtgaaaccccatctctactaaaaatacagaaaattagctgggtgtggtgacgcgcacctgtaatcccaagctacttgggaggctgaggcaggagaactgcttgaaccaggaggtggaggttgcagtgaactgagattgtgccactgcactccagcctgggcaacagagcaagactctatctcaacaacaacaataaaatctcactttggataacttcttcaccactcccgtggcctccaccatcactgaagcaaaaggactgtaaaattctccatccaggggtccaggaaatctactctttggtattcttaattatattcagacatctgctggatgtcactgtgttctaattcccctattccaaacccattccttcaacattccccatctgggatgaccactccaacagccaccctgtttacaaacttgggacttaacctatacatctgctttacttccttctccatctctatccataccccaatcaaattaattaatcatcttgtccagtcaggcttctggatatcctgtcccatccctccccctccccctactscactgtgactgggactcttttaatctctagcagggactacttcaatggtatcctggccagtaacttctctttgcttgcttcacttcatcctattcacaacatccaagatctttctaaaagttctgtagctgaaaatcccttcaaagctctcccttgtgaagagggtaatattcaagcttcttcatgtgacctgtgaggctcttgcttgactctcctgtccctcctctcccagcattcctgccagtgtttccatgtgttgtctggaatcctcttagtgattctgcgtttctgacaaatacctagctcagacaagccctccaggaagaataatttcccacagtatgaactgcagcattctttgttagcactatattgaacttagaggttttcctgcccaaagcatgagtctttgagcaaggagcatatgtgactcacgacagcattaccagtgtctagcaagagtgagccctttttttttttttttttttttttaaatagagctttgctcttgttgcccaggctggagtgcaatggcgcaatctcggctcactgcaacctccgtctcccaggttcaagcgattctcctgcctgagcctcccaagtagctgggaccacaggcgtgcgccaccaggcccggctaattttttgtattttagtagagacgaggtttcaccatgttggccaggctggtctcgaactcctgacctcaggtgatccacctcggtatcccaaagtgttgggattataggcatgagccaccgcacctggcctgagtgtttcttgatgggaagaagaaataatgtaaaaatgtctttctcacatattaatgtatagattcaacactacttcaaaattccaacsaagatcacaagatgatttggagggaaatgatacaaaacatttctaaagattatagagaacagtactaatggattttttacaagaaactagagtcctgccagataataaaaacatataaaacaaaaagtaaaaacttaaccctaaatgaaacaattctggacagattactcagaccctaaaagaatttatcatacagtcaaaaaggcatccatcataaagccccgaaaaaggaatgagttatgtaatcaatggtattgatacagcttaacatctagaaaagaacttagatccacgtgatgctgtaaaccaaagtaaattctagatggagtaaatattttaaaaattaaagtttttaaaaaacgaattacaaaggcctgaatgggaaatgaaaagcctcaaaaggcacaaaaatacatgattgtataaagtttctgtatgtataaagaaatgacaaaaaatatagagcccatataaatgtcctcatcataaacggacccaagtcatgaacaattcacaaaaacagtataactaaaaatggcgaggggtatttaacttcactccttttaaaaagttagcaattaactattacagctaatgtattagacaaaatttggcatatattattgataatatgatcatgcagttagcatcattcatacaatgcctggtaaagttcaaaagagctaatgattagagttcttacatgtgccaggacctgttctcagtacattagagatacacaactgaggtagatgctatatttcactttacaggggaggtaataggccaggagaggggaaatagccagaacacagctaggaatagggagccccaggatgctaacaggcgaggcaagcaagtccccagtaaactagtaattgaacatttttcgttctattttaattcgatacaacaccacttggaaaattaatatggcaaagattcgctaactccacttctagtgatttaacccaaaggcatgtgtattgtgggaaagataaaacaactataaggamataaaagcaaaagcctgaggcttagggatgttaggctcctcgttattagtgatgaaaagtgcttaagactgaagtgggtgagccattcaaagctttgtttcaaatgatcatgaaggccaccgctcccggaaaacctttgcgctacaaaagaacaggacaaaaacgagaaagagaaaaaaccaacacaaactgtaaaagaaattaacactttcaattttagtattttcaactatacacatttttaaaggctcgaaagaacatttaaatacgttttcacctctttcccccaaaaaaaccttaacttttttttcgagacagggtctcgctctgtcgcccaggatggagtgcagtggtgcgatctcggatcactgcaaccttcacttctcgggttcaagcgattctcctgcctcagcatcccgaggagctgggattacaggcaccttacaggcctcccagagtgcttgggactgcaggtgagagccaccrcgcccggcctccttcactttcatttgaactctctttaccaggaactgtgttaagtgccctacctttcttctttatcaaaacgaccctatggtgcactgttatcctattttaccgacgagaaaacttcggccagcgcagcagctagggctcagtcccgaagcctcgcgctctcagtccgagagcaacccgcgggccgtctcytaggaaaccgggctcgccacaccccttggtcgaaccccacttccgctcctgcgcgctgaggctccggcggacctctggtggayatggctgcttcccgcttacccccagcgacgctaacgttaaagcaggtaccggcggttctctgccttccaaagcagcttacctgggtctgagctggattctccatctgtccctatccccaacggggcgggttccggggtcctgatgcggcgtgcgcgccctctgagattggcccgatgcctgcggggcggtgcttcgctccgcggggcctgacgggaggcactggctgcttccttggtttggtgcgatcgcgtgagacagcgtcaggcgcttgatttccctgagtcccggtgcctcagctgcccagtgcccacggtaaaagtctattgcactgagctgtggcaaacagcaaatgagattaccaaagatttgaacaactgttaatttagaaaaagtgctgtcgttgtaataacaacttctaggagaccggcagcccttttcagcccggtaggcagctcctgattttttaatggttcttaggtttgacagagcagtaagcaaaaagatcagatgaacctcgtgatgctttctttaaaacatctttttgagacagggcctcactctcgcccaggctgagtgcagtagcgcaatgaaggcttacctcagcttagacctcctgggctcaagtgatcctcccatcttggcctcccaaagtgctgggattacaggcctgagccactgcatctggccaaaaaaagaaaaaaaaaagtttttctttgcctttttcaaaattgaccaacgagaagtactctggttacagcttggtttgctgaagtagaactttccaggctggcgattgtgcagtagtaattgctatttactcctcccttttacagttcgtaagaaggcaacaagttcttctcctctacagaaggattttgcaaacaattcggcaagttccaaatgattctgatcgcaaatacctgraagattgggcaagagaagaattcagaagaaacaaaagtgccmccgaagaggtgagaacaaaatcatggtgaggacagatcctaaccctttttattgatcagtgaatttttttttttaagtttagcagacatcttggaatatagtgccactgagctggtatatcttgaycattgcttgtaatgttaccgattttaaattattattttaaaatktagtattttaaaatatgtagataaaagagtatctacactcttcagcatcatcacttgacttttatgttgtacattttatatgtatgtatgtggaactcttttagcttttctaaaaggcagcagttccaataggtagtattggttcttgattttaacagataaaatggtatagctataccttgtttaaccaggtaaaactataaccagatttcactttattctacaggatacaatccggatgatgattactcaaggcaatatgcagctcaaggagttagaaaaaacacttgctttagcaaaatcttaactatagcattattctgaagrattttcaaagtctccatgtgttttgttgcatttaggattaacaatggacaacacaaagcccagtcttactatttatatgtacagtatttggtgatagagagcaaaggaaaaacacatcagaacagttgccttaacactgaaaaacataccctgcattttgaaaatgtttatggatgtctcagcagttcttaaaagaagaaaaaaaccactaacaaatggccagtagatgctggacacaatcattagggaagtgtaaatcaaaactactatgaggtcgggtgtagtggctcatgcttgtaatcccagtactttaggaggctgtggtaggtggatcacttgaggtcaggagttcaagaccagcctggccarcatggtgaaacctcatctctactaaaaatacaaaaattagcttggtgtggtggtgcattgcctgtagtcccagctacttgggaggctgaggcaggagaatcacttgaacccaggaagtggaggttgcagtgagctgaggtcgtgccactgcacttcagcctgggtgacagagtgagacagtctctaaaaaaaaaaaaaaaaaacaaccctgagattcacattcactagaatggctgtaattaaaaagagaaataataataagtcttggtgaagatgtacagaaattacagaaccctcatacattgctggtgggaatgtaaaatggtgtagccacttcagaaaacagacggtcagttcctcaaaagatgaaacagctgctgtatgagttagcacttctaccccatgcccatagccattatttggcactaaaaagaaacgaaggacttatatatactaaacatggataaaccttgaaaacgttaagtgaaagaagccggtcacaaaagatcacatgatgattccattcatacgaaatgtccagaataggcagaaagattagtggttgcctaggctggctgtagatgraatggagtaactgctaatgggtgtagggttccttttcagggtgatgaaaatatcctacagttagcttgtggtgtaggctgcacaactcttgaatatattcaaatccactgaactgtacattttaaatgtaaggtatgaattgtatctcaataaagctgttattaaaaaactcttgaggtgtaggactgaaagtatactgacaccaggagataccctggaactttctcgaaaaatcctgcattatccctgagggttgttcaggtacgttcttcagatgtgtcatagtttgatagagaactcatcaaaaagatcaccactgggaatctagatctttgttgaaaagggaagagaaagagaagcttaatgagcacattgaagcacttaccagaaagaagagggaagacttctggatgaaacctctgtgagtaccttaacattcacatggaagtagtaaaaataagattctgggtgcagttctccartgacaggaaaaaaaacaaagagaatttgaagaatacgtcagagacaaatacattacaaccaaaattgacttcaaggcacttttgaaggagatcaaatttataacaaaataatttagtgaaagtgaaagcttgtggaagatgttggaatcatccatcctgaaaattgaagtcttctgtttatcaacagaacagctaagaagctaatctaagaatgaccagcacctgaaagatgtagacaacattttgcagaatgataaatggtatccagtactggactgtgtctgagaggcatcaactgaatgtggatgttaatgacctggactgtcagggtccacctctacctcccagagcctcagagcccacaagacaaaataattctgaatactgttccatgggggtaatctactaattcaaaatgcctgcctgtgccaattttcaggtttttatgtagataagtattagttaacctgttgcaaaatgatctgacaaacagaagcatttgtgacgtttctgaacagagaacactttggaaatattttttgtgtgacatgattgatagatacatgctatctctagtaaatctaaaatcttgaaactcaaaatcatccttttatgggtgtagaagtcagtgatttaatgatgctcttcctaacagtggtgtgcatgsaaaggttttcattaaagagcgtatgtggtttgcatttgcaagattcaactagcacagactccaagaaaacctaagtttttttgtttttttaaagcaggtaaggccgggcactgtggmttacacaagtaatccacacactttgggaggctgaggtgggtggatcactttaggtcaggatttcgagactagctaggccactagctagcctaacctggtggcacgtgcctgtaattccagctactcaggagggctgcctcatattgaacccgggaggcagaggctgcagtgagccgagaacacactactgcactacagcctgggcgaaagagtgagactcttgtctcaaaaaaaataaaaaagtgccatcaagttagaagttttaaattcatggtacaagcattgccatagatgtgcctgcaagaaacacacagatgacttttttttgagacagggtctctgttgcacaagctggagtgtggtggcgcgaacatggctcactgcaaccttgagctcctgggctcaagagatccacctgcttcagattttcatttagctgggaccacaggcatrtgccaccatgaccggctaattttttttacttttcagagagaggagggggaatctcactttgttgccaggctagtctcraactcctgggctcaagcratccacctgcctcggtggccagagtgctaggattacaggtgtgagttktttttttttttaaagagacagtcttacctcattctgtcacccagaatggaatgactttctaaaattgcagaaagcagaacatattccttgctgtttataatattatagtcgtatcaaagggaaagagtatttctccttaaataaaattacaaataagaaatgtatgttttactcttactcataaaaggtattgtagaatacaaaaggtttttcaaactggttttgtctttgattggcttttataatccacacttcaaagaagaaatgcatttaacttttaataacttagtcaaaaagtataatgttgccttgccttgcataacctttaactattgcaaatgatgttttgtccttcccctttgtccagtattttccaaatggtcaacagtttaaacatttaagcttgcactgagaaaccttgccacatttcagcagttttgttttgcttttggtggagagcacctgatckcgactttacagccaatgtatttactctaaattacacttttatagatacaaggtaaagtgtagctgggtgaaggcactcaggagccataaaatgtggtcaaccacaataaattaaaatgtaagctaaacaaagtattcacacttgcatttttttaataaggaatttaagatccatagtatctttaatgcttggaagagacacaaattcaaggtgataaaaatattaattagaagacacataacatgcctcaagtatatcaacacttgactccacaaacaaggcataaccatgaaaacaacactccctttattttgggctcccaaaatcaaaagttagaactaatttatttaatcacagatatttagtatactcaataatgcactaacaatttctttaaaaaaacactaatactgtacagtatttctgtgttttagtttttcccacagctgttgaaaatttcagccttgatttgaaacatgacctgcatgacaggctataagttgtcaatagttctttttctttggaaaagtacagttgtggcatttactcactttagcagatagctaaaagggaaaaataaggaaaaatatacactggacctgcagttaagtttttgacaatgccaaggatcaaaaacagatgaaacaacatttgctgaagatgaaaaggtattgcattggtcttaatagatgttgccatctctgggtgaggatgctgactgagcctgttctgtgtcttcatcacctctatttgtttcttcttctacgacagacctccaagagacaagatccatgtagtaagccacactaggtccttttgacccttctcattcttctgtagtctcttccctgtgacttttgacaaaaatactcagttcacaatattagctgcctgcttctgatgggtaggaggtaatcaaaatactcccaccaaagcactctatggtctagacttgatacttaaaatttagttttcagcattcctcaacaaggataccttgaggtaataggagatattttggtaagtgaaaataattcctgcttggaacacagcctactgaactcaggatttaatttcttgagtattaggcagttctcaataaattgatgtatactgaggaatgattctaaagaggttagtgatatcctgtttgagaatagatttagaaaactgaaggtactctccagctctacaattctgtattaggaacaatagggaaatgagaaagtgcctctatattgcaatctaatgagtctctgggggaagactgtctacctgcgtagtagttgagaacaagacaagctcccaaacacatgaaaatcaacttgaaataacatcaaattcagcctgggcaatatcatgagaccttatatctacaaaaaattagccaggactggtggcacacgcctgtagtcccaagctacttgsgaggttgaggcaggaggatcacgagcctgagaggccaaggctgcagtgaggtgtgatcatgccactgcactccagtctgggtgacagagcaagaccctgtctcaacaaaataaaaaacatcaaattcattccatattcaggtaacagtgacatatatctactgaattatttatttttcttttaggaatgtctatatctatggattgtcactatmaaaaaaagaaaaaaccctaaaactgagcttgacaaagggaataaaagcatactttgtttttcttggtgtccccatgttaataaatcatttcttctctttggctcaatgagcagcattttattacaattacgttcaatagtcactaggttcctgtgtctatagaaatagaactgaagtttctgtgcatacatgggatattgaggagatgaatataaatcccatattccaaaggacaagaagcttgtccaaagtttcaacatatccatgctacttttacaactttgttctgtgtttatatttcattatggaacaaagtaaagtcttctggcctccatgaagttggggaacagtggggcctaagttgagttatcgaatattttgccttcaccgcaaagcagtagaaagcttttgaggttaatgacagaattcaaaatgaaatacyttcaaaaaatagccttattcattataaaatgtagagcaaaaatctcaaattcagaaaggtattctgatataattgggtttgattaggaataggttataaattttcaggtaattgttacatgaatttttttccattaatctgctttaaaatcactatataactgattttttgactgaaaatacagaaaataacaaacaatttgaatctttctcatttgatctcattgtttccagagctgttagccaattattcattatttaaataaactgacttttcaataaattttatcataagatatattggatcttgtgacatcatgaaaatatttctcctcaaaaatctgataacttttcatgtgattaaaatgtcaacagttggagaattacgaatttgagaaagagggtttatttagcacatctcagagttacagctcttacagaaagacacttgtctaggcacagcaggtgtgttcaaatttatatgaatgactacttgagttcagacgggattacgtttttcttgcttttgacttatattatttcacacatcttgaattttagagtctaggcttacacatcgtccagtttcttggcatggcttgcttaatctgagctttcaaacttcagattaacctggactgaggctaagagtttataatgaaacccaaaactaagcaagcttcccctggtttcagtttaattgttgaagtcttcataacttcctgggcataggaaacatgtatctggcacattgtagaattagtgatttttttaaaaaggcaaatctgcaatatatacaatagttgactccttgggcatagctattatgcagttgcaaaactggaaatcttcaagaatcctttcatatttcctytttattggtgctaattttccttctgcaccctagtccttagtttggcaagttcctcttctaaacttttaatgtgttccttcaatgtagcyttatcttgctgggctttctgattggcttggcttcgtgcttcttcaatcttcctttcataccacttttccatctgggtagaaacagcctcaaaaaaatactgggtaagctccagagcttgggaggtgtcccgaatgtgagggccagtctgctcgctgcctstggctggtggcggctgcccacaggtgctgcyggctgcrrgttgctgggcacgatgccttgttggcccactcttcccagacttcttagtttgagtgcctctgttgacgcagggcccagcctgctgatcagatctggctgcctcattcatgggtagcaaggctgtctggaccttgacgtttctcagtcgggagcctgtacagtcagaagaygacagctcctgctggagtctctgggtagcagtggagttgagggccttctctttgggcctaaccactggaggggagctgtcggaagctgytgctggacctgcagtcaccactaattggtccacacctggtttcagaaggaaaacaaacgtgagagcaaatccacattcacacagtcatatggctgcgggtcagtattttagagtcttaaggatcctgtatatcaccagccttctccatcaccacccaccatgtgtaacgtctcctctgagccttttctcacctttctgttcctcccttccactttgtctcctctgatgatcactttggcttgtcagagctttcatggattctgtgttagccacactggtcccatttaagccaaaaaagttgctggcttttccttcagcccgcctcaatctacctgagaaggctctggtcctgtttcctgatgcctaargatgatgccgctcaccaagtatctcaaagcagatttggacatttatctatgagaatatgtattcccattctctaatgtctgggcctattccctaccagtgtactaactgcttgacccaagctccaatttggaaaggaggccccattttccacacccagagctccacgacaagccctaagagtagtcctagcatgaaacattttcctgggatgtttccccatgttgttgacacaaagatgaaaccacagttccagagatggcctgtggtaacacaaagcacttatatcaaaatcccccactgaggcctagttacccaggctctgaatgtcctcaaaattgtcattattgagtataatcactgtggctaatgtaaagatggtttgcttgcagcatttcctatctagcactgggggcaagttctatgtaagaactgctgtttaatgaggatttgcatagttggacaaaagtaaaaggcagatcaaagagaaggaagaggtaaaaggcacaaaaggcaagggaggaagagccctgctgaggagaccgatggatcttcatcacctctcatctttggggtccactctgatactatcaacactgtactcaaggcaatgttatcaccagtcaacaattctttaattcctttattcaaataagtttgagcacataaatgagtgctttattattacatagcaactgagtatatggttacgagcaaaatacagtccttgcccctacagagtgcactttaccatccagtgtttcccacagccctagcatacgtactgcctttcagtgcaggagagtacaagagctgctggtcgtgttccttttggacaaaagggctctctgtgtgtgggttacctgtagaggactcacaagtagatggtgtggatttagctctgcaggccctagaatctccagaaagcttctgctccagattctgaatctttaacatrcaccaggtttttaattcatccaccaaggatatcttaaaaaaaaaaacaaaccccacaaataagtacatagaagaatcaagtgaatttgatacatggtttatgaattaaagcatcaaggatggacttttcaattataacagttgaggataccatctaacaaacccaaaagttatggcttgcccactgctatggtttggatatttgacccctccaaatctcatgttgaaatttgatccccagtgttggaggtggggcctcatgggaggtgtttgtgtcaagggggtgaatgcctcatgactggcttggtaccatcctcacggttagtaagttcttgctctattagtttttttttttgtttgtttgtttkttttttgagatggaagtctcgctctgtcgcccaggctggagtgcagtggcacgatgtcggctcactgcaagctctgcctcctgggttcacgccattctcctgcctcagcctcccgagtagctgggactacaggtgtccaccaccacgcctgactaagttttttgtatccttagtagaggtggggtttcaccatgttagcaaggatggtctcgatctcctgacctcgtgatccgcccacctaggcctcccaaagtgctgggattacaggcgtgagccactgcgcccatccgctctattagtttttgaaggagttggttgcttaaaacagcctggcacctccctcctgtctctcttgcctcttgtctcgctaggtgatctgtgcataccagctcccctttaccttctaccatgagtggaatttcctgaggccctcaccagatgcagatgttggcagcatgcttcttgtacagcctgcagaaccataagccaaagaactctcttctttacaaattacccagcctcaggtattcctttatagcaacacagacagattaagccaccttcctataggccacagcaggcacccaagcagagagctatctacaatcttcattaagtgactagagccaccttaaactcaacccccaaaaccacccaaatcttccaaaccaagtacttctggttgcttagaaagcctgagttctcacacactcactgtactcattccatgtctcttatcttggtgagacagtaaactccctgagggtagaaactatgtcttgttctaaaactgtaatggcctaacaatgcacaatacatggaatgagttcaggacagaaatggcatcttccccagcatgttcrgtcttcatctgttgccagcatattcagccacggacataaacagaactacaggttcttttctattaacctcatttcagtatcataaaaatgatacactatataatgtaaaagctcttagggagtctcagcctctgagttttcagtggcaggcctgcctgagctcagtgggcctgtgtggtaaatcataagttaaggactagcagatgctggttcctacctgtcgtttctccccctcatgcttctctgtgtctgagtgctgttgcaggcggttcaggcactccgtcctctctgcagaaagtcgctcaaccatcagcttgtccaaaacacgcakctaggagtgaagtggagcagagtgtaagamtgagatgatctcagggtgagccctggcttctcagctcctgcagaggggcttggggaaccaagtaggagcccctgcatgcaaacttcaaccccttatctgattccatttgcatgtaggactcatggaactctttcagaattcttgagcatgtttctatgaggccaacgtttcgttttttaaaaaatcttatttgttaaagtttaagaggtataaggactatgaatatacaggccaggcgtggtgcgccatactcccaccacctgaggtcaggagtttgaaaccagcctggccaacatggcgaaaccccatctctactaaaaatacaaaaattagccgggtgtggtggcacatgcctgtagtcccagctacttgggaggctgaggcaggagaatcatttgaacctggaaggcagaggttgcagtgagccaaaaaaaaaaaaaagagagagagactctgaatatccagtaaatacacaacctgagcccatgcaggccttgtaggccttaaaacattatttcccagactactgtaagaaaaaactacatctcaaagtatggagatttttctcttccccaaccccactttaaaaaatgttagtggttgcctacaaggcagtaaaatgagcttttatccggctcttgcagtgagcaaatatttttggtgcttcattggaagtagctaaagtacgtaagaagagtgtagaaggaacttaaaggattgcttcagagaacaagcagttgtcactttttaatcacatgcccttctggagtacccttcatcttggcatttcctgtgggaccccyacacctaggagggccaaactttcactgctttgacaaggaccaaagaatgaaaggaactattgttaggaagagccaatccgcgaaggctcactggtgagctcccctcctgtcagggacacacgtggcattccacacccagatgttcaaaacattaagaaaaaagaaacatccgttctggagacgtggtgagcaccttctgtttttctcttcagtccatgttttcctgtgacctgtgctcctcctgttttctaggattggcctactctccccactcccttaacctcttcctccaggtggctgttttcaagagcagccataggtatacattgctttgttcacaggtcacactaactggctcgggtatgagcatctgactcaagggtgccacggtcctttcttggtgatttggaaggaggactaagattctacaccccaatctgtcactcccttgaactgaagtgaggcccttgaggtatcccaacattcatctctcattcctctttcagcttaggctaggcgaagtggggtttttatatacaaaacagtcttcactaatctattattgacctaagaaaatatttttaaaatggcctttctataaaatacagatagcaaataagccttaaaaatgtttcatcttaccagtaaacaaggaaataaaacttaaacagtaaaatgtccttaatcaatttggcaaaaacttttttaaaaaaagggcagggcatggtggatcacacctaaaatcccagcaccttgggaggccaaggcaggcgaggcgcttgagcccaggagtttgacaccagcctagccaacgtggtgaaaccccgtctctaccaaaaaaatacaaaaattaggtgggcatggtggcgtccgccttagtcccagctactcagcagactgaggtgggagaatcgcttgaacccaggaggcagaggctgtagtgagctgagattgccacactgcactctaggtgacagagtcagaccccatctaaaaaaaaaaaaaaaaaaaagttgtaacaaatactattttacgaaaaccgagaaaatctgaatatgggctggataacgttttctcaggtgtgaaagcaatattgttatgaagttgaaagtgttattcttattctaaacattctgaaatatttagagatgccctgtcaggacagtctgcaactaaatctgaaatagttcaagagttaaaaaaacatgtgtgtcagagagacaaggcaaatgcagcaacatattaactggctgactacagggattatatacaagcattcactccattattctgtgaacttttctgtatgtttgaaaacttttaaaataaaaagttgggaaaagaaaaaaatacataattattctaattttgtatgcaatgggaaaggagtgtagcaaaaattgacatataaaaagattgacatataaaaaaactcaaaaaagataaactctaatttttttttttttctagacagagtcttgctctgtcacccaggctggagtgcactggaatgatctctgctcactacaacctccacctcccaggttcaagcaattcttatgcctcagcctcccgagtagctgggattataggtgtgtgccaccacaccaggctaatttttgtatttttagaagaggcggggtttcaccatgttggccaggctggtctcgaactcctgacctcaagtgatctgcctgccttggcttcccaaagtgctgggattacaggtgtgagccaccattcccagcctaaacccaaatattaacagtgcttttcagcacagtgggcttataggtgatttattttcctaattttcatatttctaaaaatgctctgtaatggggatatcttatttctataataagcaatttaaacatgttctttaaaaagctgaaataaatgtactttaacaaaatcacataagcagaagcaggcctcttccctgacagcccactggacactcccagggtggaagggtgtgctaaagtcgaagttggttcctgagttcatgttctgccagaacaccttgcaattaggaagctgggccttatgacatacttggtgctgggtcttattctccatctgccccagctttgtattcattttgtcctgaaccgatcccagctctgcttttatctcctccacagtagcctccaactgattctccagcttgttgattagaggttcacatcgacaaccatttattggtgcctaagagagaaacaaaaaaggaatcaatcccttgttcattccttcatcaggtatgttttgagcaccatccaygtgccaggcagtataccaggggatagagatgatggaagagataggctcatccttgtcataactttggaacatcttataggccaarttttgggtgtagcagacactaaaattcagagggtaagatatggtccctctcctcaaggtgcttttatataccctggggcctcaagatacctagtcacctgaggattgtgcagcaagctctgcagctacacaccctgtctgccttggccttagcagcaggagtggatctgcaccgtgcaggtggggaggccatctggcttaccttcaaagcttgtgctcaactaagtcaatgcctaaagtgcctatcagcccccaggaatgccgttaaacaaaaacccttgctgaaggcctaygttcccttctcctgacactgctttgcaggtacctgcatcactttcccatccttgccccggtacaatgtgtagagctgatacgccctgaactcatggggtgggggtggggatgaacaccgatgcctgttcctctttttagggtgattatgagcatgcaggttcttctggtgtccaggctgttggtcggctggtggggtggggtcagaaaaygctgacacctgtaagagaggaagagacaacacccctgaacgctttgacctctgcaagactgacaccagtcggtggcgcccatgtcaccccatttgggcaaagagccccactttgtttcacctcatggtgtcctactccaagccacacatgtcaaaagaaatatatcagcacattcaccttatgtctgatgttagccagatttaatttctgtgctctggctccaaaccagccagccaagtgagtggctttttagctgatgggcatgacgctctgccaggaccctcgccaccctgcctcccagccacccctctgggctgctttctgtgtctcctgaccttgggccttgactttctcctcctgtcatcctttgctctgggttctggggaggctgacaggaactcttctctggcttcttcttttctggccacagcctgttcactgctgggggtgtctcctgctgagacactgccctacagaaggaaaaagcccagagacccattgtgtttgcttccttggcctttttcactaatatggtcaaatwttctttrcaagattccatatggtaagggacccacgagaacctttgcaaataacataaatttcagacataggaaacactgcttggtggtcttaactaacatagaacgttttcctggttggttgaacatttggcttttattgtatttattaggtcctaagctaaatatattcctgggtccaattcgatgttgtagaacaccaggaacctacccgacacaaaacacctcagcattagagatttttgatcgtttagatttcaacaaaacataactcactcattctttgacctcggatgcagcccccctcccgccccccccaccccccactcccccaccccaacccacaacactcatggcaaagagtaagaatcctttgaaatgaaaaaatatcatatttctggtccttgtgagaacgttcacaactgaatatgtacaattcacatctaggaagttaatcagagttgtaatgccttaaccctggaaattgatgagaggattgtgaaatagcagatagaagagcaagtacttggtgataacattttctgtgccaaaagctgtctctatatcccagacttctccctcctgagtgaactcaaaggcatggtttattccagggctacacggcacaagagcacctagctgaggtggaggtgtggggcaagaggagctgaaatcagctcgggctctgctcaccatgcgtgccctgtgcacagtgggtctgcccaggggacatctttttctaattcatataagggagccatacaggctagcatagccttgctcccctccctcaatggaagtggcctgtgccagtggctctcaaattttagtccccatgagaatcccctggagggcttgttccaacacagattgctgggccccacccgagtttctgatcctgtgggtttgaggtgaggcccaagaattatcatttctaataaggtcccaggtgacacactggacaccacattttgagagccactgccctacacaatctgggcatggtgttagagaggcagtgctacccgcaggacatgggcaaaggccacagatacctgggctggtaagtgtgccccccacgtgtactggacgggtaatgggcagcgcacacggaggcacatggcctgaaaccttggggaatggaggatgtgaaaccaaagagaaaaagactggcaacagtttgaagagctccagcaaggaggagaggcagagagggccgggcagccaccaggtgaacctggccgaagcagggagatagtttcccaccctctgagcatgggtggatgtggggacggcgggaggactgccccccaccttgctttgggccacctcatctcttggcacagactgggctctcctctcttccttgagcctctctctctttttcctcaggcttcgcccacgactgaagcgcaagacctgaaggaggcaaacggcattgttacaaccactggtgtgcgcagcatctgtgtgagagaattctccttggacctggggctctgacctaatggaatttacagcttagagggtgagagcaggtgttcacatcaagcaagcacctctggaccacctaccatcctcctaggtcttgtcctgggcaccacggggactcggagacaggtaggatattatccctgacctcaagaagcttaaagtctatgatgataataactacagacactgatgctgggccgggactgccaactacatgcacagagactgtgctccagggagtgccattcacataaactaggatatgaatggcgtctcctggagttgtgcaacgcagcagccccgtgtgaggcacagtctcactctccatcttggtacactggacttgagctagcccagcagatgttcccttggccaaactgtgtccaagtcacatcaatttgattcaaaatattattaaagtgtatctatgagccatagtaccaaccacgggacagttatctcttccccaaaaggaagcatttactctgcctcttacagtgcagagtgacagaatggacacagaaaaacataggtgggtcagaacagatctcagtttgaacccagtagctactggctatagggtctctgggcaagtgatttgacctctctgcgctctgtcttctcaaatgtaaaaacgggtcaggcgcagtggctcatgcctataatcccaacactccgggaagccaaagtgggaggactgcttgagggcaggagtttaagagcagcctggcagacaaagcaagaccttgtctttatttttttattattatttttttttgagacagagtctcactctgtgccccaggctgaagtgcagtggcgtgatctcggctcactgcaagctccgcctcccgggttcacgccattctcctgcctcagcttcccgagtaactgggactacaggcgcccgccaccatgcctggctaattttgtttttgtatttttagtagagacggggtttcaccgtgctagccaggatggttttgatctcctgacctcatgatctgcccatcttgggctcccaaagtgctgggattacaggcatgagccaccgcacccggcctcgtctttatttttaaaaaagaaaaagaaagaaaaacggggagtcgttgggattcaccaagaaaaaataggtggctggcatgcagtggactgtcagtcactgtcaggtgcttccctacctgccttcaggtggcttaattggcagggggtgtttaacagaatacagatctttgagttgatggaaaccttcaatctctggtccgtaatagttaaaaatgtaaaagagtccttagaccaagaagtctgagaaccacttccccgagtcatttctaaagctaaattcagattcaccaggaaatcaagtatggtgaaagacagtgactatacccattgctcacctgatgtatggactcttaatacagcaccaggatcagcctaaaatgtactttcagagcgttcgtgaaccacaccaatcaaaatgacaagtgacactcagaggtcacccaaacccaaaataagaatcagcaaaattccctccattcaccatatcattagtcagtgaaaataactttgcatggcttccagcctttctcagcaaaccagaccatctacgaaatgggatgtcattaatcttttccagtccacagaagtgagggaatattgaccttsaggcctccaaaagtagtatcctatggctgggcatggtggctcacgtctgtaatcccagcactttgggaggccaaggtgggtggatcatctgaggtcaggagttcgagaccagcctggccaacatggtgaaacctcgtctctactaaaaatacaaaaatcagctgggtgtggtggcaggcacctgtaatcccagctactcaggaggctgaggcaggagaatcgcttgaaccccagagatggaggttgcagtgagctgagattgcaccactgtactccaacctgagtgacatagcgagactctgtctcaaataaataaataaacagtatcctcttagtactgctgtggcccatttaaaatccacgtccaactacgggcctaaggcaaggggattttctcttttcaggcaaagcaaatactaatgctatttctgtaaccacagatcaagagaacagtatgcgtaacatcttatgcctaaagttccttgtttgtgttgagaaaaagcctcagcatatacaattatgcataaaataaactttcatagcatgccatccaacttatttgttattcgatgtaagcatggagaaacctgcttaagtctttttttgttttaagtggaaacaaaaaagaactgcacagggaaatggtccacagtaaggctctttgccctttaagtgaagatccttgggctctggaagacaaatgacaggtggattaaagatccgtcaatctttctatgcctggggaaccctccaaccctgtaagacttgatctttgtatggctgagggtggggctggctgtccattaaattaccacatactgaaattgccagagaaatgtgatgggttctgacgtttatacagcacttcatacttttagatccatgagagactagcatttttctatcaggattcatggatgtgattccacttacgataaaagctgctagaggtggaaaccccgcagcttttcctactgactttcttttgtcgggagctctgtggccttccagagaccactgagaaggaccagctccatgcacaagaaggtgatcaattttgcaaaagacaaaaatcttaaccatttccagaaactactagttatattaggcacgttttaaaaacttaaacaaaataaaggccatcccaaaccctgggctgttgtcgggttattttgcagcagggttgtgttcaaaatcttcctttgactccctgagactttatcttcttcttgcagaataagatggaaagccaatcagtgtttgctgtaatgtaatacagaatagtgccaatctggaaataacctaaatgtccaacattaaggaaatggcttaataaactattaatagcaacaaaaataatattatgcctccattataatgaataattatgaagactgcagaacattgttttataataggataaaaggaagaaatacaaaagggtatatacattgtaagcacaattatgtaaaaattatgtgtctgtttcatctattttgtggatgaaacaaaaacagttgtttcagggggctagaattataaatagcttataaattattatgacatttctttattgttacttagataatgtcaacctcaactaaagtatcagccaccattttaaaaaaaattaaatgatggtcaaaataccattagtcagtaaaagaggaaagaaaactagactgtacttaactatctccggcaggcgactatctgcccagaatcgtcccctccctcctgcctttctctggggaatgccacttctcttcttaaagtccctgtcccacttcttcagggatgggcatttggcctaaactctgcaatcatggccctgtcctgcgatgtcttaaactggaacttcttccttggctgagtagctgggaaactatgacctaggcagctggccgtgacaaagatccagccacagggagaagatgaggcggcccaggcatgaacacgaagagctggacttgatgcctttgactcccgtcatcctgggcccccatgcatgcctatacctcyactgcctggttacattccatatttaagttagtttgaagaggcttcagtagattgcaaccaggagtcccaacaactttgtagtcccgcataatcagtaccatggaaagggcagtaaatcctacctggggagctttagtaaggagaagagcaacttccgggttattgtggtakcgggcagtctccagcggagtctggcctgcctgaggagaggcagagtaggacaggtgagaaagggccacgggtcccacacgcacatagcccagctggcacagctctggccaggagcaggcagttccacacccagtcacacccagcacstacgtggcaaaacatggccacctatgtgatatggccctggtcatcagcctcagaccctccagtgagggaggtgggtcacactggaagacacgctaagtaaaatatatgacaccagagggcaagggcagaccaagggggcaagaagtgctttaggaggccaaggcctgggyaccacccaccaaggagtgcttccctgcaaagaggggagggaacgtagcactcagacagcatccagggggaatgtttcagttggggaaacaccacagaggatctgaggcccagcccagtgattaatctcccctggaaaacagtgggaagacgccggaggagcagatcagggctggccagagagattcaggaagttgaatatgaaaagcaactacgagttatggccataatgtaggttctcaggagatgaagccaaaacccaggagttgatagcaaaaggaagatattcaaggcatcatggaactgcacccccagtactggttgtagagctaaaagaaggcaggaggagaaagaggggagctagatacaggagccaaggaagctgaagagccttgtgccagcttcagcagtcccagaccacacacccctcaaaaaaacctccacacagcagctgttgcaccctccaggccctgctgaaccattcagaggggcagagaccgcaggacagcctcgaagaagaaagcgcacctgagctggtgcctgctctaggatctgcaggacacacagtgagagggggagagggaaagggaaacagtgaggtcaggcaaagtggaagagaaaggagttgctttagaattttgaagctgactaaactgagggccatgtggccatttttctgagcatcacatgcatttacagcttggaactcactttgggtaacatccactcgtcagtttaactggacatccctgagttctttttcatgccaggttgtgttcactgcagtcaggcagctaaaagcaggccccaaggcttgtcaactcctggggctgctcagagcaggggtacccttcaagtccaccccaatggccctgggggctgtggttccagcagagatcccccgtcttccagagtrcgctgggcctgggggtctgcaggggtttagtacacatcccattctggaaaggggtgggaaccactttagaaagcaatgttgcaactcaacttacattgttaacaatggtcrtatctgctccggcttccagtaagattttggccaccttcttgtgatttagggcagcagcaacgtgaagtgctgtgtctccagcctggaattgattagaaggtctgctaaacctcatctgctcatggcctacagcccccagcttttcattacctggcctaggtgtggctcttcaaagtcaaactgagatttgcctgagactgaaatggggccctttgttaaagcgttatgaggctctacttaaagaggtcttggaactaagtgacctcggcaccaatatcacctttctttctgagtgaggatacctgaaatcacgcagcaggattaaacgcaggggcaaagtaatgctggcctgggttgttgagaatggtgggacctgaagcctcacgaggacaggaggacaggcaggaggcctggggcaggcaggctagtcattccacttttggctctgttcttttacccagggaggtcagaggtcagaaaactgcttggtgtctgagtgctggattgagcaggagaagccgtgaagatggctacttctgcaagcaccggagaggtgacaggccagcctgcagctacagcgggtagatctgaaggggccactgggactcaatccatctgcaggctcaggatatgctttgtgcgggtggaaacaccaagaaccagtgttcactcaagaccaactgttttctacatcttacagatagcctataaataaatgttcatattatctttatacaagaaatatgctttcacaaaatcaactatgaaaggaggataaagacaactgcagcttagtgggccaattccaaatgcaaatgctgtcattttccaaacacaatgatataaataaaccagacaaatataggagaagtgaaacaattcattctttctcctatcaggtgatcaggcaaagcgcctgatacttttttcctgggtagcatgaacattcagccatctttgtgaggggtgggaaaatttttatttcatttctgagtcacttagctatgtgtattgaagggaagctctgcacagtgctttccccttggctgaatattggaataagcttcagagctttaaaaaatgatgatgcctgggtcccactctcagagatgctgaattcattggtctaccatgtgggctgggcagggggactttttaaagctctcaagtgccgtgacacgctgccaaggttgaaaggcactggttggtgggggctatgcaggggtcacctgatgatctagcaccccactggggaggccgtgctacttgattaggtcagtggctgtatactcagacagagagctttttaaaaacaccattgcctggacctcacccccagaggttctgactctttcaactggggtgggatccaggaacagtattcttaattcccctgttgattctcatatgcagccagggtcagaaaccaccattccatggtatttttaatctacaccacaatctaatttttttttttttagttaagatttatgcactccaacaaagaaaagygaaacaatgtaccacataggtgtcaataaataccaagacaatctaattttcaaatccaatgactgctggaaattgtgcacatttctaaggaagacggtaatattcacagctttatttcaaaaccccattgcatggcactctctacagattatatgcccaattttatgggaatgaaagactatcagctcaagtgtaagtaagtggcagtgcaaggaacagaacttagggagttataagacttctaattcctatgcttgcttggtgggtttttttttttgttttttttttttttcctttaaagagacggggtctcattctgttgcccaractggtgtgcagtggcaagatcatggctcactcaccacagcttcaaactcctaggctcaaacaatccacctgcctcagcctcctgagtagctggaactacaggcacatgccactctgcccaatttttaaatttaattaacttattatttatttattttgagatgtagtcttgctctgttgcccaggttgtagtacagtagcatgatctcggttcactgcaacctctgcctcctgggttcaggcaattctcctgcctcagcttcctgagtagctgagattgcaggtgcacgccaccacgcctggctaatttttgtatttttggtagagacagggtttcaccatgttggccaggccggtcttgaactcctgaactcgaagtgatccacccaccttagtctcccaaagtgctggaattacaggcatgagccaccacggccggccaaatttttaaaaaaattttttgtagagacagggtctcgctatgttgcccgggctggtcttgaactcctagcctcaagtgatcctcctgccttggcttcccaaagtactgggatgtgagccactgcacccggcctcccttgcttctttactaaatcacattcttcctcgtgggttttctttttaaaatcacatttaaaaaacaaagcctgccccaggatctccagaaaatgttcaatatgcaaatgtggtgatatgcacaggaattataagggcacactttctctagcaggccagataagccagggccactagaactcagtgtgacacccatgcaaagcccactgctggctgagtcccaggtaggtgacatggcagcttcccagcagcctctgctcccgtttgcactaacagacctgtccggtagccttgtgggaagggtgctggcagccatgaagagratacatgcactgacctggttcttttcatggacagaacagaaagcagtgaggaggagcctaatgatggacaagtgattatagcgcgcagcaacgtgcaaacaggtgtctcctgcctgcggacaaaaatcaaactctaagcacaatctgagcagttacaaaacaaatagagaaaagtagaaagaaaatgttatttaaaagctagcagactatcatgtactctttagggaatcataagcagctcttttaacatagatgctccaccccaaggctcgccattctttgctgctgtgggcagccctgctccctttctgcctgtgcagaacaaccacgtggtcacagaatcactgcttccacgtttatgaaactagacgtctgctccccatgagacctttccaagagctaaggcaggctctgcttacctgtgcttgaggaggatccagggaccctagcctccctacaacccaaaaggtcagtagtatactgacttaagaccaacagcattgctttggaaatgagcccttcccagcatagatccctcatggatgaaaggacagggcagcaggggggttgtcaaatcttaagattacacgtaccccctgaagttcaaggagtatcccacttcagttggaccccaatatcctatatggagctatgtagtaggggagctcataaggaagcaatcactgggagcaaaaaaagggyatgaagaaaaactcaggggcaggatgctcagtaagcacaacaggcagaaccctgttcccacaaagacaataaagaactggagacaaaaagctgcctgcagtgttttcttgccatttccatcctagctctgtctggagaacactggccacttggcatacttttctcccctgcattaagacggaaccaagctcaaagctgaggttcagagcattagatgagtctaccccaaacagggagaccctcacctgaggacactttagaaagaagcctcagatttatttatttatttagccaacgtggctaaggcaggggatttataaaggaaatacagcttctttgtgaagaagcratacccatgtgacctttccggtcagctcatcccaaggacgcctcagtcatcagtaggacctgctcrctatagatgctgggcatggggcattagaggacctcccctgtaaatggcaccagctcatatttgctgataatagtacaacactcaacactctatgtgggtagagactttcttaaaacattaactggtttcctagtctgtaattggccagacacgtactgtaagaaatgataaaccaaagatgaggyatgaagggaaaatgatgggagaaaagcagtatttccaagtcttttgattcttcttctcacatgcctgaatgatcccttagaaaaytgccaaaaaaagaacactttagagatagtccccaaatactttttmcattttaatttctagatgttaaggttcaagtatgctcatgaagttattttctgaagtgacacaagaaagagagaacgtgagaatctggttttgttcacccacattatttttgaggtcagcgcgggacccggccagcaggaggacgcgcgtgctctgggagtggctgttctggcaggccaggtgcagagctgtgttccccgccttggagagaggcagagagagggaggacatattagyaacatgcttccgcacagacttgcatgccttgcagaggggcagtacttactcgggggaaaaggcaacgctcacattctctgcctcttgcccgatggtttcagtggggatgcttcagaggtaagaacatttaatttggagtctgaacaggcagaagagtcctatttgtcataaaaccttggttccaagtcctggctctgcaacttactaactaaaagccakccttttcaaatgctcaaattccttacctgggaaatggagcatgacccccacatcctaaaactatggggattgactcagagtgtctaggaaggtgttttcttaacacacaatgctggacacatgcacagtactcaattcctatcagatgacttcctgccccacatgggcaatagctgtggttacaatccctrccaatggtgggctaaaaaaagtaaaactagccacttcctggaagggcaggctaatgcaactgagatttaacttgttagcctttttcaagtcacccattcttgtatttttcttgaaacatcaaaattttaactatgracaccaggccctgcctttcaggcagtacagttgcatctatcacttaggacacagattgagaccctcttgctttttgggtccttcttgtttttgagaacctcaacaaaccacatcacaatgacaaccaagggtcagaataaggtccatagcaatactgcaggaaaaaattgcaggacatgaacagaacttttgagtctatgggagtagggcatrtgaggccgctgataacccctagaaaagtaacaagaaarcaaggccgtgtrataggtgacattgtgtcatccaagagcctgcaagcactcaggaggttaaacacagaagctccgcgttggttctgctgagctcaagtgctgggtcaggcttgcaggtgcgtgggctcagagcattacactgcctgttcattgcttctccctcacctagttcacacccttctggatctcacagtcctggctgccgatactccagtatatcagattcctgatcttttaaaaagagaaatgagttaaaaaaaaaaaaaatagaggaatactggatgcggccagtttgcttatcccccttctcttcaccttagctccaaccagccctggtggaccttttgtctcacttttacctccaggcacagggaggattacaggcctgaggttctagcaggctcgctggttctcaacccttgggtgcacattagaatcacctggggaagctttcaaaccagccctgtgcacagccacaaccgttctagggactctgatttatgtggccttggggatgggtatccagcatccctattttagtactgaaagtcccacattccgggaaaccctttagcccagggcaaactgggacagtccatcaccccaggcctggtcttcaggttttttttttttttwagttttgttttttttcctttttcgtttgtttatagttccccaggagggtctaatgtgcagccaggtggagaaccactgctagtttagttctcagcaacaaggggtctgcccaggttttaaaaacactactctcaagttgtctgcaagttatgggcttcatggcaaccactaaatacgtgttgaatacatgagtgaaatgaaagaaatctgatgcctctagaaatagatcataccaaagcttatattgccaataaggaaatatcratgatgtggaaaagcatttgcaccaagaaaattaaaaaccataggtttggataaacaaattgtggtagatccacacaatggaatactcctcagcaataaagaggcgtgaaccattcctccatgtaacgacacggaggaatctcaaaaacattatgctaagtttaagaagccacacacagaaggccgcatactgtatgattccatttacatgacctttatgaacaagcaaaacagatccgtggttgcccggggctgggagagggtgactgggggcctgccaccagagggcgcaaaggaacattaaggggcaatggaaacattctatatcttatggtgggggttacacaaccgtatacatttgtcaaaactcacagaacagcgtgacttcatacctatatctcaaaacctgacattagaaaatgtgacctagggtagatatatatgtagcaggcgtttttccccaccctgagtagtgggtactgatttcccagacaggagctgctacatctgctgaataagaaggatctttctacgggctatgrctggtacaaaatgtccctccctttgagacgcatgagtttcctgacctgtccttctgaagccattttatttacacagaaacaatttctgggctgggtgcagtggttcacgcctgtaatccatcaccttgggaggccgaggtgggtggatcacaagatcaagagatcaagaccatcccagccaacatggtgaaacctcgtctctactaaaaatacaaaaattagctgggcatggtggtgtgtgcctgtagtctcagctactcaggaggctgaggcagcgtaatagcttgaacccgggaggcagaggtttcagcaagccgagatcgcgctccagcctggcaacagagtgagactctgtctcaaaacaaacaaacaaacaaaaaaacgtggtgattacaggccgggttcrgtggctcactcctgtaatcccagcactttgggaggccaaggtgagtggatcacctgaggtcaggatttcaaaaccagtctggccaacatggtgaaacgctgtctctactaaaaatacaaaaattagctgagcgtgatggcaggtgcctgtaatcccagctactcgggagggtgaggcaggagaatcgcttgaacccgggaggcggaggttgcagtgagccgagattgagccattgcactccagcctgggcaacaagagtgaaactctgtctcaaaaagaaaaaaaaaagtgattacacaccatcaactcctgttccagaccatatgcattttgaagaaatgggcagccacccacctcctgagctgtgagccaggcactaccggcgatattaccatacgtagcttgctgctctcagacctcaagcttttgatccatgagggaaccatgaaaaatatgaactaggaaacgacagcacaaagctgcatgcggtgccaagggagagttgcagaagcagcccagtgggtcttcggggagggagagggcctggggccaggttggaggtctataggcaggaatgagaagcaggccagtgagccccactctgagggcacaggaggtgctctaggggaaaggagccaggaggaactccagaggtgggccagcagaggcttatagacagtgtcagrcaggagctttatgrgaaggtcgctgagcagaggaagagcaggatgaaaggagggactagatttgagcctgccaatctgcttgaggcatctgaaataatccagggcatgcttaagaatgagcatggaaagaggaacaggtgtgagacttgaagatgtcctaagatgtaatgagggactggagaggggagacggatgaaaatgacgaaggcatggcttgcttaactatgctctctaatgaaccaatggaaaagtagtgagagccaggagatttcaccggagggcaaagccactgaggtgggttctcttgctcccacagagattacgttcacaaaggagtttcaggctgtcatttctatttcctgcagcatgcaaggtctggagaagtcacttcattgatggggtatatttctatagcttgatttgcctggcattgctgttgaagatcttgtatgcagatgtctgtgtgtcataagctagagatactatggtttcagatttgacttggccatgaaattgtacatatatatatatatatagtgtgtgtgtgtgtattagggagggtacttactgctgcccattgtccccaggctactgccacctagaaccccattctagcccacctgattcattatcctaccactattagctgaagctaccactctgtgatgtggcagtgcactgtgggaaattctcaggcccctgctacagacccaatctggccatccagggaaagaaaagagggtaagcccttttatgacccttcttacctcaactgcaaatatctccagagtactgataacgcttttttatttttgagataaagtatatctcttggcatgggcacagtggctcacgcctgtaatcccaacactttgggaggccgaggtgggcagatcacggggtcaggagttcaagaccagcctggccaacatggtgaaaccccatctctactaaaaatagaaaaattagccaggcgtgggggcacatgcccagatacttaggaggctgaggcgggcagatcacggggtcaggagttcaagaccagcctggccaacatggtgaaaccccatctctactaaaaatggaaaaattagccgggcgtgggggcacatgcccagctacttaggaggctgaggcaggagaatcgcttgaactcaggaggcagaggttgcaataagccgacagtgtgccattgcactccagcctgggtgacagaacgagattctgtatccaaannnnnnnnnnnnnnnnnnnncttttatgacccttcttacctcaactgcaaatatctccagagtactgataacgcttttttatttttgagataaagtatatctcttggcatgggcacagtggctcacgcctgtaatcccaacactttgggaggccgaggtgtcacggagttcaagaggcaagtatctctacataattagccacgtggggcacagcgactggagctgagcgggcagatcacagggtcaggagttcaagaccagcctggccaacatggtgaaaccccatctctactaaaaatggaaaaattagccgggcgtgggggcacatgcccagctacttaggaggctgaggcaggagaatcgcttgaactcaggaggcagaggttgcaataagccgacagtgtgccattgcactccagcctgggtgacagaacgagattctgtatccaaaaaaaaaaaaaaaaaagtctcttctcccaattgtaaaagaaataatgggttcattttggaaaatttgggaaaggtacaaaaataaaaatcaatcttagcctcaattcccagagataaccactgttaatattctgatgatattcttctgtgcttaaatttttaaatacacaaatttatattaagcactgggacatgtactatatatgatcttatatctctttgtgatgttctttaacagtggaaagcattattttcaaaactacgattttaatattaattatattccactgtatgaatgaaccataattctaagtctccctccccacagttaaaaaatataactactgctgtcatgaacatctttgtcggtaaaattttactggttttattgcttatttttttcttttccatatttcatttcaatagcaggttttattacctttttaggatagagtccaagaaaggtaggtaccaagtaaaaaggacctttttttttttttttgagaccgggtctcactctgtcacccaagctggagtacagtggcacgaactaagctcactgcaacttccgcctaccaggttcaagcgattcttgtgtctcagccttccgagtagctgggatgacggcatgcaccaccacatccagctaattttttgtatttttagtagaaacagggtttcaccatgttggccaggctggtcttgaatgcctggtctcaagtgatccgcctgcctcagcctcctaaaagtttgggattacaggcataagccactgcacctggccaaaaaaggcccacccccgcccccacctgcccccacgacagtctctcactctgtgcccaggctggagtgcagtggtgcaatcttggctcactgtaacctctgcttcctaggttcaagcgattctcctgcctcagcctcccaagtagctgggactacaggcatgagccaccattccyggataatttttgtatttttattagagatggggtttcaccatgttggccaggctggtctcaaacccttgacctcaggtgatccacccacctcagccacccaaagtgctgtgattacaggtgtgagccaccatgccaggccaaaaaaggaccattttaaggctcctgatttgttttgccaaattgtctcccaaaggtggctattcgtatcacactttcccagcagcatctaggggagcccactttactaattttcrgtattagcattttaaagttcttttgctgatttttttaatgccaactccattgccatattttttgaatacaaaaaaactatgggacagtaatcgcatgtagattcccagcagcagtcaggggcctctcacataagcagggttttggcgctgttggtgcrcttgctcctgacctggaatatcaatcagcttctagccttttctgcaaatgaaacttctgggccgaayggaccttcaggttcctcgtgccactctgggctctcactcttctcactggaagaaggctcccacagggggagaaacccacagccatcctcacctgtgaatgaggcattctagcatctgccaggcctcaccttgttcttggcaagcacgttggctcctgctttaaygagcagcttggcygactsgctgaaaccatgccaggatgcttcatgcaaggctgtattcccatcctaaggaagacacacaggtgggaaaggcacattacccaagacctaattcttctcattatgatcaatacatcacagtggatttttacggaacaccagacggcctttctcaattggactttctcatctgagccacagactacagaagatgatttgagtggtaagtttctccattatcccagaaatgatacatcataagaaccattctagatgcacagaagagaaatgaatccatgacgaaccatggatgattgttcataaggcattagaggttaagtctctctaggaaccccagttgagagaggctctaggccccatccacagctctcgtttaacagaaagcatcatcaggatagcatgccatctatttcttcccacctccaccacccttagagtctgctctgctcctggcatcagagagaaccctgcaaagatcaggcaaaggaagaggccatcttcataagattcaggggcctgatcgattccccaactttttttcactgaaacttaatctcacccaccttaattcaaaagcctcagggccccaaacaaataatgaacagggactgaggaaacagtgatttggaaataaaacaaacaagtatcctcaatgtgtggcctttattttttgagacagtcttgttctgtcacctagagtggagtgcagtggtgtgatctcrgctcactgccacctctgcctccagagttcaagcgattctcctgccttagcctcccaagtagctggaattacagacatgcaccactatgccttgctaatttttgtatttttagtagagacagggtttcactaygttggctaggctggtcttgaactcctgacctcaagtgatccacttggcttcccacagtgctgggattacaggcgtgagccaccgtgcccggcctaatgtgttgcttttaaatagaagtcatttaatgaacatagctcrtatttgcttagcttactattttaaacaaakaaatatcattaagtgcaatgaattgagtggggtgggggcgggaaggcaggagttccagggagggaagagcccggagaaggaagggtgcagggcaatcagcagaggtcagtgcaggtgcattctccaattacatccaggctctggcttcagctttaactcaaccacatccatgcccctagaaacagctaaaaataaaggcctaacacagctgacctccacaaggggaagtctagggtctcaaaggccaggggatggggtggttgctgggaactgtattggcggtgtgtggcccgggcagtgggactgactgcagaaggaggaagccaaaggaaagcggggatgcaaggggcagggggcacagggtatggggcttctgggtgctggcaatgagctgcttcttgagctgggtgctcacacaggtgtgttctgctagtgaaattcaacaagctgcacacttatttgtccacttttctgtatgtatattatactttaatgaaaagttatttttaaaaagtaaagcagagttcttcccagcatagcctctttaaagaaaaaaaaaaaagtaagcagaggctgaattgcacttaattgtgaagttttgtgttttaagattgtttgaaaatttaaaaacattaggttaatatgtaagaagtcattaggattccttaaataatcwatttttctttttcttttttttttgagacaagagtttcgctcttgttgcccaagctggaatgcaatggcacgatctcagctcactgcaacctccacctcccgggttcaagcgattctcctgcctcagcctcccaaktagctgagtttacaggcatgcgccaccatgccctgctaattttttgtatttttagtagaaacrgggtttcaccatgttagccaggctggtctcgaactcctgacctcaggtgatctgcccgccttggcctcccaaagtgttgggattataggcatgaaccactgcgcctggccaattttgctatctatctatcaatcttatttatttatttgttaagagacaaggtctcactctgtcgtccaggctggaatgcagtgatgcagtcatggctcactgcagcttcaacctcctgggcttagcaatcctcccatctcagcttcctgagtagctgggactacaggtgtgtacactaccacgccttgctaatatatattttcttaattttcaaattttttgtggagacagtggtttgttatgttgactaggctggtcttgaagtcctggcctcgagcaatcctcccaccttagcctcccaaagtgctaggattacaggcgtgagccactgtgtttggcccagttgagcttacttttttttccctgcaatatagtttaaagaaattaacttgctcacttatctaagaaagtaaagagaaagtctggggcacatcccttacccccccgacccaggcctacataggtccttatttctagatttttttctttaccatttaagatttatgtggttgtcmctggtgccatagaacaaggaaaaagatttttaaaaaatacaattggcagctgggcacaatggctcatgccagcattttgggaggatgaggtgggaggagcacttgagcccaggagttccaggtgcagtgagctatgatcatgccattgcactccagcctgggcaacagagtgagaccctctctccaaaaaaaaaaaaaaaaaaaaaaattacaattggctgggataccagatagtgtttcaaaggaattttaggctgatttaatcatgttaaatcataagtggtaagacaggaattataatacctcgaggactcaaaagtttccagagcgggctcctccagctcccctgagccactggcttcccttgccttggggagtaaggaarctcagtgtccactcaccttgtcttgtctgtccagggcacacccttcgtggatgagcgccgcgatgatctccgtgttccccaccactgtggcccggtgcaaggcggtctggtccccctgcaaagtgacacaaaggcaggaacagcagtcagctcccctgcaccccctgcttgcactactcacttgacacttggacacaaggacccctcccgtccccacacagagcagagcggttattcgcagaagggcttggttaccacaggcaaggcgggctttgtggtcttgttagtagacaacgcacgctggcagagaaattttgttcataaactaagagggggaccttaagccgacagcaagaatagccctcggccacagagccaacctcaaaatgagggtcaggctctctcctgccatccaggggctatgactatcacaggtgtgaagagtgggtgtgagggcaggtgtgtgctatgcaattaaagcagcaatgcctggaatctctactgcctgccgagtttccagcttgcagggggaccactgtccagctctgccagttagcagcactcatgatttgatgacaggcgggtcatttgttcattgacctgtactagtcaacggcaatgcaggggtttgccctatttcatctgaggactccagggactgcagctatcactgcatatttctaagaagcctcttcagagagttcatgacaacatcctcactgatttatgctgcactctgagccctcttctctatgatcggattcctgggattgccggccgttgttctcctttaggcgccaaagggaacttgactcttcctaattgcagttgagtgaaggatgaaacactcccagaggtaagcaggtcaagactgtaacaggagagttctgaagtctctaagagcaccctttatctctgacaggtcctcaggaagctaagttgaggtaaatcaagctgagcctgtggtccagccttgaaagggaggatgggtgggcagtgtggaaatgttctkgtggaaagcaatgagcacgagacaaggggtcaggaggcctgggctgtgcatggcttgctagaagcctgtcaccctgctggacctcaggtgtgtcaccctggatgatcccagggtccctccattgccttcttggattctatgatgtggctggtcagagttttgtgaagtttcctggcagagcaccagaggggcaaagaaaacattctggggcgtccctsgtgcttggcccaaaagaggacagaggccatcataagataaaacagattttttaaaagaaggatgcactgctacctataaacaaccttaacgaaatactgattctacttactaaactccccagatctgtaacaaacaatgcacattaaaaacatgtaatctgaaacaaagttctaaagatagatggtggtgatggttgcacaacaatgtgagtgtacttaatgccactgaaccgtatacgtaaatatgttcagacagtaaatttaatgctatgtatattttattacaataaaaaatcctagttaaaactcaaaattgctttcttwaaattaaaaagtctccctttaaaaatccatgaaaggatttttctcttttaactttttatactttttaatattttccagctttttatatttaacacggrtaacttttagcatcaggaaaaaccgctacttattagaagtctgagcagaaacaataccccagtaacaggactgtccctgtcacagactctcttcccactgttcatttgtggaaggtaaggaatttctgcagtgagggggggtcaggacactgaggacagatcactgtcctcagcactgccaccaccgacctccccccttcagcatcctaaactattattcctgttatcagttaggttcaggctgrttttcttctcatccaccttcccagaccccttattcaaagagaacccttgcagtggttaaaaaaagaatgtggccgctgggtcagtggctgcaggaggtaggctgtgccatttgcgctgtctacctcagacctcttagaaagcagttctagacaaggaaactagtaatcatatgagatactgcccaagtctcaactttttgtttttgtttagagacagagtctcgccctgtcgcccaggctggagtgcagtggtgccatcttggttcactgcaacctctgcctcccaggttcaagcgattcttctgcctcagcctccagagtagctgggattacagacacttgccaccatgcctaattttttttttatatttttagtaaggtgtcaccatgttggccaggctggacttgaactcctggcctcaagtgatctgcccacctccacctcccaaagtgttgggattacaggcgcgagccaccgtgcctggccccacgtctcaactttttaaaatttccgtaagatttccaagacttcccatttctctatcagaatggtgacggaatttcccaaaataggcctccagtgcaatgatgattactgacctgmtaagaaagacrgtgcccttcttagcaagaaccacgcgactgcagctcacgctttcagggtagtgctgacttggttagatttccacttcttacaggctttttaatataaccacaaactacttacactctagtgctctttggaccaataaaaacaactttttccaggacaaagcttatcactctgtattgttcatgaagtatgagcaacaagccctgagcatatgggtcgtgttagccactcttgctgtacaaattatttcacgaagggccttcactggatggtacggcacagactaacctaagccttggtttaggtcaaatattttttgtcatgtttcacaagctgccctctaaattatgagttgaggtatctttggagccggaatggcaccaagttatttattacttgctttcatcatcaatctactgtatttgcttcctttgagaaaattttcctttgtgaaactctagctcaatgcaagcagctcaatctaactttcagttcagaccttrggaggacatttccagactagcaagactcaaggaaatctaatgacttgtgtgaggttgcggcgagaacacatagtgtcctaagctgctggcaaaggtcctgcacaccccttcctctgggggaccttttggctgtcctgcctgtttccaggccacagctccccctccagccgtcctctcagacagagacctcaccgagagcccgggtcagataaacactgctgtcaggccaggctcggactctccctaccaaaagtggctgtccttggctgtactgctagctgtgctgacactagctggaatggttctggaggactgggcaatacgctttctcaggctttgaaaaacccacccttctcaagtaaccaagatgagaattaaaggctctgaggtgagagacatgaaacatgtaaacaatagctgcctcaggttatcatcttggatctattcttccctagaatacaacacaatttagtaccttgaggccctcagttgaaacagggtcagttatctacaaatggactctttcctcctataagattaaaatttaccattgaaacatttcctccttgaaatgacacgaagaaacaagatgtggcctcaatacatacaagtggctactttgacataattcttacttgcatatgatacctacctaagtcaatcatgaaattcttaaatgctgggaaaaggtagagcactctcaacagtgtttactgaattatctatttggtgaacatccactcattttgagacagggtctcactctgtcacctatgctagagtgcagtggcatgatctcagctcactgcaacctccacctcccaggctcaatcaatcttcccacttcagcctcctgagtagctgggaccacaggcatttgccaccatgtccagctaatttttttattttttgtagagatggagttttgccatgttgcccaggctggtctccaactcctgggttcaagcaatccttcctccatagccacgcaaagcactgggattacaggtgtgagccaccaggcccggactgaatatttattgactccctactgtgtgccaagtctaattctctcattttattgatgtctaattctctcattttattgataagcctaggacagcatgcttggaccagaaatcaaattgtcaaggctctttgcactcaccccaasctgcttccaacctgtgaagtcattaaccttaggacgagcctcagaaaaggtcagatgcatctgtggggttgggactgcctctttcataaagtaaagcatagccactagagctgccccaaaagcatttgttgaatgattaactacaagaagcagaaggaaagatgctgtagctggaaacctgaagggcctgcaaccttgcagtttggcactttgatttggaacatgttgacccatttgcgaagtacgtgaactgccagctctcagtttttctgagacagtgtttctcactttgggattttaagagytttggtgcctataaggtctaaatctttgttttgaaatactgttatttttctttcctacatggtgaaaaagagtgagtgtagtgttggcagatttcagtcatgcaagggtgcagtgtgcgcctcttcaagaggaamcacccccatgtggcacaggcagacatactgcaaggaagctcaagacaggttaggtgtgtaaagcaagttgctgacctctttttctctctctgatcttctagggtccttcctaaccttccctctgtggtttttcttatttttgtcttctttcatggctttcactgtggccacagcatcctggactatttctgaggcgggagctatgtgattgctcattgaccaatcagagatggcattagcrctccaatgagagttgacacgattggcaggaagcaagaaagaatttgctcctggagttgcataatctaaagaactggtttccacaggttgaaattcataataatcccactccaggccactggaggtcattcttcaactaattctcagttcttaccatgccataaagatcagtatctgtagaatatgaagttaggagtaaattcttcatatcattaacattctctgtttctacccaccatccaagacaggtaacttctgagattttttcaaataactgatctcytagattctttaaaggacacacatcaagagttttcttccttgatttcttgcatgtatttcaaggctggtcatcaacagcatggtaaatacacagagaacaggcatggatcatattgctggcaaatgcatttcttcagaactagtgaaggtcaaktctaccttctccactcccaattatttcttgttgttgtatttttattttaatttatctgggagaagcaatatatgcattgtctctctaggacaaggaaaagatgcaagaaaataccttcaataaataaaagggactctctctgtctaaaagtagagctggcttttcttctgctgacaygtctcactttggctacctaagaaaattcttgcctgtttcacttcctaccttgcctggtataaacagcagcagttctaggaaattagcaaggcttttgctgcatgagaacacagtgatacttagagcccaggatgtgaggcaggggtgtcaagttggaatgggttagcatgcctggcattttggccttgccactgtggcaagcaaagcctttaattatgcgaagagaagaccaaatgcatcccaacatgtttgcaccagtaataactcaattccccaccttttctgtggccaaaatcttttctctctccttgtatttttgttcctgtcatctaaggatatgatatagttgagaatgttatgatgaccatagtgcaggaaaataaaaaagtattatgacctaaggtagaaatcaatggcttaaagctaaatcaacattttttgaaaataacatctttgatgacccagcaagttccagatataaccagagatttatgaaagacactggatggccttctgcccatgcataaaacagtcatagttatttctttgcaagtactgtccttcttactgtgtgtttgccaagttttatgacattatacacagacccaaagaaaactagaagcactttagtaaaccacactgtagcatatctgaagatgtgaaatttgaatcacactctataactacagttattaaaggtgaatttggaagaggttataagtgcaaacactccaacattct

SEQ ID NO: 9942 - DNA, 189199 bp, Homo sapiens
taatcaacaagcaaaaatttcttacagttctagaggctgggagatccaagatcaaggagccagcagatttattgtctggtgagggctcccttcctggcttgtagatggccaccttcttagtgtatcctcccttggcagagagagaagggactctagtctttccctcccattataagggcaataatcctattatgaggactctatcctcaaaacctcatctaaatctaattacctccaaaaggtctcacttccaaataccatcacactggggtattaagacttcaacatacgaattttggaggttcacaaacatttaaatcattttgccatttcttataattcacagtttcccctcccatacttttttcttaaatttatgtcttgaaaaacctgagtttttgatctgtagaatctttcacagtctgagtttttctgattataaattcatggtgcagcttaacatattctatcatcttcattttaaaaartcgacagctggggccaggcacagtggctyacacctgtaatcccagcactttgggaggctgaggctggcggatcacttgaggcaaggagtttgagaccagcctggtccaacatggtggaaccctgtctctactaaaaatacaaaaattagccaggtgtggkggtagaagcctgtaakcccagctacttgggaggccgaagcaggagaatcgcttgaacccaggagttggaggtcacagtgagctgagattgcgccactgtacttccaggctaggtgacagagcaaggctccatcaccccccccaaaaaaaaaaattgacagctggatcagaggtttgatccttttggtaagactataggtagcattatgttctttcagcaagagctatctaaagtctggttttttttgccccttttgctatgttagcagccattgatacttaatgccaagattaatggattaactgggagttgcaaaatagtggtattctaattttgtcaattcttttttttttttttttttttttgagacagtctcgctttgttccccaggctggagtgcagtggcacgatctctgctcagtgcaagctccgcctcccagattcatgctattctcctgcctcagcctcccaagtagcagggactacaggcgcccaccaccacgcccggctaattttttgtatttttagtagagacggggtttcactgtgttagccaggatggtctagatctcctgacctcgtgatctgccctcctcggcctcccaaagtgctgggattacaggcgtgagccaccacactggcaattctttttcaaattaggtggactattctcaggaagagacacttgtcatcatcttcwatttagttacccagtggtacaattcacatatgagaggcaggatacatttttatatttctccctttatcagctttcaagattgacttcttactctccaaaggcaacaaatttttaaaattattagtattatattaatgggttaaactaataggttttgattcattataactgctatctttattaaagctcagattgtatcatctttggtcaatggtagcatctacaagttgatacccaagttctctttacatgacactcataatttttttcaaaaatattaattttcagaggtcaccaatggccgttgggtgggcaccaccagcagagaaagtagcgtaagacttaagacaacttaacacatttaagaccaggcatagtggctcatgcctataatcccagcactttgggaggccaaggctggaggattgtttgagcccaggagcgggagaccagcctgggcaacatactgagaccttgtctactaaaaaaaaaaaaaaagaagaagagctgggtgtggtggtgcatgcctgtaatccgtgcactttgggagtccgaggtgggaggattacttgaagtcaggagtttgagaccagcctggccaacatggtgaaaccctgtctctactaaaaaatacaaaaaattagccaggtgtggtggtgcacgcctgtaatcccagctactccagagactacagaggatgaggcaggagaattgcttgaatccaggagggagaggttgcagtaagccaagatcataccacttcactccagcctgggtgacagagtgagactctaactcaaaaaaaaaaaaaaaaaaaaaaaaaaatttgggtgtggtagcaggttcctgtagtcctagctgctcaggaagattgcttgggcccaggggttcaaggttacattgagctatgattgcaccagtgcactctagcctgggtgagagaataagaccctgtttctaaaatatatacatatttttatatcagacaggtaatatgctgaggtcataacatggtttgagggaggcacatattacacgtgtgcaaaaacccaatcatcatgcttatgaactataaaaggatcaaagatactatttttttagtgcaaaatttcaaacatacacaaaagtaaaagaagagtacaataggctaggcgcggtggcttacctctgtaatcccagcactttgggaggtcgaggckggtggattacctgaggtcargagttcgagacaagcctggccaacgtggtgaaaccctgtctctacttaaaatacaaaagaaaaaattagccgggtgtgtggtggagcrtgcctgtactcccagctactcgggaggttgaggcaggagaatcgcttgaacccaggaggtggaggttgcagtgagctgagattgtgtcactgcactctagtctgggtgacaaagcgagactccgtcccaaaaaaaaaagaaagaagagaaaagaagaatacaataaactcctattacccaatatctggtttcaataattactaatacactgtcaaccttatttcatctatactatatatgctctattccttccttatcatcattttttttaattattattttgagacagaatctcgttctgtcacccargctggagtgcgatggtgggatctcgactcactgcaacctycacctcccmggttcaggcgattcttctgcctcagcctcccgagtagctaggattacaggcgcttgccactgcacctggctaatttatatatatatatatatttttgttgttgttgttgtttttgagacggagtctcactctgttgcccaggtgggagtgcagtggcacgatcttggctcaccgcaacctctgcctcctgggttcaagtgattctcctgcctcagcctcccaaatagctgggactacaggcacgtgccaccacgcccggctaatttttgtatttttagtagagatggggtttcaccatgttggccaggctggtctcgaactcctgacctcaggtgatctgcccgccttggcctgccaaagtgctgggattacaggtgtgagccaccgtgcccggccaatttttgtatttttagtagagatggggtttcaccatcttggccaggctggtcttgaactcctgaccttgtgatccacccgactcagcctcccaaagtgctgagattacaggcttgagccactgtgccctgcccagtcttagatttttattacccccaaattttgcctcctggctgtttacattgtcttctcttctaatcccaaactcaggcaaccactaacctgttctattaatttaatcaccctagagctgttcatcttcctgctgctgcccagatgaaagttccgggatttcccttaactttaaacacttaaaagtaaaataatcccgtggattaggattacgatcgacagggttattttactttttctttctgtgctaaatctcttatttcctggatcccgtgtcgtcttctttcttggttttatcctcctttttcagggsgcatctctttcaacagattcctgagaatagttgccagggtgcattatcactacataactacatttttttttttgtctttttcttttttttgagacagagtttcgctcttgtcgcccaggctggagtgcactggcacgatgtccgctcactgcaacctccgcctcccgggctcgagctattctcctgcctcagcctcctgagtaggtggrattacaggcgcccaccactatgcccagctttttgtatttttagtagagacaaggtttcaccatgttggccagactggtctcaaactcccgacctcgggtgatctgcccgccttggcctcccaaagtgctgggattacaggcgtgagccaccacgcctggccccacttaaaaaaaaaaaaaaaagacggagtttcgctcttgttgcctaggctggagtgcaatcccacgatctcggctcaccacaacctccgtctcctgagttcaagcgattctcctgcttcagcctcctgagtagctgggattacaggcatgcaccaccacacctggctaatttttgtatttttagtagagacagggttttaccatgttggtcaggctggtctcaaactgctgacctcaggtgatctgcccgcctcggcctcccaaagtgctgggattacaggcgtgagccaaggcacccagccctaatttttgtatttttagtagagacagggtttcaccatgttggccagactggtctccaactccttatctcgtgatctgcctgccttgccttgagccactgcgcccagcccacaagtgcacttttaatgttatggactctactattttttatgacttccagaatatgctataacttacaccccatagtttaatattcccaattgaacattttcttccaatatctgtattaagaaaactgcaaggggtgtctttgtcacacttagtgaggatttccgcaggctagagtcctacaaggggaattgctggggcagaatgttaactagttaggtatgagcagaacaggagagcgctccccaccccacacataccaggactattgggtgacaatcaaacgatggtcaggcggttcttaactgtttctctaacgttcaccggggccagcgaaaggcagtctcctaatagaaaacacctgaaactgatcagtagcttcccagtaagatctcaggagtggggagaagcaatgcaagttccccaaagtatgccaacatataaaacttcaagtcaacaggtcaagctgcgcacttggtttctcaagtcgcctgcttggcagtcttccaagttgtactttcctccttttctttccgtcccgttctaaagctttttgataaacttttacttctattctgaaacttgtctaggtctatcctgccttatgcccttcgtggaattatttcttctgaggaggcaagaactaaggttactgctgacccctacctatacagggggtaactgccaccgctaacaagaaggggagaatcagcttttctttctttttttgagacagtaaaagtctgctgtgtcgcgcggctggagtgcagctgcacgatctcrgcttactgtaacctccgtctcccgggttcaagcgattctcctgcctcagcctcccgagtagctgggactacaggcgcgcgccaccacgcccggctaatttttgtatttttagtagagaagggggtttcaccatgttgcccaggctggtmtcgaactgctaacctcaagtgatctgccctcctcggcctcccaaaatgctgggataaagacatgcgccaccgcgcccggccgagaatcagcttttctctcacatctgatctttccgtgtgttaaggcaraagcaaggcacggtgggctgagactcacacgccccctctttcctccccggcctaacgcactcttctttctgtcccaccacgtgctgtgttcgcgagtccccatcactcctgcatccaaaccgactagatttttgtttccatttccctcccggaaaaggcgggacagcgaagactggcgtttccgccgctgaggggctgaggccgggagggcgcagcgtagccgtcccgagctgatgacgtcaaacgccgtgtgctcacccacgtgtggtgcccctctcccggtgtaggcgctggagctgaggacgcctttcctgcgggcgtagttgctggctgctcgggcactgggacctcggcggcttggggacgctggccgcgaagtagggagcgcaggtggccgctcggggtgagggccctgggtcatggagcacttcttgctggaggtggcagccgcgccgctgcggttaatcgcagccaagaacgagaagagccgcagtgagttgggcaggttcttggccaagcaggtaagacgtgaagggagagggaaagcgccggaacgactgggtcgccccactagtaagcttcctgcgctcccccgccgatactcgccgctttaagtggggagtggtgcagcctcaggtcaagctggccccctcctgtgggctggcgcaggtcgtggaggtttccgagcgtgtytgaggcgattggaaggagtcttttgtttttatctgggggagccttccagtacccttcccatcrcctctcacccctatgcaagcgctttggctgcttgtggcagaggtggccttcccaaaggaatgtggtttgtttttctgaaattgaggttgcgtttctgccgttttgacaagtgtacgtatcacctaagtgtgcgtagtgcagccactcctgttagtttggggaaccatcgacaaatactgattgcattcctgctgtgcgtaaggaacggtgtggcgctgtgagaaagtggatagataaattcgttacgatctctgccatgagggaaatttgcatctgtttttggagacagttcgtaaacacttayaacagctgaagtacagagcaagacagctcatactcactgtaactaactatacaaattataaggttaattagagttttctgggaaataggtcttcgggcttttaagaaccttctcattgactccttctatctgagttgaagacactttttttttttttttgagacggagtctcgctgtgtcgccaggctggagtgcagtggcgcgatctcggcttactgcaccctccgcctcccgggttcaggcgattctcctgcctcaccctcycagtagctgggattacaggcgagcgccaccatgcctagctactttttgtatttttagtagagacggggtttcaccatgttggccaggatggtctcgatctcttgacctcgtgatccacccgcctcagcctcccaaagtgctgggattacaggcgtgagccacgggacaggtgagtgtggtcccaggtacttgggtcccaggtgtggctaattaaaaaaaaaattttttttttgtagttgtaaggtccccctttgttgccccgactggtctggaacccctgggctcaagtgatcatcccgccttggcctcccaaagtgcagggattgtaggagtgagccaccgtgtccggcctaaawttttttttttttttttttttttttttgagwcggaggcacgctctgtcgtccagactggagtgcaatggcccaccctctcagctcactgcaacctccgcctctcgagttcaagcgattcttctgtctcaacctcccgagtaactgggattacaggcgtgcgccaccatgcctggctaatattttgtatttttagtaragacagggtttcactgtgtgggtcaggctggtctcaaacccctgatctcaggtgatccacccgccttggcctcctaaagtgctgggattacaggcatgagccacagcgccctgccctgaagtattttttttgatgtatctcaagcccaattgttctggggagtggggccaattttgctcccagggacaaatctggagacctttatggttatcacaactattcattatgggggtgctactagcatctagtgcatcaaggccagggacgctgctaagcattctgttatgtatgggacaaccccttacaacagagttatccgtcgtaaatggcagtggtgcaaaattaagaaagaaaccctgccccagactggttgtttactttctgctcagggcttgctatttcagcaacactaaactgcctgcaatgaccacaggttgttaccctctactattgttgactggagtcacctcccgttgttaatgtctgttgttattgtctgggccattccttgctgttacttgcctcattgactttgcatttcctttccttagaaggctacatctctcttctatgccctgctcagttaacttgtttgttctggaagactgcttttgaaatggtcttccccaggaagacttttctgactttaccctttcctcttcctcttaatctttgtttcaactaactgattctcagtagttgattgagagtatgtccagagaaggggattgtgtagctgtagtgtccaatacagtgtctgatatgyagtaggcagtaaatgtttattgactgtattaacagattaaggtactcccaaattgtgatacttttgtcaatgaaaagtgtcaaactctaaaatattctaagagatttattctgagctaaatgtgagtgaccatggctcatgacacagccccaggagatcctgagaaaatgtgcccaaggtggtcgggctacagcttggttttatacattttagggagacctaagccatcwctcagtacatgtaagatgtacattgatttggtctggaaagctgggacaactcgaagggtgaggggggcggtcttccaagtcacaggtggattcaaagatttgctgactggcaattgggtgagagttcatttaaatccctggaatcagtagaatggagtgtctaggttaagataggggtgtggaggctgggcacagtggcacgcgcctgtaatcccagcactttgggaggctgaggcgggtggatcacaagctcaggagatcgacatcattctggctaacatggtgaaaccctgtctttactaaaaatatgaaaaattagctgggcatggtggcgggcacctgtagtcccagctactcaggtggctgaggcaggagaatggcgtgaacccgggaggtggaacttgcagtgagctgagatcgcaccactgcactccagcgtgggtgacagagcgagactctgtctcaaaaaaaaaaaaaaaaaaagataggggtgtggagaccaaggttcatattatgcaaatgaagcctccaggtaacaggtttcagagagaacagattgcaaatgtttctttttttaaaatttttattattttttaaagagataggatcttgctttgttgtccaggctggtctagaactcctaggctcaagtgatccacctacctcagcctcccaaagtgctgggattataagcctagcctgtaaatgatttttttttcccccaaatgcagtctcctcacccccgcccctagacggagatggagtcttgctctgtcacccaggctggactgcagcggcgcgatctcaactcactgcaacctctgccccctgggttcaagcagttctcctgcctcagcctctcragtagccgggattacaggcacctgccactgcgcctggctaatttttgtatttttagtagagacggggtttcaccatgttagccaggctggtctcgaactcctgacctcaggtgatccacccgcgtcggcctcccaaagtcctgggattacaggtgtgagccgctgcgcccagccacaaaacagtctttattatgagaaagcagtgttatctagtctttattataagaaagcaatgctatctggtttctttctaataaaataaaagcagttttcttaaataatttacaaagggcagaaattgctcttgaacagggctacccctcctggcacacccacagtgctctgccttgaacatataaataggtacctgtgagcccagggtttaagcctggaactatctcctrtgccttcctccaggtccctggtagggaaagcagggatgagagtggtgcccccaagggccttggcactggaaacacagtgggcgagtgactctgtggatgactccccaaaaaccaagcacctggtttgagttcagagctctcaaacatctgatgccagctcttcacattgtagatgaagcaaataccaggctcaaggtcaagtatacgatgcattactaaacccaagagtccccttggggagtagaaggaacaattctccccacctctgcaagatctccccaagacactctcaggctgtggcaggcagtcactgatgggtccagatgtggctggagcaggggggctctgggctccttgctagtcaggtctttgttagcagtggcccaggggtactgatgactcctgggagcttccgccaggaagctcatggggaagcacagacattctggggtacgaagccttggtggtcagacagggcttgtttcctgcagggcacttcctcagtcatgaatgagagtgtcatttcaccactctcttccgccataatggcttcatccagctcttgggacagcttctggagatgccgaattcctgctccccataggtgctaggtcactatcagatgcgctgggagagcagaggagctctgtcaaggagtaggggctctggaaggcagtctcccgcctccactgccgtagagggtaggcacstgagcctgtccaggtagagaggtggtgatgcacaggggtctgtagctgagtggtcaggggcagctccatacagctgaatcctcttctggctcaggctgtgagttggggagacactgctctcccttttgtacccctttcttcctcctcctggccttcacctgggtctccaccagacacttggtgctactttggcaggactcctggattctctgtgacatggcacccagggtgctcttagctgagcgagctgcagcctggagtctcttactgccctgaccctggtttctaggggtttctaggaggtacctgtccggaggttgaggttgacggctcttaggggcagccttctttggaactgtctgcacagagaacccagggccctggcggagatctcccaatggctaaccataggctgccgctccttgctgtccagcggctgctcctggtgctggagagatctccggtgcatggaggccctcgcatcctgccactgagaaaccatctgtctggccaagagtctactctgcccactagacctcaacacccccaacatgtgcctgaagccgagcactgtaaatgttaaatgtttcttataagacttaaagagacaactttgcagggccatttcaaaatttgtcaaagctatatattttgggccagatgtggtggttcatgcctgtcatcacagcactgttggaggctgagggaggaggattgtttggacccaggagtttgagaccagcttgggcaacatagcagagagactctgtctctaccaaaaaaaaaaaaaaaaggagggggattaaagaacacctgaaatacttctttcagggtttgctgtctgtcatatttgtatcttattgctactagtaatctgttttgtcagtcctaaggtctctgttttaatgttaatgctggttagctgtgccagaattctgaagggaagagagtataatgaggcgtgtctgaccacccattcccagcatggcctgaactagtgtttcaggtttactttagaatgcacttgactgaatggagaaggattcaccttcattcagttggttgggggggcttagaattttatttttggtttatgctttcttttttattttttaagacaggatctggagagcagtagccttgacatcctaggttcaactgatcatcttactttaggaccctccccatcccctccagtagctggaactataggcatgccaccgcgtctggctaatttttttttttttttttttaaatcttaggtagaaacaaggtcttgctgtgttgcctaggctggtctcaaactcctgggctcaagcagtcctcccaccttggccacccaaaatgctggaattacaggcatacttacttagttttggcagaacatagctttaactttcagtgttttaagcaaatgatgagagtgatgatgctttaatgcttcccctgcccgaaacagtgtctccttttattgcctgggctagcgtacagtgatcatagctcacttcagccttgacctcctgggctcaaatggtcctcccacctcatccttctgagtagctgggacaacaggtgcacaataccatgcctggctaatttctttcttttttgtttttttttttttttttgagacagagtctgctctgtcacccaggctggagtgcaatggcatgatcttggctcacttcaacctccgcctcctgggttcaagcaattctcctgtttcagcctcccaagtagctgggattacaggcacctggcaccatgcccagctaattttttgtatttttagtagagatggggttttgccatgttggccaggctgcttttgaactcctgaactcaggtgatcctcctgcctcggtctcccgaagtgctgggattacaggcatgagccacggcgcccagccttgcctggctaatttctaaaaaaaattttgtggccgggcacgatggctcaggcctgtaccagcactttgggaggccgaggtgggcagatcacctgtggttgggagttcgagaccagcctgaccaacatggagaaaccccttctctactaaagatacgaaattagccgggcgtggtggcgcatgcctataatcccagctactggggaggctgaggcaggagaatytcttgaacctgggaggcagaggttgtggtgagccgagatcgcgccattgcactccagcctkggcaacaacaatgaaactccgtctcaaaaaaaaaaaaaaatttttgtagagatggggagtctcactttgttgcccaggctggtcttgaactcttgggctcaagctatcctcccaccttggcctaccaaagtgttgggattgcaggtaggagccaccgcacccagcctaattgcttaggttttatagagtagtttaggaattgtttctctttagctgaaaatacacatttcagccgatacatgtaattataaataataacactgaggttatccttttaattaactctgctttgagaagggctaactgatcagttagcagttgccttatccttttaattaactctgctttgagaagggctaactgatcagttagcagttgaatatgacagtgtagtaatttcattactcaaaacagtaaaaactcaatatgttaagcatacagacatacaaatatgaagactttttttccttttctatttttgttggctaattattgggaaattgatgaattttgttatagcaaaggaacggaattggttagtatttttggtgggaagagaagagctgagccaccttaaaaatattttttcctggccgggtgcagtggctgagctcagacaatctacctgcctcggcctcccaaagtgctgggattataggtgtgagtaaccacacccggccaataaaaatgttttttcttggctgggcgcggtggctcacgcctgtaatcccagcactttagggggccaaggtgggcgaatcacgaggtcaggagtttgagaccagcctggccaacatagtgaaaccccgtctctactraaaatacaaaaattagccgggtgtggtggcgcatgcctgtaatcccagctactcgggaggctgaggcaggagaattgcttgaacccggaaggcggaggttgcatgaaccgagatcagggcactgcactccagccagggcaatagagcgagactccatctcagaaaaaaaaaaaaagttttttcttgtatttgttaagtaatcagtattcttcagctttcctcatacttgcttgtatcccagctacctaaataaaacccatttaagcttcacagaatgttaagagaagtgagaaaatacaaaggtgtagccaggaggaatgcagtcctttcccttttccagtgggtcccagtctcccaagaagaaaggcaggatttcctaagaatgttatgggagtaatcacaggtttaagaagtaaatcctggctggttgcggtggctcacacctataatcccagcactttgggaggctgaggtgggcagatcacgaggtcaagatattgagaccatcctggccaatatggtgaaaccccatctctactaaaaatacaaaaattagctgggcgtggtggcacactcctgtagtcccagctacttgggaggctgtggcaggagaattggttgaactgaacccgagagggacgcggaggtcacagtgagccgacatcgtaccactgcactccagcctggcgacagagtgagaccctatcttaaaaaaaaaaaataaaaagaagtaaatcctttaacattcattgtcctgtttttatttcctacaatagcaagccagctgacatggtcaaagatgctttgattagcaagacccctgggcttacagaaggagaaaactgattatgtagttttcctataacccccacccacccgctagatacttacaggtatcctagcctagctgatcccttttcttgcaggcctggcatttaccctttcatgggttttagtaaaacatttataattttttaaaacttcattaactagtagtattcatgcagaatactaggagaattcaggaaagcaccacccatattgtgggttaaattgtgtctgtcaaaaatatacttagaagtcctagtctataatacctgaatgtgaccctatttggaaatgaggtctttgcagatgtaataaagtcaggatgagataattagatagggccttaatcaatatgactgtttctctttcgcccaggcttgagtgcagtggtgcaatctcagctcattgcaacctccgcctctttggttcaagcaattctcctgcctcagcagctgggattacaggtgtgtgccaccatgcccagctaatttttgtatttttagtagagatgtggtttcactatattggccaggctggtctctaactcccgacctcaagtgatctgtccacctcagcctccgagagtgctggaattacagccgtgagccaccacacccagcacaatatgactgttcttatgaggagagaaagacataaagggaagatggccatgtggcgatgacagaaatacatattggagtgataaatctgtgagacaaggaacagcagggattgatgatgacaaccagaagctaggaagaggcaaggaaggattctcccctataggtttcaaaggaatatggccttgctgacaccctgatcttggacttccaractttagaattgtgagacaacacatttctgtttttttaatttgttttttgttttgttttgtgtttttgagacagagtctcactctgttgcccaggctagagtacagtggcacgatctcggttcactgcaccctctgcttcccgggttcaagcgattctcctgcctcagccttcctggtagctgggactacaggcacccgccaccatacccggctaatttttgtatttttagtagagacggggtttcaccrtattgctcaggctggtctcgaactcctgacctcaggtgatccacccacctcagcctcccaaaatgctgggattacaggcgtgagccactatacccggccttgtttttttttaagtcagtttgtggtattttgttatgacagctccaggaaattaatacatgtaagaaaaacattcagtcagggactgcccatattaatattttgatatataatcttccaaacttaatttttttttttttttttttttttttttttttttagtgaaacggagtctcactctgttgcctaggctggggtatagtggtacaatcatggctcactgcagcctctaccttccaggctcaggtgatttcccccaactctagcctcatgagtagtagggactacaggcatacaccaccaagcctggctaattttttattttattttattttattttattttattttattttattttattttatttatttattttgagagggagtcttgctctggcacccaggcttgagtgcagtggcagaatcgtggcttactgcaacctctgcttcctgggttcaagcgattctcctgcctcagcctcccgagtagctgggactacaggtatatgccataatgccyggctaatttttgtgcctttagtagagatggggtttcgctatgttggtcaggctgatcttgaattcctgacctcaagtaatccacccgccttggcctcccaaagttctgggattacaagagtgagccactgcacccagccaagcctggctaacttttgtattatttgtagagatggggttctgccatgttgcccaggctggtctcaaactcctgggctcaagtgatctgcctgccttggcctcccaaagtgctgagattacaggtgtgaaccactatgttcagtcttgtatatatagtcttttctctataaatctgggaagataaaataaaaagttttaaatatatatgaagctatgcaaacagtgctgtaaaagagtcaaatatacatacttcttttttttttttttttttttttttgagacagtgtctcacctgtcacccaggctggagtgcaggggcacgatctcagctcactgcaccctcaaccttccgggctcaagtgcttctgccgcctcagcctccctggtagctgggattacaggctcccaccaccatgtccggctaatttttgtatttttagtagagatggggtttcagcatgtttctcaggctggtctcaaactcctgagcttaggtgatcctcctgcctcggcctcccaaagtgctgggattacaggcatgagccaccrtgcccagccaaatacatatacttttgttcatgatagaataactggtactggattagctctgttgccaaaacaactagaaaaagaggaaaaaatccatatgaaaaacgttcaaacattggatgaaaggtaggtagcataggattggaattcctaaaaatgggaaacaaggtgagccctagaatgattccagctgtctacctggaatcacttataggactgactcagaggaagaacgaagttcagcagtggtggtcctactgagctgagaagacagagctcagagttggggcggtagttggaatatgctgggaagrgtgttggaatggagggaacagctctagggatatggggtctggtgagtactggctgaatgtaaagctgtgtyttcttagggaaatttcgtgagctatgcaaagaataactactggagtttttctgtgtaggagatgttcaactcctactagttggagtggaamgaccaagttgaatactggcataattagtgtggaacccagaagggccacactctagggctaaatcagccctcaaaggcctttctagaccaatactaacaaaacttaaaaacaagtcttgaaaggatcaagctgacctacaagctgattaactgcctgctagaacaaaggaagagagcaaaatctagacacatctacaacgttcagcatccgattaaaaaagtactagatataggaaaaggaaaatggtggctcattgccaggagaaaagtcagtcactgcaacagaccccaaaataataaagatatttaaattaataaacaaggactttaaaaagtgattatataatgatatgaatgttcgggaaaaaaaaaaagaaaaaagtgattataggctgggccaagaggaaccacttgaggccaggagtttgtgatcagtctgagcctgggcaacaaagtgagatcctgtcactctcaaaaacataaaaaaatagtaattatatgtgcagggacttgaagtttcggaaacataaacataatgagagaaatttaagctatgaaaaaaaacaagtgaaaccaaaaaataccatcttagcaatgaatattttactggataggcctcatygaagattagacagttcacaagaaacgaacattgaattacaagatacggcaatagaaattatctaggcttaaacagacagggtgggaaaaagccagaataaaaatgcttcagtgatctgtgaggcattatcaactagtctactgtatgtgtaattggaattacaggaggagggagagaagagaaacagtagaaatataaaaagataatctcaaaatttctaaagttggtgaaaaataattcacagatcccaaaaactcataatcttaaatctgataaacacaaaaccacaccaagccacatcatgatcaagttgctagaaacaagtaataaataacatcttaaaaattgccagaaaaaaagacactttacttgtagaggagcaaagataaaaatgactgctgacttcttaacagaaacaacacaatgaaacatctttcaaaatgctgagaaaaaccataaamccccttgcgtggtggcgcatgcctgtaatcccagcactttgggggcttaggtaggtggatctcttgagcccaggagttcgagaccagcctgggcaatgtgctgaaaccctgactgtagtaaaaatacagaaattagccaggcatggtagtgtgtgcctgtagtcccagctacttggcaggatgaggcaggaggatcccttgagtctgggaagtcgaggctgcagtgagctgatatcaaagaactccagcctgggtgacagagggaaaccctgtctccaaaaaaataaaataaaaaacaaaacaatgtttgcttaagacagrattttgtatgtaaaaagtcttaagaaatcttcaaaataaagaatttcataagatcacaggataccaggtcaatgtataaaaatgagttatatttttatatttaagattattggggaatgaaatttatattttatgtattttatttttaagagagtctcattctgttacccaggctggagtgcagtgggcacgatcatggcttagtgcagcctcgaactcctaggctgtgaggtgatcctctcctcactctccagagtagctgggactgtagatgcacaccgtcaccagctaattaaaaaaaaaaaawttttttaattaagctttttttaaaaatttttttattgaggtggagtctcactctatctgttgcccgggctggagtgcagtggtgcattctcagttcactgcaacctccgcctcctgggttcaagccgttttcctgccccagcctcccaagtagctgggattacagacacacaccagcacaccyggctaattttttgtrtttctagtagagacaaagtttcaccatgttggtcaggctggtctcaaactcctgacctcaagtgatccaccaccctctgcctcccaaagtgctgggtttataggcgtgagccaccactcctggccacaccagytaatttttaatttatttttatttttttgaagagatggcatcttaccacattgcccaggttggtctcgaactcctggcctcaagtgatcatctcaccttggcctcccaaagtaccaccatgtctgaccagttttctttggatatgtttctttcctctgcaatgtaacttactttattatttaaaaaatggggccgggcacagtggctcacacctgtaatcccagcactttgagaggccaaggcaggaggattgcttgagctcaggagtttgagatcagcctgggcaacatagtgagacccccatgtctacaaaaataaaataatcagctgggcrtggtggcacacacctgtaatcctagctacttaggggactcagttgggaggattgcttgagcttgggagggtgcgcctgcagtgagctgtgattttaccactgtacttcagtctgggcracagaccaagaccttgtctcaaaagaaaaaaaaaaggtatctttagagggcttgtttatgcggacatgcagcagttgaaaatgtgagattttgctcctatgtatcatgaccaaatctgttaaatttctttgcctccatttttatggaatccttcagttaacctcctataaaggacagaactaagactgatagaaattgtttcaaggtaacatttttccctaatcagtgctttgatcagaatcaaatkttttcatgagagaatgctctgtaattggaagactttgtaagagctcaggtgtaaggtgactttctgggtgataattttggcaaaactcgttaaattttgcgtatgacatttatgctgtgttcaaggtacacttatataggtgactagggtgagcctcctyctcatcctttttttgttgtggggggagacagggctttaactgtttgtcacycaggctggagtgcagtggcatgatctcagctcactgcaacctcgacctcccaggctgaagctatcctcccacttcagccacctgaggagctgagactacaggcgcatgccaccaagcctggctaatttttctattttttgtagcgatggggtttcaccatgttgtccaggctggtcttgaactcgtcggcttaagggatctgtctgcttcggccttccaamgtggtgggattacaagcatgagccaccacacctggcctggggtgaaacttcttaggataaactgatagcatgggacttgcaaggtcaaagggcatgtccccattttaaacctgatgttacattgctgggcagaaacggttgtgcagacctgtatacacactagcaatataatgccttttatacagttttcagttttcctttgtatgcttacctgcattctgaacccgggcactagaatttttttttttttttttttttttttgagacggagtctcgctgtcgcccaggctagagtgcagtggcacgatctcggctcactacaggctccgcctcccggggttcacaccattctactgcctcagcctcccgagtagctgggactacaggcgcctgccacctcgcccagctaattttttttgtatttttagtagagacagggtttcaccatgttacaagccaggatggtctcgatctcctgacctcgtgatccgcctgcctcggcctcccaaagtgctgggattacaggcgtgagccactgcgcccggmctagaattttgtattttatttcatcttccgtatcaaagtgttgctgkctactttggatctgttttttgkttatttattagaggctgatgccttgatcagcttgatarggatatcctsattcactcccaggaattaattttttacctctgtcctttcctgaagagttggaagttttgtctactaactgcagaattcatttttttcttcaagagttaaaggagctgggggaattttggggttttgaattccctggagattgttgaaaccccagcacatagattatttttcagataagtcgtgtagcttttaaatggaatccaggtattagtccctgtacctcaaactccagtgtactgaaacttatttgtaacagcctttatattaaattaactctgatcctccattgcaaaaaatttccacgatattttataatagaatctcacttatgaagtctggaaattggacattttagttccaacccaggactcgtctctgcttttctacagcagtgcaaatgaatattatttacataaatattttgggccaggcatggtggctcacgcctgtaatcccagcactttgtgaggctgaggctgttggatcacctctggccaggagttcgagaccagcctagccaacatggtgaaaccctgtctctactaaaacaaaacaaatcaaaacaaaaattagcctggtgtggtggtgggtgcctgtaatcccagctactcatgggaggctgaggcatgagaatcgcttgaacctgggatgttgcagtgagccaaaatcgtgccactgcactccagcctgggagatggagcaggactctgtctccaaaaaaaaaaaaaaaaaaaaaaaraaaagaaaagaaaaggccgggcgcggtggctcacgcctgtaatctcagcactttgggaggctgaggcgggcggatcacgaggtcaggagatcgagaccatcctggctaacatggtgaaaccccgtctctactaaaaatataaaaaattagccgggtatggtggcgggcgcctgtagtcccagctamytgggcggctcgggcaggagaatggcatgaacccgggaggtggagcttgcagtgagctgagattgcaccactgcacttgctcctgggcgacagagcgagactgtgtctcaaaaaaaaaaaaaaagtgaaagatgttttgttttgcctttctcaggtgtggacacctcaagatcgccagtgtgtcctgagtaccttagcacagttgcttttggataaggactgtactgtgctggttggtcgccagcttcgccctctccttttggatttgctggaaaggaatgccgaagccattaaagctggaggccaaatcaaccatgatctgcatgaacggctatgtgtgtcgatgagcaaactcattggtaaccatcctgatgtcctcccgtgagtagcaattttattattcgcatttctccttgaggtgatagaacctgctgtctcctgggatgtaagggagtctgagctgagaaggtaaaacggaaatacagaaaggagagagataaatagtattgttttataaaaagagtcacagcagaatccatttatccagctcagttcagtgagcatttactaggtttctcttaaatcttggccatcagaacagacctggaaagatggccaggatatgtccccagtgctctcaaggattgtatcatgtggcaagacatgcatatacagcggagtaaatgaggtttaactgaggctcttacagcatccacctctaatgggaaagattccttgcttgttagagcagctgaaggagtggattagaagagctatagtatcccttccaaattctataaatctatctgaattagtatactaagagctgtgttagagctggattttaatgtgacttttaaagagatagtaaaatatagttttgaggaataatcaaaagagayagcaaaactgagtgtcaggggtttttaaattgaaaagatttttaaaactttcactgtaaaaatgattaatattctgtgtaccaataggacatttctttcttctcttcttttttttttgtgagatggagtcccactctatcaccaggctagagtgcagtggcatgacctctgctcactgcaacctctgcctccctcctgggttcaactgattctcctgcctcagcctcctgagtagctgggactacaggcgcgcacaccaccacgcccagctaatttttgtatttttagtagagacggggtttcaccatgttggccaggatggtctcaatctcttgacctcgtgatctgcccgcctcgacctcccaaagtgttgggattacaggcgtgagccactgtgcccggccaacagaacatttcttatatccagtgttttatttattagtcttcatcaatgcaataaatacactttggctttcttggaagtatgatatctagtctggtcctttaatgaggaaataggaaatgaagacttgggggaaaacactgttggtctgarcttttctaaaaggggttgagaaaaaaatggacctggtttaatggaactagaaaatatacagccaagtaaagatcgggactctgagaacgttcctggctttctctattctgatatgtcagttaggtatcaaagttctgtctcataaaaaattatccagttttttccttgctttctcttcaccttgattaaacttgtgctcccaaatcccctcagctatagctttggagacagtttcagaaagttagaattacacgttatgtgttgattattttcttttttttttttctttttgaagcagtctcactctgttgcccaggctggagtgcagtggcacgatctcaccttactgcaacctctttctcctgggttcaagtgattctcatgccttagcctcctgagtagctgggactacagatgcacatcactacacctggctaattcttttttttttttttctgagacagggtctgactttgtcgcccagtctggagtgcagtggcacaatcttggctcattgcagcctctgcctcccggttcaagtgattctcccgccatcacactccactaatttttgtgttgtgttttgttttgttttttttttgagacggagtctcactctgtcacctaggctggagtgcagtggcatggtcttggctcactgtaacctctgcctcccaggttaagcgattctcccacctcagccccccaagtagctgggactacaggtgcgtgccaccacacctggctaatttttgtatttttagtagagatgggatttcactatgttggccaggctgatcttgaactcctgacctcgtgatctgcctacctcgacctcccarattgctgggattataggtgtaagccactgcgcctggcctaacttttgtattttttggggttttcaccatgytgtccaggccagtcttgaactcctggcctcaagtgatctgcctgcctcggcctcccaaagtgctgggattacaggcgtgagcctggcctagtttttgtacttttagtgtggatggggtttcaccatgttggccaggctggtcttgaattcctgacctcgggtgatctgcccgccttggcctcccaaagtgctgggattacagacatgagccaccacacccagagattatttcctttaatgttatatcagagtgtaaccttatttctaagttttacctatgctgacttgaccagcgcctgctgtgaatcatgtctgcaatacacagaagtatcctggactagtaaagaagaaaaaaacagttcctttttctctacatttgcagaacacttcacttctaacaccagatgtgtgactttttacctatatctatcaattctctgacgtcagtttggtaccctgcaattcagttcaactctgagactgtctatctgggtttagtacagaccccacaggttaaagattcagtcccacaagagtatctcatcattcctcccctgcacaccccctctctagacaccaatctcaagtctaggttatcatatatgcctctgaccaaaaggctatcaatcagagacttccttgactcacctcttcaggtttgattatttgctaaaatagctcacagaactcaggaaaacagtttctttactagattacaagtgtattagaaaaggatacaactcaggaagagccagttagaagagatgcacaggacaaggtatgggggagggggacagtaagcatctatgctccccaccagctgcagtaccctctcagcacctccatttgtttaccaccctgaaagctctcagaaccccatttatttttgttgtcgttgtttgttttttttgagatggagtttcgctgttgttgctcaggctggagtgcagtggtgcaatcttggctcatggcaacctccgcctcccaggttcacgtgattctcctgcctcagcctcctgaatagctgggattacaggcatgtgccaccatgcctggctaattttgtatttttagtagagacggggtttctccatgttggtcaggctggtctcgaactcccgatctcaggtgatctgccctcctaggcctcccaaagtcctgggattacaggtgtgagccaccgtgcccggcctgtttttcctttttttttctttttaattggatatttcattaggaagacatgatttattatatctttgaccattggagatcatcttaacctttatcccctttctcctctctggcagttgggctgaaagttttaactttattatcacttggttggttctcctggcaaccaaccagtgccccccactccttagggactttcccattgtcacctcattaacataaactcaggtgtgattgaaagggggttgaataacaaaagaatagctcttactgcatcggaaattacaattcctggagctctgtcctggaaccagattgaaaactaaacatatatcacaaataagctcaagtttttaacaaaatttaagtttcattcttaaaaatgtgtatacactttttcccgttgtggtaggaaaatgcataaaactgatcacctttactatttcttttctttttttctttggagatggaatttcgttcttgttatccaggctggaatgcaatggtgtggtcttggctcactgcaacttctgcctcccaggttcaagtgattctcctgcctcagcctccgaagtagctgggatcacaggcatgtgccaccacacctggctaattttgtatttttagtagaggtggggatttcaccatgttggccaggctggtcttgaactcctgaccttaggtgatccacccgcctcggcctcccagtgttgggattgcaggcgtgagccactgygcccggcccaactttactatttctaagtgtgcagtttatttggattgcattttagcttaatttcttggttacagttttgcatctgctgctagtttgtgctgggcacgtgccccacatcagtgctgtctgtcttttgattggtaagagcaatagtgggtgggcccagtcacagcctttatgaagaatagcagatggattgttgtggtggagcatgcactttcttttcaaagacatggtccatgtgtaaggtaccgtatttggccagtcatgcggccatacagcagaatgagggaccaaaatagttgctgttacacattttagttaaaaactgtatctagaaatgccttaaaggtaacatcttgtatttgtttttagacttttcttcctctccaagaactactttattctcactgtatccctgtgaggagaataatgtcctaatagyataatacctattttcctttttcttcttttagtcccagaagtgatatattcaaataacattcaacaatacagaatggtaggaagctaaaggtcctctccaccctgmaatcataccctccaaagatagctggtattaatattttggtatgttttctcccaaatgtcttttctcttgcacacatcagagtatacacacaagtacattgatatgcacgcattttaaatatggctttattgggatagtttatataaaagtgtacarttcagtggtttttagtattttcatcaatatatgcagtcatcactacagtcaattgtatttattttttgtttatttttagcttgcgctaaattattttcaaaaattttaacttttaggcattttcttataaaaacttgctactcatacataaactaatatgaacttaaaattcatcatagatttgtttcacttttttttttttgagatggagtttcactcttgttgcccgggccggaatgcagtggtgcaatcttggctcaccgcaacctccgcctcccaggttcaagtgattctcctgcctcagcctcccgagtagctaggatcaccaccactcatggctaattttgtctttttrgtagagacggggtttctccatgttggtaggctggtctcgaactcccaacctcaggtgatccacctgtctcggcctcttaaagtgctgggattacaggcgtgagccactgcgcctggcctacttcactttttaacttgactttctttctttttttttttttttttttttgagacagagtctcgctctgtcgcccaggctggagtgcagtggcacgatctcggctcactgcaagctccgcctcccrggttcacgccattctcctgcctcagcctcctgagtagctgggactacaggtgcctgccaccacgcctggctaattttttttgtatttttagtagagatggggtttcaccgtgttagccaggatggtctcgatctcctgacctcgtgatccacttgcctcggcctcccaaaattctgggattacaggcgtgagccaccacgcctggccgactttctaataaatctttagcttctcttcttttggctgctgtgtaaggagatcctctttcacttggattgtttaagagcatcattcattaatgagcatctcatactttccctttattggcagtaggccttagacctggtattgatgctgccttctgttttgtcatttttaattcaaacccacctctgtaatagccaccactgaaggcagattttggtagactttgaaaaacttgttttacttgaggcttcatatgcttcatggcttgcaaaacataatggcctacgaatcccatggcagcaaatcagtccaactgctactactgtactggccacagctccagctgggctcccctgcctcyaccaggaacgtgaatcatcccagcccaggggttgcagccaacaaccacatacctttatcagagagcaacacagccrccgaccacaagaacagaacccgctacagtccatttttgagcatttgtacacaattttttaagatagaatttttttttttttttttttttttgagatggagtcttgctctgtcgccaggctggagtgcagtggcgtgatcttggctcactgcaacctctgcctccttcccaggttcaagcgattctcctgcytcagccttctgggtagctgggactacaggcgtgtgccaccacgcccagctaatttttgtatttttagtagagacggggtttcaccatgttggccaggatggtctcgatctcttgaccttgtgatccacctcccttggcctcccaaagtgctgggattacaggcrtgagccacctcacccaaccagaaatttttgtgttgttgttgagatggagtttcactcttgttgcccatgctggagtgcaatggtgctgtcttggctcactgcaaccttcgcctcccaggttcaagcgattcttctgcctcagcctcctgagtagctgggattacaggcttgcataaccacgcctggctaattttgtatttttagtagagatggggtttctccatgttggtcaggctggtctcgaactcscgacctcaggtgatccacccgcctcagcctcccaaagtgctgggattacaggtgtgagccactgcgcccagcccagaaatttttataaaattaaaaacaaacatctaatgcatgctaattattttttaatacttaatttagagccattttaggctcacagcaaaattgagaggaaggtacagagatttctcatatacacactgtacccacacatccatagcctcgccattatcagcatctcccgtcagagtagtgcatttgttaacattgatgagcctactcaaattccacctgattacattaaggttcattaggattagtgttaattcttcttttaatgtttggtagaattccctagtgtaatcatctagcttttctctagtgcagtctgggcttttctttggtaggaggtttttgattactgactaaatctccttactagttacttattggtctgtacatattttccatttctttataatgttcaaagtgtttggtttttttttttgttttttttttttttttttttttttttgagacagagttttgctcttgtcgcccaggctggagtgcaatggcgygatcttggctcactataacctccgtgtctcgggctcaagtgattctcctgcctcagcctcctgagtagctgggattacaggcatgcaccaccacacctggctaattttgtgtttttagtagagacggagtttcaccatgttggccaggctggtcttgaactccttacctaaagtgatctgcctacctcagcctcccaaagtgctgggatttcaggtgtgagccactgtgcctggccatgttcaaagttttaataatattttttatttccatggcattggttatataatatgatgtcccccccacctttattgtttgtttgttttgagacggaatctcactgtgtcgcccaggcctgagagcagtggtgcgatctcggctcactgcaacctccgcttcccgggttcaagcgattctcccgcctcgacgtcccgaatagctgggattacaggcatgagccaccaccatgcccggctaattttgtatttttagtagagatggggtttcaccatattggtccagctgtctagaactcctgacctcaggtgatctgcccgcctcagcctccgaaagtgctgggattacgggtgtgagccaccacacccagccctgtcttttatttctgattttagtttatttgaatcttttttttcttaatctagcgaagggtttgcagttcatttacttattttgagacaaggtcttgctctgtcatccaggctggaatgcagtggcaccttcatagttcattgtaacctggaacctggcaaatgatcttccagcttcaggctcctgaatagkcttcaggctccaccataccccactaattttttttttttctgtaggaacaaggtctcactatgttgcccaggcttgtcgtcttcattcattaaggtgtaacttaagcatctcttcttgattctccccagattcagttgactcgtgtgtgtatgtctcttagcgtttctaaaagtggctgtcttccttactagacagcaaactcctcaagaagagtatctatttggttttgaatcccagttattaaactacagtatctggctcatagaactgaataaatgtttgttggaaatgagtgccttttccgttgtaaacacttacattaagtaccccccgattttgtaggtaattactttagatttttgtatcctcttagtcagaattatctcatgccattgtcctggttcctgaaattgaacaggatacaattttacgactaagtagattcagcattcattcccctatgttctcagacccttgggagttctgttttgtggtttggtcagagtagagaattgcgttctatgatattcccaccaatcaatgaaaatatagatactcctttttgaaaatagcttaagttgaaaatgcatttaatactctgataaacctattacaaagcagaaaaattaagtccaaccattgttaagttggggatgtctgtattctttgtgtttgaaggtttgccctgagatatttcaaggacacatccccagtctttcaaagacttttcctagagagttcagatgctaatccagtacgctatggacgtaggaggatgaagctccgggacctaatggaagcagccttcaagtttctgcagcaggagcagtctgtgttccgggagctctgggactggagtgtgtgtgtccctctcctcagaagccatgacaccttggttcgctggtgcgtagctgttagacttttttgcacttctagtgtggggatggtacagggcatgtgtggagttgtgtgtgtcaggagggaaaggaaaccatttaaaatttgttatttttgttcttgtggcttttggggttttacttcctttctttaatcatgtgtcattgcagaggaaaatgagatgatatgaatggagtttcacctttttcatgttccatcaagtaaatccattgtgcctgatttgtattttctgttcttaaatgtgttgtaataattgagatttccttttctagtgttcagttggctagtggattttatttattctttattatcaactgcagataaactgaatttacatactttctttttccctaggtatacagccaattgtcttgctttggttacctgtatgaatgaagagcacaagttatcatttcttaagaagatatttaatagtgatgaattgatccatttcaggttgaggtaagcaggaaccttcgtggaggtcttgctatagcatttcttttttttttttcttttctgggggtgacaggccagaggtgactgcaggtcttgcgatagcatttctgagtggtaaggtaattgacgagactctcctttctctcaggttattagaagaggcccagttgcaggacttggagaaggccttggttttggccaatccagaagtctccctttggcgtaagcagaaggagctgcagtacttacagggacatcttgtttcgtctgacctctcccctagggtgacagctgtttgtggtgtggtgctgcctgggcagctgccagcccctggagagctggtatgttggtatcagtagggggtgtgtccccttccccctactaaacactgagtgtgctctgtctttggctgggttctatgtaccaggtgtgagctaaatttagtttgttaaattgctgcttcatttttggaagttaaaaagaaattcatcttgggcttttcccctgatattcccactgttcttgtttttattttttgttaattttttaaattgtagagacggggtctcactatgttgtctgtgctgatctggaactcctggactcaagggatcatgccacctcagtctcccaaagtgttgggattacaggcgtgagccactgcacccagcctgtccctgtttaatatgaaattagaaactaatggttcctgtgtgatgcctttaacttgcgcggagctgttccgtatatcttcttgtttgcttgctgcaaaaactgtgtgaagttctgtagcacatgttacgatcctatgttgatgtaattcaaaggcagaattacttgctggagacccttggactgctctgtggcaaagacaggcctaggtctagagatgactcccagcagcctcttctttcagaactatctcattgtagagagtccagtatctagtgaacttcctctctcccatatgcaacaagcttctttccacgaatggcttgagaccatacttgaacaggcttgcagatcataagtctggcactagtgggagccagtctctttttccatagcagtcttcagtcagttgtcactttgtctgatggtcaggctgtagtgcaagtgcagtggcagaacctcggctcactgcaacctcccccctcccaggttcaagtgattcttctgcctcagcctcctgagtagctgggattacaggtgcctgccaccatgcctggctaattttttgtatttttagtagagacggaatttcactatgttggccagcctggtctcgaatgcctgacctcgtgaccccctgcctcagcgtgagccactacacccaggccacccacttttcttcttggaataagttctgggtcatttcttgaacccatcagttgggttctggtcagtagtagtaaaaaaaaaaaaaaattaaaatgtaatatacatataggaaaatgcacattgtcataagtgtagtcagtgattattcataaacttcatataaataacaccaaacacccagtacttccaaagctctttgtgtttttttctagttgtgaagacccgtccccttccctcctccctctttaccccccacgtatcctgtaaccagtatcccaacctagattatgtttagggcattaggattttaacatagggaaggattctggttagaatggacctgctgttgtttagcagtggggaccctggggccaaagcgcagggtagagttgcggtgcagcctgcctgctaaatttatgagaggacaaccctgaggaaagttcaagagcttccagctctgaatttctcatttaatcctcacgtatttttagggaaccagccatatttgagaacttactacccctttaaggttataaatcattccccttttcccccatgtatattggatgcattgttattattaaacacatttaaggccaggcgcagtggctcacgcttgtaatcccagcactttgggaggccgaggcgggcagatcacgaggtcaggagatcgagaccatcctggctaacatggtgaaaccccgtctctactaaaaatacaaaaaaattagccgggcttggtggcaggcacctgtagtcccagctactcgggaggctgaggcaggagaatggcttgaacccgggaggcggagctttcagtgagccgagatcgtgccactgcactccagagtgagactctgtctcaaaaaaaaaaaaaaaaaaaaaaattaaaagttttgatacaacatttaccatgttaacattttttactttacacgttagttcacattttttgtagagacagagtctcactatgttgcccagcctagtcttgaactcttaacctcaagccatcctccctcctcagcctcccaaagtgctgggattacaggtgtaagccaccacatctgactgagaatgtttttgtcttacaaagctgaaattctttctcattaaacttactgggtgtgttttaatattcttttttactttttgttacagaaaatgtcgcacatattccaaagtagaaagaatggtatagtgaatacccatggacctgatagacctgggtattcaataattatcaattacatttcatttatatttctgcatgactacctcacattatattacttagaagcaaataccaggcatcatagtattttatatgaaaatatttcagtatatatctctaaaggaggcaaactttaaaaatccctgctattgttattatacctaaaaaaaaattacaacataagatatcctctcagtgtccatatttccctgattgtcttctaaatgtattgtgtatatttgtgatcttagatgggaaatcctagaatatggggaaaggaataaaagaaaaatccaacagtaatagatgaggtttgctcttccctacctttgtgcatcagcttttttggctacttaaactttggaagattttcttacatttgccaacaaattctgattccctacttcccatggaatacccccaccatccctcacccccaataaaaatggaaagaaaaaaaaatcagatccttgctttatttttatttttatttatttatttattttgaggcggagtttcactcttgttgcccagctggagtgcagtggcacgatcttggcccactgcaacctccgccttctgggttcaagtgattcttcagccttagcttcccgagtagctgggattacaggcatatgccaccatgtccagctaatgtttttgtaatttcagtagagatggtgtttcaccacgttggccaggctggtctcgaactcctgacttcaggtgatccacctgccttggcttcacaaagtgctggtattacaggcttgagccaccacacctggccctttgctttatttttaaaaatttatttatttttctagagtcggggtctctgtgtcacccaggctggagtgcagtggtgtgatcatggcttactatccttgaactcctgggatgaaatgatactgccacctcagcacttccagtagctgagactatgggcatgggccacaatgcccatgagatctttagatgacatacctgttgttattatagttttggtactactaatttacttacagaggtttgtgtaaggttagtagaaggcttactgtggaaattaacttcggttccttgggggaagaactcttcttgacatggcttttgtcttrcctctttagggtrgtaataggagttcttcacgtgaacaggagctggcccttaggtcttatgtgctggttgagtctgtctgcaaaagtcttcagaccctggctatggcggttgcttctcagaatgctgtgttgttggaaggaccaataggatgtggcaaaacttccttagttgaatatttagctgcagtgacaggtagaacaaagcctcctcagcttctcaaagtccagcttggagatcagactgacagtaaggtaataaggaaatgttaagttttggtggcttgtcatgcttgtaaatatttgcattaaaatattgcttttgctaagggaatataacaatagttattggtcttgcttataactgttggggccaacctatgtaaacctcaagtgcctacttacttacacctacctatagaagattaacagttaatcaaaggatgtagcattgccactacaggtatggtttttcagtaattactttatcttctttctgcagatgcttttggggatgtatcgctgcacagatgttcctggagagtttgtgtggcagcctggcaccctgacacaggcagccacaatgggccactggatccttctggaggatattgactatgcccccttagaygtggtatgtcatctcaggaaattcattgtcccttaatatattttcctgtcttggaaaagcattttgttaatagtgattctggtgatgatttaaacaaaaatgtatttgattagacgtactatgttgcaggtacttcatggttacttacctgatctgatttgcggtcctgaattacttgactggtttcttgtttgatagagattttctataaaattttggttgtgctgtttcctatagtagttgaatatgtgaccagtttcatagtagtattttcctcccttaattgaatatgagatcaacattttccaagaacaggtctggtttggaacatctcagccatgttacatgtacattgagaacttwgagatcctgcttcttagtggtggcagctacagaggagtgggctgaggacaggtgaaggaggagatgatgtaataagagtgtgcttgcctttgtttagttaagaaaaatatgctggatttgtattttggtttgtaaaaagaccacttctgtgtgtaagaaattagccattgagacaatccatgttgcctttgtattctgaaaagtgacaaaaaatgtattgcaggatgaaatattcttcctttggacagagttttcccgagattggttttaattttctttttctttttttttttgtgagacagagtcttgctctgttgacccggctggagtgcagtagcacgatctcggctcactgcagcctccgtctcccgggctccagcaattctcctgcctcagcctcctgagtagctgggattacaggcatgtgccaccatggccggctaatttttgtatttttagtagagacggggtttcaccatgttggccaggctggtcacgaactcctgacctcgtgatctgcctgcctcarcctcccaaagtgctgggattacaggcgtgagccaccgcgcccggccttccttacctctttattctgttcttatcccattgtcttagcactggcttattttgtctacctatctctcttgcctttgttacctgaatagtgtcctttttggccgtttttcctctagtctagctcctttccaaattgctacacagttgattttctaaaataaaaaatggaattatttcttttcttctcagcctaaaagcctctcgataactcttatgaaaaagttcaaagcccttagctcagcacaggaggccttttattacttacctctaagccttacatctttctgctgcttcttactgcacattctaccctacacataacagaattcttgtgccatggcttttaggtttatcagttttttaaaaatacacttgcatacttctgcctgaagtgtatgtaccatttctgtttcaccaaacctggttaatttctgctcattcttctttaaggtttagcaaatgtcactacctctgggaagacttcactgccctgcttctaaatcattctatcctgattcagaaccccctgtatctttatatatgactttgtatactcctggggtacactgattatgctgtgtgggaatttgcatgcctgccctctcccatcagcctctaggctctaaagccttggtcctgtctgtattcttgtgtcttgcttggttgtgatccacaggaggcactcgtgaatgtcgagtgtgtaaattgtgctggagtgtaggtgattcaracgttcccacctgcataytgaccccagtttggactatgagagctgacgtttcctttaagggtgtgtctgtcattttgagagagggttgttttgttttgattatttctgtcttaatagctttactttatcagtgcggttgttgttatctgatttaggtttctgtgctgatccctctcttggagaatggagagctcttgattcctggccgaggtgactgtctgaaagtggcacctggatttcagktttttgcaaccaggaggtatgtactagtaacctttctgttttcactctggagccacttactcgtaagtctgcatgctgagccagaggtcctgtaatagagttctctgggtctacttcaagcaaggttagttggaagtgatracaggtctaaccttctcattcctgattatttttaatgaagataatttataaaataagaggtcccccccccacttaaaaataagtaaccagtttaaaacacttcaccttatttcatgttttaaaaaataatcagagktgaggttattgttagatagcccagggtttgagtcctgacactgctacttagtacctatgtataccttggctggttatgatggggttaataataccttcttcaaatggtggctgtaaagaataagtgaaatgacttgtactaaagacctgtcacaataaatgcccagttaatggctagccatgatggtgataatgataggtagatttcaggcaattgaaaaattaattggatataagcatgaacaaaggcacaaaaactgagcgtgcttagtatatattcctgcctacattttaaaattacctgaaggcagtggtttatttcttactgctagtctatacctgcacagcttcttcaatgtctttaaatgcccatgagtgaaactaacatcattctatagttaatgattatattagtgtttacctcagttaacattgacttctgcatggagtgtggagctaacccgatagtattcaaggaatacctccctagacccaattactcttttttttttttttcttgaaatggggtctcactgtgttgcccaagctggtcttgaacttctgtactcaagcagtcttcccagcacagcctcccaagtagctgagactacaggcacatgccactgtgcccagctgaccctgttacttttttttttttttttttttttgagatggagtctcattctgtcacccaggctggagtgcagtggtgtgatcttggctcactgcaacctccacctcctgggttcaagcgattctcctacctcagcctgccaggtagctgggattacaggcacctgccaccacacgggctaatttttgtatttttagtagagacggggtttcaccatgttggccaggctggtcttgatctcctgacctcatgatcctccgccttggcctcctgatgtgctgrgattacaggcgtgagccaccgtgcccggcccaatcctgttacttttgttttaaacatttatttattttttagagacagtgttttgctttgtacccaggctggaatgcagtggcttgatcgtagcttactgtaaccacaaactcctgggctcaagtgatcctcctgcctcagcctcttgagtagctaggactacaggggtacaccaccatgcctggctaaaaacaaatttttwttattattattattattttagagatggaatcttgctgcattgcccaggttggtcttgaactcctggactcgagcagtcctcccactgtggcctcctaagtgttggaatgacaggcatgagccactgtacctggcactgttagttttgatagaccttgattttttattttatttaattaattttttttgagaccgagtctcactctgtcatccaagctggagtgcagtggcatgatttggctcactgcaacctctgcctcccgggttcaagcgattctcgtgcctcagtctcccaggtatctgggactacaggcacgcaccacgcctgtctaatttttgtgtttctaatagagatggggttttgccatgttgcccaggctggtcttgaacttctggcctcaagcaatccacctgcctcagcctcccaaagtgctgggaggtgtgagccaccacacctgtcttattttatgtttttttagagatgaggcctcaatttgttgcccaggctggtcttgaactcctgggctcaagcgatcttcctgctttggcctcccaacgaccgacatgagccactgagcctggctgaccttgattttatttatagagatagtgaagttcttccctggtagattcaaacacttcccagaaagacctgggacatcgtggaaagatgttagacaaacttgtgatctgataaacttgaattcarttttcagttctgccattttcagtcacagttgagtgtataagggccattcttwccttctcttccatttatgtcagaagaaaagaatggcatcttcctctcgggacagttgtgaggactaagtggcctatgcataagcatgtaccttccccagagtgtatgtttaatgtatattccttctctacttttttctcttctggaaatttttaatggttttcaagtactgtagcttctggtaacaagcagtgaacttaatgttaatgctatgagccttggattatgctttctctttcctgaagttatttatgccttaaggaagaggaacctgtcattgaaataaaaacatttaccttgtagaattatttgcagtgatttgaaaatatttggttaaagcactatcactactacttaggagaagagccaaacatgggttaactgtcagcctttcatttgtcatctgccctgtaagcccaacagtgtagtatctggaaacagaagggattatgaatatttttcctrtgtgagacagtgtacagcaagtaatatccagaggcacaattcaggattaaaatttggaattttgtgtgactgtgttttttattttgaaacgtagactcttgagctgtggaggaaattggtatcgaccgctaaacagtcatgctactttgctagacaaatattggaccaaaattcacctggataacctggataagagagaactgaatgaggtacgtgggtcttggaaagtatcaatgcyggccaggtgcagtggctcccgcgtgaaataggaaatagtataataaaccaccagaaccctcatcaacctaaattttgcagtctgtgtgctagtattttactgtatttgcttcatctgttattttttctgggctaatatatttgaaagcaaactcccagcatacatctcttaaaatttaatggcattttcatatataaccacaataacattattatacacaataaaatgaacagtaattcctcagtatcattgaattcttagattatattcaaattttcccagttgtctacagaggatcattttactaagttgatttgaagtaatgtctttcacacttaatggacattttgatctaggcattaatgagaattgaggtaaatcactttataggttttctacattgattcagtttctagtattgtggttatcctagatcagtaagaagtatattacacttgactccgttcatgccccacttcccttttatgtctcacttggaagatttcccttccccagtgctttatctaggagagtggcagacaaagcattgtcagtggtcattcagacatggaagagatgcttttccctttattgatgtaggtatataggtaaatatgtgacaccaaacaaacttcaatcttttatttttattttattttatttttttttaaacagtttcgctcttgttgcccaggctggagtgcaatggcgtgatcttggctcactgcaatctctgcctcctggttcaagcaattctcatgccttagcctcccaagtacctgggattacaggtgcccaccaccacttttggctattttttttgtatttttagtagagatggggtttcaccatgttgaccaggctggtctcaaaacacctgacctcaggtgacctgcctgccttggcctcctaaagtgttggcattataggtgtgagccactgtgcctggccacaaacttcaaatattttttcctacattttcttttcttttttttttttttgagatggagtctttttatgtcgcccagaacagtactctgtggcacgatcttggctcgctgcaacctccgcctcccatattcaagygattctcctgcctcagcctcccgagtagctggtgcatgccactattggggtaacccacccccaatattacaacataggttctttctattttccataagtgttggctggctgagaaataaagagaaagagtacaaagagaggaattttacagctgggctgtctggggtggcatcacatattggtaggaccgtgatgcccacctgagcttcaaaccagcaagttttttaagggtttcaaaaggggagggggtgtaagaacagggagtgggtacaaagatcacatgcttcaaagggcaaaaagcagaactactaataagggtttatcaaagatcacaaggcaaaaggcataaagcagaactactgataagggtccaacaaagatcacaaggcaaagggcaaaagcagaactactgataaggstctatgttcagcggtgcacgtattgtcttgataaacatcttaaacaacagaccggtctgaccacaaatttaccagggcggagttttttccccaccctagtaagcctgagggtactgcaggagaccagggtgtatctcggtccttatcttaaccgcataagacaggcattcccagagcggccatttatagacctcccccccgggaatgcattcctttcccggggtattaatattaatattccttgctaggaaaagaatttggcaatatcttccctacttgcacatctgttgataggctctctctgcaagaagaawaatatggctctttttgcctgaccctgcaggcagtcagaccttatggttgtctgtccttgttccctaaaaatcgctgttattctgttctttttcaaggtgcactgatttcatattgttcaaacacacatgttttatgatcaatttgtacagttaacacagttgtcacagtggtcctgaggtgacgtacatcctcagcttatgaagataacaggattaagagattaaagacaggcataagaaattataaaagtattatttgggaactgatacatgtccatgaaatcttcgcaatttattttcctctgccgtggctccagctggtccctccatttggggtccctgacttcccgcaacatgccaccatgcccagctaattttttaatttttagtagagacagggtttcaccatgttggccaggttggtctcgatctcttgaccttgtgatccactcacctcagcctgccamagtgctgggatcacaggcgtgagccaccacgcccagcttaactgattttatatcttattattattattattattattattattattatwttttgaggaaaggtcttactctgtcacccaggctagagtgcagtggtgcactgcagtggtgctcagctcactgcagcctcaacctctcaggyttaggtgatcttcccagctcagcctgccaggtacctgggactgactacaggtgtgtgccaccctgcccagcaaatgttttgtagagacaggttttcaccgtgttgcccaggcttgtctcaaactcttggactcaggcaatctgcccacatcagcttcccaaagtgctgggattgcaggtgtgatccactgtaccctgctccttttacatgcttttcattgagaaattacataatggccttaccagagctgtgtttgaaattaaatagtaatttaagaattctttaatgaataaattctttagagttggttgcttatattttggttacttggagaaccttttaacatgacttctaccgctgaaactgtattgtagatggtgagattgctggtaactgagttctgggtaggaagaaaatcatcatgattgagtgaaataggtgggtgggaacaggagtgagtaagggggaagttcttatttttggtaaagttgacaaaatttcttttcatttttatttttatgttttatttatttacgttttttgagacagggtcttgttctgtcacctaggcatgatcactgctcactgcagccttaacctcccagtctcagatgatcctccctgctcagcctgctgagtacctgggactacaggcacacggcaccgtgcccatgtttgtattttttgtagagatgatgtttcaccatgttgcccaagttgatctcaaactcctgaattcaagcaattcctctgccttggtttctcagagtgttgggattacaggtgtgagctaccgtcccccagtgaacaaatttcatagagaaatacaatttttggctgaccagtttcagcagtagtttgtgtgctttcaaaaattaccatgctggctgttaaattttcttttttttccccctctgtcaggttcttcagagcagatatcctagcctattggcagtggttgatcacctgcttgacatttatatccaacttactggagagaaacatcactcttggagtgatagttctgttggatgtgaacaggcacctgaagaagtttcagaagccagaagagaaaacaaaagaccaacccttgagggaagagaattatctctaaggtactggactaaacagttttttcttttctttctttcttttttttttgtgagacagattcctgctctgttacccaggctggagtgcagtggtgcagttttggctcactccaacctccgcctcctaggttcaaagttcttaccagctagaagtaaatagtcaggttttgaaattataggttgcttcatggtgtcagatccctttttcagatttataattaatgactgggaaggctcgattagggtaatgtttttaactttaaaaaataacttttaaagaccaacttgggagtggctcctaacataattctttcactgaatgcccttttctgacacttggagtcttaaataagtcttcttggatttcgctatctatgacttctgtgccactctgtgttctcagtggttgacttcccctttgagaagtgagaattagaaatgggcatctcctcaggctaggcgcggtggctcacgcctgtaatcccagcactttgggaggccgaggtgggcggatcatgagatcaggagttcgagaccatcctggccaacatggtgaaaccccatctctactaaaaaaaaaaaaaaatacaaaaattagccaggcacggtggcaggtgcctgtaatcccagctactcgggaggctgaggcagagaattgcctgaacccgggtggaggttgcagtgagccgagatcacgcactgcactccagcctgggcaacagagtgagactctgtctccaaaaaaaaaaaaaaaaaaaaaggaaatggcatctcctcattctgatctgattggttgctcccctcctttcctgctaccttgtctggcatggatggcagagagtaatgagttggtaggtcacttcctggaatgggtgaagattgggaactctttttgttttgtttttaaattttacacacaaatacaaagaggggaaggattgagaacccttactggtttcccaaataccttttatctaagcattgtcagaagaaagaagaaagttatcaggtatgcccagacttaagtgggtcaataaattctgatgcctttgatgtctttggcctgtggtcttttctttgttttttcttttctttcttttttttaaagggatctgctgaattggtgtaataggattgcccatagctttgacagttcatctttatcagcatcattaaatatttttcaagaggtaagatatagttttccagtcttttttgtcttggttctgtaaggctgttgacttccgttgttattttctgtcttttgattgccatcagacttttttcttttttccaagtatggtttgttattctttttttgttttttttttttgagacgaagtctctcgctcttgtccccaaggctggagtgcagtggcgtgatctcaggtcactgcagcctccaccttctgggttcaagcgattctcttgcctcagcctcccgagtagctggggttacaggcacctgccaccacccctggctaatttttgtatttttagtagaaacgaggtttcaccatgttggccaggctggtctcgatctcctgacctcaagtgatccacccacgtcggcctcccagagtgctgggattacaggcgtgagccaccgcacccggcctggtttgttattcttagctagttaaaactcaactaacgtggcattaaagctaattgaatgtaatacatgttttgtggtttttgaaacaaattattattaatttcagaagaagtatagtttgatatagagtaaaacaggtagtgaaattaaaggtaaaatgaaagaaactcccgggtaataataaagcaatgtttgttcctacatataatttcttagtctgtttgataaatttgtaactatccgatccctctacttttctcagtagggctggttgatgttggttgactgaacctctttgtaagacaccataaatccaggatgggtttctgatgagggtggtggactcttctgactaattcatctggggtccattgttaytatctatgatgggagcatgtatgtgcacaggacttaaccattctagtggatattattacagaagaccaaatcatagcggtaaaggtggaataagaacaaaaggagttggatgttcttttagaagtaactcttttaaactatactatggtaaccagaggaattgttctcttctactctaaaatatatttctactgaatttgagaccagccatttcaaatgagtagggtatattcttttgagaactggcaaattgtttttgtccagctcttttccccccttattccatgcagaccaaatacctttatgaaatatcaggtattaggtattataatttgtattaggtattataaataacctggagatttaaataaagaaggtgtgcatagattatatgcagattctacacctgtaaaattttttttttctttggcttattttwgtacatactgacacaggccctatacctttttwtttatttatttatttatttatttatttatttatttatttatttatttttgagacatagtctcgctctattacccaggctggagtgcagtggcgtgatctcggctcactgcaagctccacctcccaggttcccaccattctcctgcctcagcctcccgagtaactgggactacaggcgcccaccaccacacccagctaattttttttgcatttttagtagagatggggtttcaccctgttagccaggatgatctcgatctcctgacctcgtgatccacccacctcagcctcccaaagtgctggtattacaggtgtgagccactgcgcccagtcaccctatgccattttatataagggacttgagcatcttcagattttggtttccgtgagaggtcctggaatcaatcccccaggaatatgtagggataactgtattataatagtaaatcctgtatttttaatattaatgtttgtaactttagatttctgggtataagttttcctgcttattactgaattttaggggtgccattatttgggtctttttgcatcttgtaaactgactttacttagaattatggctttaaaatatattttaattttaaaaggactagattcttcttgttaaaaaacaatagaaaagatgatgraagaaacttaactactaactctaccactgagacgaaagcaatttgcagtattgggggcctgttttctcttttttttttttttattagttgagacaatactgtatattaagtgttgtattctgagtatttcaactgtcaggacaaaaatataaaatacttttaaaaaggatgaaaaaatagatcagattgtaacggcccaacaggttcaccttgcccactgcctagacagagacaatttatcatgacggaatttgcaataaagtaattcacacagagcctgctgtatgggagaccagttttattattactcaaagcagtcttcaagagagcttaatgaatactaggctagccatatgggaaatggaattgttactcaaatcaatctccctgttaactcagaagctagggtttttatggataatttggtgggcagggtactagggaatgggtgcctgctgattggttggggatgaactcatagggatgtggaaaatggtcttgtatactgagtctacttctgggtggggtaactgagtcaggtggggttagttagttgctggaatgcaaaaatctgaaaatcacctcaaaaggccaattttagtttctacgatagtggtgttatctataggagcagctggggaagtcacaagtcttgtgacctctggccacatgactcctgagcactaagggattatagaaactacacctacattttagcagaattcaggcccctcccataatcctaatcttgtggtctttcattargtttcggtccctgagcaaagagggggttagttttaggawgggactattatcatccttgcttccaagttaaactataaactaaattcctactatggttagcttggcctatgcctaggaatgagtgaagatggccagcctatgaggcttagaagtaagatggagtcagccatgttagattgctctgtcataatctttgcaaaggtggtttcaatcccacactcatggtgtcctttacattgttttatctctcatattttctgtaaatagaaaatacaaaaaatgcttgatgaattcaagtttaacatatttggggtacagtccatttttggtggtattttatatttcatcacatcagaagacataactkgttggctcactggtagttgctaagattgagtactaggttaagataatgaccatgaggtattgcacacctagtgtttcccttgcagttagaaagcagtctttkgatattacctcagcactatatgagtcagttctccttgaaccatgtacccagtggtcaacactaattgctcttctttgcccgaagctaggatttgcaaagtggggtgttttgttgtttgttttttttatttggcaagtatttcaatagtcaattatttatatttattggtgtcctgtctttccattatggtcaggtcctcagtcctgggttggtacyttatttgcactcccttcatttttagagaaatgttcctgctggattttgtgtttctccctcttgtggccaggaaaatgatgttctgtgattaatatattattttaaaaatcagtcagcatttaccttggttattttaataggctctagactgtttcacagcaatgctttctgagcatacaagcaaactgaaaatggcagaagttattggaagcaaattgaacatttctagaaaaaaggtatgtgtgctgtttttttacttccctgttgaaaggaggctaggattttttgcttgcttgcttgctggtctctagtccttagttggaacagcttttgcagtggtacctcttttgtaaaagttggtgcttttattgcagcctctcgtgggcatacaactcccaaatggcgcgagtgcaatggcgccatctcggctcaccacaacctctgcctcctaggttcaagtgattctcctgcgtcagcctcctgagtagctgggattacaggcatgtgccaccacacccagctaatttcgtatttttagtagagatggggtttctccatgttggtcaggctggtctcaaactcctgacctcaggtgacccaccagcctctgcctcccaaagtgctgggataacaagcatgagccactgtgcacagccatgttccacattcttaaaaggagcttcctcatgtcctgtgtcgtcttcagtgttttagtgagcatttattttattttgtaggcattagactcaggaatgtaactatgttttagtaatacctttgtctataacttaatgcagagtttttccatcttttttattattttcccttattagaaaaattggcaagagactgagtgtggtggctcacacctgtaatcccaggactttgggaggcagaggtgggtggatcacctgaggtcgggagtttaagaccagcctggccaacactgtgaaaccctgtctttactaaaaaaatacaataaattagctgggtgtggtggcacatgcctgtaatcccagctactcgggaggctgaagcaggagaatcacttgaacctaggaggcagaggttgcagtgagccaaggttgtgccactgcactccaacgtgggcgacagatccagactctttctctgataaaaaccaaccaaacaaacaaaaaaaaaagttgcaaagagtagtagcagtgaatacctgtatactcactactttgtttcattgctgacattgttaatattttgccattcttgttttatgtcaaaatacgtattttgggaggagggatcctttcagcagtggcactggtgtctagaaaaatgtctgggctcatcttgaagcagatatctgacattctcatgtgaataatgactctaaaagatcttatggcaggaattacagtagtagagatttttataaggcttctgaaatagttgggatggttttggctggaggtcatagaacgtcctactgaaagggacttaaatgatacatatgttaatcatgagaaagaagaatgaaaccaccatgaatattcattccaccaatattcatcctctcttgttgtggaaggactcacttttcccagagcagtttgcttctttcacttctgccccaaacctgaacaaaatctgtgttctttggagaagagaggaatggctgttgggtagacatccaggagcatctgccacagctctttttgctttggctgtagtcagatgtaccatgatttcctaacattatgttagaaatttaaagcagaggagagcatagctagagaagatttctctgatttttttttcttaccttttaggtgaggacttactgttcactttctctattggatatatcagtgtgttcactccatatataggtagggcttatttgaaaagtaccattttagggaaacatgataaatgttgtgaaaaacatagaagtttggaaaatgaaaaaagaaatttctttatgaaaagccaactcaactatctgggaagtagagaataattctttgtagagtgctaatttgagggccaaaataagcctctggatgaggaaatawtccaaaagcatgtggatttttactcaggtaaaatcttacctcctacaggctgaattcttttgtcaactttataaaccagaaattgtgatcaatgagctagatttgcaagtgggtcgagtgcggcttctacggaaacaaagtgaggctgttcacctacagaggtaagtagggctctaaactaagctgccaactgtggggtttccagaaacttgacagaaggtctagctcagcctcttgtctttgtgcaaaacacatgtctgaactgtgatatctgtagtatgctatatgggaaggagcagtgttttcccaaagtatgttctgtgaaattagatatcaataggtgaaagaggtgatgaaagtcattaaagatttggcactaccaaagatgaattattgattttattcactgcagtgtatttagtgaagtatgcctcagttggaagtcaggcttatgtctaacattagtctgtaaattcctagaaggctggggttatataagattctgagatcgaggtaacattaaatacttattacatgtctgactttgtactaagtgctttacatattttctcatgtagtggttgtaataatcctgtgaattaatatattagtatcctagggctgccataacaaattaccataaacttggtggttttaaacaatgacattattctttcacagtcctggaggctggaagtgtaaaatcaakgtttcgacagggccatgctcctccctctgaaggctctaggggagaatgctttcttgcctcttcctgatttctttctttcttttcttttctttttttttttttctttttaagacagagtctcactccgttgcctaggctggagtacagtggtgcgatcttggtccacagaaacctccagctgcctggttcaagcgattctcctgcctcagcctcccgaatagctgggattacaggcatgcgccaccacgcccagctaatttttgtatttttagtagagacggggtttcaccatcttggccaggttggtcttgaactcctgacctcaggtgatccacctgccttgacctcccaaagtgctgggattacaggcctgagccacggtgcctggcctcttcctggtttctttggctcccagcagtccttggtgttccttggcttgtagttgtatcactctaagttctgtctctgttgtcatgtggcccttcttccttgtgtgtgtatttcttttcttctcttcttttttttttttttttgagatggagtcttgctctgtcccccaggctggagtgcagtggtgcgatctcagctcactgcaacctccacctccagggttcaagtgattctcctgcctcagcctcccgagtagctggaactgcaggcatccaccaccacgcctgggtaatttttgtatttttagtagagatggggtttcaccatattggccaggctggtcttgagctccwgaccttgtgatctgccagcttcggcctcccaaaatgctggggttacaggcttgtgccaccatgctctgccttgtgtgtgtatttctatgtcaccaaatcttcctcttataaggacaccagtcattggatttaagacccaccctaatgcaatatgaccttatcttaatttgattaaatttcttcaaagaccctattttgaaataaggtcacattcataggatctgggtagacatgagtttggggaaagattattaacctattacaactaggtactgttgttacccacatcttacaggtgaggaaactgaggctaagacacattaagtaatttgtccaagatgagctaactagtacaggtagtcttgtcttattgatctttttaatctccagagcctagcatcgtatcagatgtgtgagtattcagtgtttgcagagcaactaaattctgtaatttttgtatgttgtaagattatctggtatagcttgaagacagttactgtgagctgttttctcatccttgttgttgaatctggaatatatggtttcccagagcaaaactaggagaagcttgcagcgtggtttttaaactctttttttctccttcccagggagaagttcactttcgctgctacacggccgtcctctgttctcrtcgagcagcttgcagtgtgtgtcagcaaaggggagcctgtgttgctggtgggagagaccgggactggcaaaacctctaccatccaatacttggctcacattacaggtaatccctagaggaaataaatctgcccccagatatttcacwctgactactttttttccttttttaaaaatactaaatccaaagaccacagagtttaaagagtgccagcaccccacatgtaatctctgcctggaaataactactgttaatagattattattaaattatttcatttccaatctatgcttatgcaaatacatatacgtatagattttgttttatttcaaaacagatatgggattatgttctacatattgcattatacctcatttcttctttttatttttattctttttgagacagggtcgcactgttgctgaggctggagtgcagtggcgagcccacagctcacagctcactgcagccttgacctcccaggctcaagtgatcttcctrcctcagatctgaggtaggaagatagctgagactacaggtgtgtgccaccacgcctggctaatttttaaagttttttgtaaagacgaggtctagctatgttgcctaggttggtctccaacttctgggctctcatgattcagagcaaaggcacatttgaaaatttaccttattgctgggcgcagtggctcatgcctgtaatcctagcactttgggagcctgaggtaggaggattgcttgagcccgggagttcaagaccagcctggcaacatcatgagaccctgtctctacaaaaaattacaaaaattagccaagtctggttgtatatgcctgtagtcccaggtgctcgagaggctgagacaaggatcacttgagcccaggaagttgaggctgcagtgagccatgattgggccactgcactccaccctggttgacagaacaagacyctgtctcaaaaaataaagccctatgccatattcccacagccttaaggagcacactggatattatcggtctttaaatttttggagtaacacttttgcactttctttataaaaggccaccgtttgagggttgtcaatatgaatcaacaaagtgatactgcagacttgcttggagggtaagtgtggcttaaaatttttttcttatttttgtgtttattgcttgaggtaagaaatactgttttcttagtgttaacaaccacaggttctaggatgctcgatgcaatagaaaaagagttttctcagataaggctttattggagcttttggcagggtaccagggacacaaaagagagaattctgtggctggccccagtaagacaggaaagtaattttaaggggctaaagtgggaaggaagtgatatttaagcatgtagaggcagggaacttctggcacttgaacagtttgataacgtgcttcttcatgtgtcccatgtctcagcatgggtatgatttttagtatagcaatgaagctaaggcaaaggatcagtcattcttctggtcttgtgtttgtgcaggaaaaagggtaaactcccttgagtaagatttaaggtgtgagttgcttattttagtttcctcagggtcccaccatcagtgtgtatggtgctttgaataagatttatggtgggacattgctcatcttagtctctctaaggcaccttgagcaagattgcaccttaccccccaaccacagcaaggtatttatttgaatttattgaggagctcatgggtgtgtagatgtttctcttcattttaatgaacacttgaggcccttgttctcaaaggtcatatgatggaagaaggagaaaaagcaggcaagtatataatcaattaatgtttgtgtatacagtacagttgatctaaagtgtaagttctgggccaggcgtggcggctcacacctgtaatcccagcactttgggaggcctagatgggtgaatcacttgaggtcaggagttcgagaccagcctggccaacatgatgaaatcccatctctaccaataaatacgaaaattagttgggcatggtggtgtgctgtagtcccagctactagggaggctgaggtgggagaattgcttgaatctgggaggcagaggctggagttagccgagattgtgccactgcactccaggctttctaccttggttttattttacttatgtttagttggttgtttgaggaacttggcaatctgttcttattaatatatatgatttttcatttaagcagacatgtctatactgctgtatatatttaccyttattcttttttttttttttttgagacagagtcttgctctgtcacggctggagtgcggtggcgcgatctctgctcactgcaacctccggctcccacgttcaggtgattcttctgcctcagtctcctgagtagctgcgactacaggcacacaccaccatgcccagctaatttttgtatttttagtagaaacagggttttaccatgtttgccargatggtctccatctcttgaccttgtgatccacctacctcggcctcccaaattgctgggattacaggtgtgagccactgcacccggcctcttaattctttttttgtttttttgggaggcaggatctcgttctgtcaccaaggctggagtgcagtggtgtgatcatggcttagcacagccttgaactcctgggtttaagcaatcctcctgcctcggcctacccagtarctgggactacaggcataarccaccaggcctggtctatttctctctattctgtatctatatgtctttagtaatttcataccattaagtagtcctaacataaatggcattgatcttgtactaactgaacatggactgggtccttctcttctactgtgaatttgtagtgttatgttagccattgcaagttgttttaaatatagtgagtaaacaggagtacatttgtgatgcaaattgatgacacgaaaaggttggactcaaagtatgattaactagaatttggttttggtgccaacttggtgaatagaatatatctgtttttccttgttagtaggtcagcatcacttattaaaagaaaacgctacttacatttccatttgaaaagatcacttgagcctgagaggttgaggctgccgtgagctgtggttatgccactgtactttagctgggatgacaaagcaagaccctggacaggatctagctctgttgcctacgctggttttgaactcctggcctcaagtagtcctgcttcagcctcctgaagtgttgagattacagacatgagccaccgagccttttctcagtttttgtggggttggaaatgtgccttgttttctgtactcttatattactacaaagagatttaaataaaatcttttaacatatattctgttataagtgaataggtgactcccttgtttaagaatcattgtagaagatgagaataccaaaaagtttttaaaaaggcaagggaatggagaacaaaattcagctgtgggtaaggagatgggatagggaaaagataaatattcctatcctcaggccgtgttgctggtttcatctgttttataagttatgttaaatatattttgcatgtgtccagtatgttaaataataacctggtttgcaaattcggatctttttttttttctttaagatagggtctcactttgtcatccagactggagtgcagcggcataaacatgacttattgcagccttgactttctgggctcaagtgatccttccatctcagcctcctgagcagctgtgggactgcaagcacaagccactacatgcagctgatttatttttagtagagatgaggtctcactatgttgcccagactggtctggaacttctgaactcaaggaatcttcccgcctgggcctcccaaagtgctgggattataggcactgtagctggtcttggattttatttatttatttaattttaactctttttttgggggggracagggtctcactctgttgcccagcctggagkaccatggtgccctcatagtttgctgcagcctgtacctcctaggctcatgtgatcctcttgcctcagcctcccgagtaactgggactacagacgtgcaccaccacgcttagctaattattttctatttttgtagagatgaggtcacactctgttgcccagtgtattcatttgttctcacactgctgataaagacatacctgagactggataatttacaaagaaaagaggtttaattgactcacagttccrcatggctggggagacctcacaatcatagcacmagacaaggaggagcaaagtcgtgtcttacatggatggtggcagtcgagagcttgtgtagggaactcccctttataaaaccatctaatctcatgagacttattcactatcatgagaatagcatgggaaagacccacccccatgattcaattacctcccacctgtcccttgcacaacacgtgggaattggagctacaattcaagatgagatttggttggggacacagccaaaccatatcacccaggatgaatcttgagctcctgagatcaagtagtcctccccagtcaacctcccaaagtgctgggattacaggcatgagccactgtacttggcctttttagattaattttaaaaacttttaaaaattatttttgttttttttttgagacagggtctctgtcacacaggctggagtgcagtggcaccatcagggcttattgcagccttgacctccccggctcaagctatcctcccacctaggccctcctgagtagttgggactacaggcatgtgccaccatacccagctaattttttttgaactttatagagatgaggtctcactatattgcccaggctggtcccctgagctaaaatgatcctcccaccttgacctcccaaagggctgggattacaggtgtgagccaccatccccagcctaggtttttgagagagttttgctcttgttgtccaggctggagtgcaatggcatgatcttggctcactacaacgcctgcctccttggttcaagcgattctcctgcctcagcctcccgagtagctgggattacaggcatgtaccaccatgtcggataattttgtatttttaattgagatagggtttcaccatgctggtcaggctggtctcgaactcctgacctcaggtgatccacctgcctcagcctcccaaagtcctggaattaacaggtgtgagccactgtgccctgccctagattgatttttgaagcaattattattatgggtaaagatactttataaaaataagggccttagaaaccatcaaattatttacattatagcaaattgtcttttgctctttgttagtgtccattatccattacctccttggttttattcttttgtgcttcttgctttttgattagtgttggcatgatatgtctttttccttcatttaattttaaactcgtttttgtcattttatttaacatgggcttctggtaagcagcatgtagaccctcacattacctgtaggtagagacataaatttgaagagttgcgggtggggacagccaaagataatccttgaaaaagagtagagggcatggaagacttagatgtggcagataaaatcaytccagaaagagaaagtctarcactaaagggcaaaatacagagtgcatgttcatagcacttactatagggaatgggcttcagaggggcagcctctgagggagaaacagtgatatattgagaaggaccggttaccctggagagcttggcaatgaaagaagaaaaaaaatagaggaaaattaaagatattgtagaaatagtaataaagcagccaatcctcatcttccttgccacccacccatagaacagtctttaaaagaaactgcccagaagagcatatggcaggagcatgcaatttgaactmagaaccctgtccatgacatgaagagaaatggcttatcattctaattactcagcaygtacattttatattctttttacactttttgttgtttcacatgttataattttgtgtagccattctcacatgaatgcttacatgtggttccagtgtatgtaacagatataagcaaagttattttccatgaaggcaggtgttatggaccttcttggcatttaagtggctcccaaggtrcctttctgcagaagacggtttgaaaatcttgctctttagttgtttggttgtttgtagtttatatcctcagttctctgaggtgtcaggttggttcccrttgaatatttgtgttgcagttgcagttgattttgttttgtttattcttttttgaaatgtatgttttttcatcttttcatgtattgaaatatgtattgacttaagggctttaggtaatactgtgctcagctttaaatgaatgagctttccttttttttttttgagatggagtctaactctgtcgcccaggctggagtgcagcagcgtgatctcagctcactgcaacctctgcctcccgggcccaagcgattcttctccctcagcctcctgagtacctgggattacaggggcccgccaccaggcccggctaatttttatatttttagtagagatggggttttgccattttggctagctaggttggtctcaaactcctgacctcaaggcattcgcctgcctcagcgycccaaagtgctgggattacatgcatgagccacagcgcctggcctgaatgaggttttctttaaggaactcagtctactttgaaatattaagctgcctttttcataaattcaatagatcaataataacagagacattaataattgtattaattatctattaactctctgtggcagtcattatgtgccaggcactgttttgagtcctttttctgtgttaacttagctggtcttcttaaaaccatgtgagacaacagactgttatcctctatattttaaacatgagagaactgaggcaaagagagataagtcacttattcaagaaaatggcagatccaggatttgaacctaagcagtcttgagtgtctgtgttcttaaccattactctgcttcttcagttaactttggatcccatttatactgttattttcaggactagcaattttggccaggagcagtggctcatgcatgtaatctcagcactttgggaggcaaaggtgggagtattgcttgaggccaggacttcgagaccagcttgggcaacatagtgagactttatctttagaataaaaagttaaataaataaaaagattagcaatcttatttaaatgacacatatattttgttcaatttctcaccattttcactgttgtcgttctagtttatctactgtctagtccactgcgttggtctcttatctttgcttctactcctaatctttttatagtcttttttgtttaggagttacaatgatcctttaaagtayaatcagakaaagtataattttttgtgtgtgtgtgtatggcatagtctcactctgtctcccaggctggagtgcagtggcacgatcttggctcactgcaacctctgttcccgggttcacgccattctcctgcctcagcctcccgagtagctgggactataggcgcccgccactatgcctggctaattttttttgtatttttagtagagatggggtttcaccatgttagccaggatcatctcgatctcctgacctcgtgatccgcccacctctgcctcccaaagtgctgggccaccgcgtgagccaccgcgcccagcccagtaaagtataattttttatggagacaaggtcttgctttgtaacccagtctggtctcactctcttcctcaggttcctccactgaacttctcartccatttaggataaaatacaaaggtttagaataaaatgtttggtttgtatagcccttyataatctgacagtggtacttctctgatatcatctcycaccttcccctgtgttgctgagctccaaccactttcttctgctttgcacctaaatgcttgctatttcttctgtgtggcctccttgcacccacagataatgcttagctcacatccttgcttgacttaggtatccttcaaatgtcccctcctcaacaaagcctttcctgactgtgatactcaaattaccaaaactcacatcacccattcagcttttaccttacattatgttcatagcacttaagctactacttgacctcctgagcttgaacaagcctcccacctcagcttcccaagtaactgggactacaggggcacactggcatgcctggctaatttttatattttttgtagagacagggtttcaccatgttgcccacggtggtgtcgaactctggagctcaagcaatccacctgtttagcctcccaaagtgctgggattaacaggtgtgagccaccgcacctggcctattgtcactttcatttgattgtaagctacacaggagtaagatcttgtgggtcttgttgattcagtggctaacacgtatagcaggtgctcaaaaaaatttttataaagggatgagttcttgctctgttgcccagactgtagtacagtggtgttatcatagctcactgtagcctagaactcctgtgctcaagtgatccttctttcttagcctcccaagtagctgagactacaaatgtgcatcaccacacctagctaattttttaattttttatggagacragatcttggctttgttacccaatctggtctcaacctcctggcttcaggggatcctcccgccttgacctcccgaagtggtgggattacaggcatgagccactgtgcctggcctcagtacattttttgtttaataaatggactaaagaaatgcctatactaatgtattagtgctatgagtaagtgaaagtgagtttgatgttcctcttcaactttttttctttggaactggactctcagattcagatgctcagtatcaggccattgggtttttactcatctcattgtttctccctcactaggccagtgagtcagcagtaatccatcagttcccttacgtttgttgtgaaacatattttggtaccttttaagttctcaacttaaattatttttcatgaaaataagatttatctcattcttcctgaattgtaatggtatgccatacaaaattgggtacttaagattttctaggaataactagtgcctcttagacatcgtatgtttargctagagcaatgtttttcaaccttttaaaaaattatctcttacctcccccaaatattcaaatttaagttaatttcctagctccttagccagaggaatttaatgctaaggaataacaaagaatytaaatactaagaagtacaagttgagctttggagtaccacaaaccattgcaatagctaagattttttttktttttttkttttttttgcgtgccctaccctaatttttatcccattgaaagcaatatcattgttgctctctcctactcttcgttttcctaactgataatgtgtgggctgtgtttaatttacataagtaaatcaatttcagatatttatttttccttggattttggtcaaccttaatgaaatatggatggttttttattatgccctatacatatttatttagacatgttggtaaaataaatgatgtgaattttactattcaagtaggactttcaatttttttttacttttatttttttgagacagggtctggctctgttgcccacgctagagtggcagtgkcgtgttcttggcttactgcaacctctacttcctgggctcaagcctcccacctcagcctcccaagtagctgggactgcaggtgtgtgctactgcacctgactaatttttgtatttttttgtagaaacagggttttgccatgttgcccagggtgggcttgaactcctgggctcaagtgatctggccacctcagtgtcccaaagtgctggggttatagatgtgagcagccatgctaggctagtttttttcataacactgtttatctaataatagtttttaccttcattatgggcccttcaaatgcttgcgatgggggaaaayattacaatttaaaactgtaacgtagattttaaatatttcagtagtatttctgacgttaattaaatgaaatctgagacctactcctgttttctgagccatgctttctaacttctgttaacttcagaagtttgtgaatcacatttacctgtgtctgtttcagttataaaccggtggaccataagcttatttggctacccttacgggaggcatttgaggaactctttgctcagacattttccaagaaacaaaactttacgttcttggggcacattcagacctgttacagacagaaacggtggcatgatctcctgagactaatgcagcatgtacacaagtctgctgttaacaaggatggaaaagacagtgaaactggtaaggatgtgacccaggctgccatgggggagggcatggggctgggctttagttaacatattagttttggggaagagtaaagcgatacaaattggagctttctaggactttggcagaagtgactaattgtgaagtattgtgccccattattcacgtatttccacaaaaacagttgactggtaatgctgatgtgcaagtactatttagtggtcagtaaggcacatttcctcagaaaaagcttatttctaaggagctagattctatagccaagaggcttttgctggcttagtttacttctgtgtggttccttatctgtaaagcaggaataaaaataactagtccagagggttgttgtgagggataaatgaggcagttaatacatatatattcatacatgtgggctaattagtgtcatgtctggcattttgttagcattatacaagtttttagacttagtgttttgtgtaagatgcttaatttttgtgtgttttgttaattgtatttgtttgtttagaagttgtrtatattacaattcaaaatgtgtgctgaattcttgtctttcttttttagggttactcataaaagagaaatgggaagcatttggtcttagactcaaccatgcccaacaacagatgaaaatgactgaaaataccttattgttcgcatttgtagaggtatttctgtttttgttatttagcttatgggaacgttgattttatgcaaaacaatgtttcaggcaggttactattttgtattgtcttaatgaaataatgattttgggggaagattttgaaaagtgtccttcatggtaattatggcaattataagatcttaatgagcaccatcattatttaaataaaaattttaaaagtacaaattgataaattataattgtatatattcatggggtacaaaagggtgttatgatttatgaatacggtatggaataactaaagctagtgaatattcatcatctcaaataccgttttttgtagtgagaacatttgaaatgtactgccttagtaattttgaaatgtrcaagacattattatttatggcatggtcgccatgctatgcaatatatatctcaaagggaagaaagcttatttttttctgtctaattaaggctttgtactttcttttctttttttttgagacagagtctcactctgtcccccaggctggagtgcagtggcacagtctcggctcactgcaagctctgcctcctgggttcacgccattctcctgcctcagcctcctgagtagctgggactacaggtgcatgccaccaygcccggctaattttttgtttttgtatttttagtagagacggggtttcaccgtgttagccaggatgatcttgatctcctgacctcgtgatctgccagccttggcctcccaaagtgctgagattacaggcgtgagccaccgcgcctggccaaggctttgtactttcattactctgtactccctaactctccagcctctgctaactaccattctgctggctgcttctttgagttccattgttttagatttcacatataagtgagaacatgcaatacttgtctttctgtgcctggcttgtttcacttagcataatattctctggttctatttatgtcatagcaaatgacaaaatttatttcttttttcaagccaaataagattccataggattccattgtttgtatatatgtatatatacaacattttctttattcatctgttgatggagacataggttgattctatatcttgactattgtgcatagtggtgcaatgaacaggggattgcagacatcccttcgacatattgttttcagatttttttkgggaatacctggaagtgagattgctggatctattactatttttaaagatgcaattgatgacagctagtgaactctggattctttctctcaccatgtgtgtctcyggggaaagagtgtgtggatgtgagagagggatttggacccgttcacttcwttgccccaattttaatcccagggcatggacatctctactgtttgctgtcctgtgaccctgtaggaaggatcaacttggttaaatatttgtggcttggtcatttaaaaaaagtttgtttctgtgacagtccttagatgaagccctagaggaagcaggagtcttacttggtgatgttttagtaacagagaaggtctactcaaccatacattatgggtgtggaaaatttggtcatcagaattattattattatttttttttgagacagagtctgactctgtcacccaggctggagtgcggtggygcaatcttggctcactgcaacctctgcctcctgggttgaagcaattctcctgcctcagcctctggagtagctgggattacaggtgtgtgccaccacgcccagctaatttttgtatttttagtagagacggggttttgccatgttggccaggctggtgttgaactcctgacctcaggtgagccacccaccttggccttccagagtgctgcgattacaggcatgagccattgccccgggccccagaactattctttttttgtttttgagacggagttttgcttttgtcacccaggctggagtgcaatggcaggatctcagctcactgcaacctccgcctcccaggttcaagcgattctcctgcctcagcctcctgagtagctgggattaagggtgcgtgccaccacgcccggctattttttgtatttttagtagagatggggtttcactatgttggtcaggctggtgtcgaactcctgacctccagtgatccgcccacctcagcctcccaaagtgctggggttacagacatgagccaccacacccagcccagaattattcttaataggattatttctaaaaccaattaaatctaggaaatagaatttgaagagataacaccagtgtactaaagccaagggatgttgcattttaatcttcagtaggtgtgaaaggcagtgtatgacaatcactaaacactctgggatttagacatttgtctaatcttggtatagcctgaccctatatttattttgagttttaatagtcacttgggtgcctttaaagacctgactacaatgtaagctatttacctgaccatccacataatgagaggatttagtttattgcatctctctgttaggctcaaagatattcccttgacctttttggacatttaaaaaattaacttggccttaactctgcctatctgctgtcagccagttaaagtataggcccatcaagtaggaaagatttsccccgcctctatttctaaccctgcttgcataactgttcttggcaagtgtgcctttatttgacacattgttaacattttattttatctttttctagggtacattagctcaggctgtaaagaaaggagagtggatcttgttggatgagattaacttggctgctccagaaatactagaatgtctgagtggtttgcttgaaggatcttctggatccctggtgttgctggatcgaggagacacaggtagcacttgaatcccttgggatttgacttggtgtcaagccctgtggccactttagagtgagattttttkttgttgttgttagaaggatgacatgggcctcccaatggaatttgttcattctttagatattaattttctgcaaagtgcattaaagtgttgggtggtatggggaatgcaaagaagaataatataatttgacaaggtgtttgagttgtggataatagacacacttataaaataacaggtgaatggttgataaaagataaataacagtgaataaacataccgcaaaagactgcagtataagattagattgaatacataggtctggaaagttatttcagtggggtttcagaaaagacaaggatggtgtgagcagccagcatcaggctggctgggcctggggttctgtggaattagataatcatacctttgttgagaatttgtaattttctcttaacagagccactggttcggcatcctgacttccgtttatttgcctgtatgaatccagcaactgatgtaggcaaaagaaatctcccaccaggaataagaaacaggtgagggtttggttcttggagactttccttttttgcaacaggttcttgctctgttgcccaggttggagtgcagtggcgtgatcttggctcactgcaagtccccggttcaagcagtcctcccacctcccacctcccacctcagaatcctgaatagccgggattatgggtgcatgccaccacacccagctatttttttattttttttctgagacagagtcttgctctgttgcccaggctggagtgcagtggtgtgattttggctcaccacaacctccacctcctgggttcaagcgattctcctgcctcagcctcctgagtagctgggactacaggtgcatgctaccatgactggctgatttctctatttttttttagtagacactgggtttcactatgttggccaggctggtcttgaactcctgaccttgtgatctgcctgcctcagcctcccaaagtgctgggattacaggtgtgagccagtgcgcccggcctcaagtttttgtatttttagcagacrtgggatttcgccatgttgcctaggctggtctctcactgggctcaagagatctgcctgcctcgacctcccacagtgctgggattaccaagacttcgtttttagattctctttatttatagattggtaatattaatgtaaccggactttagagcaatgcttgaaattgccgctgatagaggaatctttattaccttatttgtcatattcctctgctctctgtaggtggtaggcatatgggaatcttcagaacactggagaatttttccctttgtgttagtatgacagtggatattgttgaaaataaaaatctttccttcctcaggtaatcttttggctattagaaaaatttcataacacgatataacaggaaaacatataccagtatacgcatattttaggaacacagtcctctttgggtgaggctaatgatttgaaaaggcctttaaagtttcttttatttttcgccactaagcactgacatgaacaaggtacttagttgttggtgttttatgtatgtaacatttgggaaaaaataaattaaatgaccagatttattgttggtaaccgtttacttcattttgaattttaaaatagtaactttattagatcctctctcttcattataaagcaataaaagcttgttagggaagctttagaaactacattaaagtagttgttttctcttcaaccattttgtctttgatgatgagggggcttgttttttattgcacttatttttttaaataggcgattatgataaaaaacacttgaaaatgaggataattaattcttatttttgtatcttttttttttttttgagatggagtctccctctgtcgcccaggctggagtgcagtggcgcaacctcggctcacagcaggctctgcctcctgggttcacgccattctcctgcctcagcctccctattagctgggactacaggcacccgccracacacctggctaattcttgtatttttagtagagacggggtttcaccatgttagccaggatggtctccatctcctgacctcgtgatccaccggcctcggcctcccaaagtgctgggattacaggcgtgagccaccgcacccggcttttgtatctttttcttcttgtaaggactatacgtagaagacttattgcatagaagaagcaataatggtatatttttggtaatggttacattatcctttaattatgctaagtttctatatcaggttgaaagacattttatactacaagcagttaaaatgagctgacatagcttcttctgtttcatgtttttctattgtcaacatagttatattaacttcctaaaaagtgtttattatgtrttgttttacaggttcacagaactttatgtagaagaattagaaagcaaagaagacttacaggttcttattgtagattatctgaaaggattgagtgtgaacaagaatacagtgcaaggaatcataaagtaggttcccttttgtatgtctttataagctctttctctgaacatgaaaatgtgctactcgtgcacacacacaaatatgtattcttttttacttctaacttgagaaaactgatggcagrattattatttagattctcttgtaaagttggaacctgatatgaactcctttaggtttttctaaggaaattacatagaaagctatgaatcattacctatgagaagatataaaccatcagataatgctctcctgattacctctatattcatagctgagggtttgaattcttggagatgtacatggcttgcgttttgaatctgtcttgaagaaggttgcttttctatttgcaatatttatactagctatgtgggmtgtaaggagaaaagggttaatataattgattgtgtcaggtttggaattaatggaagcttagcctaataaataatagagtagttacgtggcttgtgctttaatttgagactgttattcctgttttttgtatgccatatggacaacatgcaatcttttgtgtcagacaacctcaattctagtattggttctatgagaaactaattgtgtcattctgggccagtaacttaattgtgtgttctccagaaagaaatmcaacatgtaaaaggattgaaatagggtgatattaatgttttactgtgtgtttgtgtattttttctcttccttaatacaaatacttattgagtgccctggtgctgtggttatagctatgagtaaggcagacaaaaawcctggttcttctcattgagctttaattctagaggagtcaggtactgtaattttaggttgtgataagtgaaaacatataaagctgagtagggtgtaagaaaatgaagacttggagttctatttttttttttttttttttwggatacaggagctttgctttgttgtgcaggctggtcttaaacccctggcctcaagtgatacgccagccttagcctcccaaagtgctggaattacagggwtgagctacagcacctggtcctgaagtcctgtattaaatagattagtcaacaaggcatgtgtttagaatgcttcagaatggtttaccacaacacaccctaaattggaatactttttggtagccaagaatatttggacaaaagtgtaaatacgtatagttaagattccagatgctaaaggtaaacttttataagtgccttattttatctaaagaggtagataaaggataaaattaggcacttataaaatactgatagtacaagtagtatatattccatatattaaaaactcagttccaaaacataggttctttctacacaaaaatattttgaaatattttgaaaatattttgaaaatatttgtgtatttttgctatctacaaaaatattttgttaggtagcaaagaggcaagataaagctcatttgggcaggaacttgaatttcatctgtgatgcatgcatacttggtttcatttgatcttgtggtgctaattgatcatgaatttcacaaagtgcaagaccttcatgtttcagtctgaaacttttcccatcctgtcatcatctggacttctaaagtgtggtagtgacaatagtaatggccatcgtatcctcctgctttttaacgttttgtcagtactaattatagccatattcgtagcctttcaaaacaccatgcgttgtttgccatgtctttgttcatccccattttwgattgcataggaactttctttgtcccttaagcttgaacagactctggaacacagaagcttctcacctctctttatcagtacctttttgctagaggaattgcacattgcacttcccagtttccccaaggaaatagataggtgttcattttttattttgaaagatatctctgagtatgtgaaaagtaggtttaaaagagactaagatattttgatgcatgccccaggaagttgtgtgcatgatcatttctgatctaaaaaatgtcctttgggttttctgtagagaattgataatactggatacttattagtaaataaaattgcctgacctttattctatttgtagcttctacacagctttgcggaaagagtctgggaccaaactggtggatggcactggccatagacctcactacagccttcggactctgtgccgggccctgcgatttgcagcctccaatccatgtggcaacattcagcgctcactctatgaggtctttctgaagtctctttgactggatatgagcttaatggatgggttcatgggaaggaaggaatagggatgcatatgccaggttgcctgtgctttccagttagtcagatcagcccataatacctcttaccagatttaccttgcccttttaaattaaatattttactttttattttaaaatttttatttttaattatacatagagacagggtgtcactgtgttcccactctggtctcgaactcctgggctcaagctgtcctcctgccttggcctcccaaagtgctgagattacaggcatgaaccaccgtgcctggcctacccttccctttatctaccaccttactatatttaaaagttgggaagcagcatcacccaagaggttaaattttgttctggaaataagtttggttgtattgcagaaggttatttagcattatgcatatttgtcttttctttctagggtttttgtttgggtttcttaacacagcttgacagggcatcacacccaatagttcagaagctcatctgtcaacacattgtccctggcaatgtcaagagtctgctgaagcaggtatgttcttttgttatttttgacttgttacacttgaaaggctgaattaccaaattttcagctgtttggttttttttttttcacataactttttaattataaaggtaatctgttgcaaaaagtttaaacattacagaaacatatgtttagatggtgaaagtttccaataagcgtgctctttggagatttaaatactgtggataatctttccagataaattgtataatgtatatattttattttcttacatatccaaattttgatatgtatatgttgatttattgaggtaaattgtaaaattgtaaaaaattgtaatatgcgtttaatgtaagtgggactgtcttataagaatattgtttttttgttttgttttgttttgtttttttttgsagatagagtcttgctctgttgcccaggctggaatgcagtagtgtaatctcagctcacggcattctccccttccgtggctgaagtgattctcctgtctcagcctcccgagtagctgggattacaagcgcatgccaccatgcccagctaatatttgtaattttagtagggactgggttccatcatgttggccaggctggtctcgaactcctgacctcatgatccgtccacctcggcctcccaaagtgctgggattacaggcgtgagtcaccgtgcccggcccataagaatattctgtagctttcctttttaacctatctgaatcttggatatatttttgtttttgtaccagagwtcattktgacatgccttctaagggccacatagcatttcactggatgggtacaccatagtttcactatttgcatagtttaactacacagttaggtataatctataccttctgattgatggttgggtcttttttgaggaggcagtagtgggggcactgttagaaacaatagccgttttggatttggcaggaaattacagaatagcatgggactgaaagaggctgagagaaacttgctcacaatcaacatgtaaattggcttgtttacttgttgattgcttattcattaggaagagagagcccttgggacttggagtttctttggactcagccttttaaaaaatcgtacaagtaacacatgcgtaaatactttcsgtaaattgtaaaaacattgagtaaagactcaggtttgcttttaccattattgtaatcaaataccagtctcttccagttggtctttttgtgtgtgtatgcctcagggtgtgatagaaacttaaaaagatccttcctcccctccccctattgcttctcaactcaactgaggaggccttaaaagcagggcctagacgtgtagcttgaaatctggggaccaaatgctctagaagagtacttttccatagttatagatttgaccaccatttaaccatttttttacttataaaaatgggaatttgtataatcgaaactaataacttaaaccatatctcagcaaagtgatgccrtcatccacaatattatccttaatgggctagttgctctgaaaagtcaggtttacttttaatgtcttctaggcaatccagagtataatagtgcaaaacctccttccttactacaacactggccctttttcggggaacatggtttatatgaaattcatgtttttgataaaaataattggagtgggcattttgatatgtgagagaagagaactggtacataaaccttctgggaatttgttttgattcagcttttttccaaacccacctactccacttcagttttaaaaccaatatataacaccattttgttctcattcctcataattttatgttcatatttcatccagytttaatgttgaaagtatgcagaacaagacagcttgttcaacaagtggctgttttcctactttatgcccttctctgaaagaatgtacaactgtgggttattccttgaacttctgtgtctttcagcctattccagagccaaaaggaggtcggcttatccaggttgaaggctactggattgyggtgggagacaaggagcctacaatagatgagacgtacattctgacatcttctgtgaagctgaacctgagagatatagtccgagttgtctctgcagggtgtgtgggcttttttctcgctgcccygaacttgatacaggcataggcattgatgacattttggtctaacttccttaactttcaaagagctttattcttattcattggccaactgaacaattacttacaaaagtcagtactataactttttcctggtagaaaactttgtttctagttgtgcaactttggagggagcactatggatgcagatgattttatctatctttaaagttatcttttkttwttttgctgataaataccacagattattcagtaaatggctaaaagttctacttacagtttcttacaaatgttgccagcatagttggaattgctttccttagtattttttgaggaataatgtttacaaagatacttctcagtgtataggaataaaaatgttcttctgcttcttgcattttccagaaatgtaaaaaggggaaaaaaaaggaaaaaaaaatgctcttttaatgatgctgttaaatgatgtygtcattcttttaaaaaaaaaaaaccaaaataatacttggccaggtgcagtggctcatgcctgtaatcccagcactgtgggaggccaaggcggtcggatcacttgagcccagggttttgagaacagcctgggcaacacggcaagactctgtctctgcaaaaaatacaaaatttagctgggcttggtggtgcatgtctgtagtcccagctactcaagaggctgaggtgggaggatcacttgagcctgggaggtcgaggctgcagtgagctatgattgcaccaccatacttcagcctgggcaacagagtgaaaccctttgtcaaacaaaacaaaccaatactcagttctggtttctcagctttgtaattttttgttgttttaagttgcttaattggctaatcttttacagaacctatccagtgctgattcagggagagacatcagttggtaaaacaagcctgatccagtggctggctgcagctactggcaaccactgtgtgcgtattaataatcacgaacacacggatattcaggagtacattggttgttacacgtctgactcctcagggaagcttgtctttaaggaaggtagggttaagattccattccatggacataggtgtttattctttcacacacatttccttaagtaatattcttcatcctttccaattgaggcacatggacctttgctgtaacagccggcttttcttgatgcctgagctaagatagttaaggggtgatgcataaggtgctggctttctttaggttctgctaatcttgctggctgtatacaggactagggccaattttcaagaggggaattgaactgctgctttattttctaggaattcagagaatggggttagtgttagccaaaaggaagttgggaatagtcaacagaatgtggtgatttaaatgaaattagactgcaggggaaagattacacaagaaatatgaggtattttcagccttggcttcttttctgtggggaaaaaagggactattttaattgaaaattgttcctccttgatctgcagtgtcataatttgttttgaggcaagactagctacagaaagtaatttgctttgaaatttgatgataacctaggatttgttgatttgtacataatgcattttaaaactttgtactgatttatacactagttcttgctgtttgtttcttcctaggtgttcttattgatgcyatgagaaaaggctattggattattttagatgaattaaatttggcccctactgatgtgttagaggcgctgaataggctgttggatgataaccgtgaattgctagtaacagaaacacaggaagttgttaaagcacaccctcggtttatgctttttgccacccaaaatcccccaggactttatggaggcagaaaggtatgtagcatttgtctccttccttcaatttgttaacacatcagatagtagatttttcgtagtaagaatgaaatgtttttacttctcctttaatattttatggtgaatgtcagagcctccatattggaaattaaaaggcaccttttactgmattcttcctgtgctttgtctaggtcctttctagagccttcaggaatcggtttgtggaattgcactttgatgagttacctagctccgagttggaaacaatcttgcacaagcggtgtagtttgccaccctcctattgcagcaagttggttaaagtcatgctggatcttcaggtacttagtttcaaatggaatgtattgattatacttggtgatcaaaatttcatggcttcttttgttagaaaaaagaatctgtctgttgatgtatttttccaagtagagatttttttttattttttattgtttttaatttttttattatttattttttgcaagacacagtctcactctactctcctggctggagtgtagtggcacaatcatagctcattgcagccttgacctcctgggctcaggtgatcctcccatctctgactactcactccttagtagctgggaccacagatgtgcaccgtcatgcccggctacatttttttttttgtagagacaaggtttygccatgttgccccggctggtctcgaactcctgggctcaagggatccacccaccttgatctcccaaagttttgggattataggtgtgaaccacagttcttggccttcaagtagaggtcttttaaatgcttcccaataatatatatttttagtttttttttttaatcaatcaacaattttacatcattaaaatttttctgatatttacatatgaggattttgtatttgtgtataatattgaagcattttgtttagaatgtaatttggcttagggaaaactggtttttggtttttaaatggatatagtccttgaatggacataattaaagagatccattctttgtggctccccctagtcaactgcaaagctacagctgatctttaaaaattccatttatcttatggggttaaaagttttctttatcagaaagtatacattgtcaaacttctttttagaaagctaataataatgaagactcctaccattatggttccacattgtttcactaatcttcctgcatctttgccaccatttgcattactttttgtttgttttttgagacagagcctcactctgtcgccaggctggagtgcagtggcgctatctcagctcactgcaacctccgcctcccgggttcaagcaattcccctgcctcagcctcctgagtagctgcgactataggcgtgcaccaccaggcttggctaattttttgtctttttagtagagacggggtttcaccatattgaccaggatggtctcgatctcctgaccttgtgatccgcccgccttggcctcccaaagtgctgggattacaggtgtgagccactgcgcccatttgcattactattaatcatcttttttctatgtggcataagaaatgtggaattccattttatgttcttaatttaaacatgaatttgaacatttttcctcagaatattacaagttattttcattaaaaaattaatctttttttttttttttttttttgagacggagtctcgctttgtcgcccaggctggagtgcagtggcgcagtctcggctcactgcaagctccccctcccgggttcatgcggttctcctccctcagcctctggagtagctgggactacaggcacccgccaccacgcccggctaattttttgtatttttagtagagacggggtttcaccatgttagccaggatggtctcgatttcctgaccttgtgatccgcccgccttggccttccaaagtgctgggattacaggcttgagccaccacgcccggccaaaaaattaatcttattcagtggaatgaaatcatttaaatgggagcataaatttgttatgaattttatatgcattgtactaaaaacttaccatgcattgcagctgatgccccttttcatttgttttgatacttcaacagtcctatcgcagaagttcttcagtgtttgctggaaagcagggcttcatcacccttcgtgatctgttccgatgggctgaaagatacagattggctgagccgaccgagaaggagtatgactggctacagcatttagccaatgatggtgtgttttcaatcaaatgctctcaatatatagttatgttaaatgtcaaactttttattaaaacaaatcttgcctcaaattgtgattgatacatacatttgactaggtattccagagagcctgtttccctccagttctaacagcttttgtaagtgatcttattcctgcaggcctccatgctaataaggactggttgctaaggttttcttactctttgcttcaggtagccacatgtgggagtcaggatatggacatagcctctttgggagttaggcaaatggttgatggtagctttgtgggccatttttctgcagtgtcaccacaggtagtctggctagtgctttacagacatacagaaagctgatttgtcagaaaacatcascattctgagagaaaaaaattatataacctgagactcaggttttgttgttttcctttaatgcatgggaaaaatttgttactgtttgtgataggatacacagtgttttggaatcttctgatttgaaaagtgctgatgataggatacaaagtgttttggaatcttctgatttgaaaagtgctgatgattgattaatgggctagttaataagtaagaagagtatgtaaaactagtacaagagattttttctctacttgtaaagaatatttacatagaggaatacttttttaaaaactttttttctttctttctttctttctttctttytttctttytttttttttttttttttttttgagatagagtctccctctgtagcccaggctggagtgcagtggcacgatctcagctcactgtaacctctgcctcccgggtctgggttctggttcaagcagttctcctgcctcagcctcccaagtagctgggattacaggcaagcgccaccatgcctggctaatttttgtattttttgtagagatggtgtttcccatgttggccaggctggtcttaaactcctgaccttgtgatctgcccacctcagcctcccaaagtgctgggattacaagcatgagccaccatgcccggcaaacttttttagtgaggtgtaacaaacagtaaagcattttcccatgtaaagtatcacctagaccaagatttagaatatttccaataactcagtaggtctcttgacagtggaggtaatcactaccctgactactgtcactactaattgacttctgtctgattatcactactaatctgattgaacagcattttgcctgtccttgagtttcacctagctgacaccatgcagtatgtactttttgggttctgggtttttcactaaacctgatgtgagattcagtcatgccattatgtgtatcaggacttcattcttttttttctttttctttttatgtggtaatccactgtatgacgacaccatagtttgtttatccattctcttggttatggacatctggatcattttaattttttagttatgaacaaagcttctctgaacattcctgcwtatgtctttcgacacacacatgttcattggtgtttggggatactagaagtcatattgctgaggcatagggcaggtatatggttaattgtaataggctgtcctagttcttcagatttctacctcaccagccgcgtatgagagtttctrttgtttcatattctccatatcccttggtgttcccggtagacacttgatgattcctctcctccttttcctcctcctcctcccaggttatatgcttctggcaggtcgagtcaggaagcaggaggaaattgatgtgattcaagaagtccttgagaaacatttcaagaaaaaattgtgtcctcaatctcttttctccaaagaaaatgttctaaaattgctgggtgagtaggccaaaatccctagaggaatatgatttgagttgtactcattagaatctaaatatttatttttccttggataggtaaattgtctactcagatatccacattggagtgtaactttggccayatcgtgtggactgagggcatgcggagactcgcgatgctagtgggaagggcattggaatttggtgaacctgtgctgctggttggagacactgggtaaagatctgtgacagtgactcatgagggttcatttcaattccataggattacttgagttatcactgaagaactcatgaaagtattaatccccccttctttcctccttcctcttttttcttttttttttttttttttaagaagagactaaragtgggtcgggggctgggggagggatagcattaggagaaatacctaatgtaaatcacgagttgaggggtgcagcaaaccaacatggcacatgtatacctatgtaataagcctgcacattctgcacatgtaccctaaaaaaaaaaaaaagaaactaagatctgttactgtttagtttcctctaccttcagactaggttctttgttaatggaaaataatggctttattattattatttttggagatggggtctcactctgttgtccaggctggagtgcagtggtgcgatacggctcactgcagccttgactttctggactcaagtgatcctcctggctcagcctcccaggtagctgggactgcaggcatgcaccaccacacttggctaatttttaaatttttttgtaaagtcagagtctcarctggttgtggtggttcatgcctgtaatcccagaactttgggaggctgaggcaggcggatcacttgagctcaggagttcgagaccagcctgggcaacatggcaaaaccccgtctctactaaaaatacaaaaattagctggttgtgttggcatctgcctgtagtcctagctagtcaggaggttgaggcagaagaatcgcttgagcctgggaggcagagattgcactgagctgatatcgtgccattgcactccagcctrggcaacaggagtgaagccctgactaaaaaaaagatggagtctcactatgttgtccagactggtcttgaactcctgggcccaagtgatcctcctgccttggcctcccaaagtgttgggattacaggcatgagccacactgtacctggcaagaatgattttttgcttcattgcattgagggcagtttttgtctatttagttcttttaaacagtgagattcattctatacgtgtgtagagaagagataaactagtgtctcttgaaagtctgtcaagtctataaggattagatttcttttccctctcttggtggtggtttttttttkttttttttttttttttttaagaaggcattccgctcttgttacccaggctggactgcaatggcgtgatctcggctcaccacaacctccgcctcccaggttcaagtgattctcctgcctcagcctcccaaagtgctagggttacaggcgtgaggcactgcgcccagctggtgattgttgatagaactaggttggagtttgtgcagtacataccttctggataagaatatgggagagtgcagtcgtgtagaggggtgccatgagcctggggttgaggttccacattggccagcactgtttactgctgcagtgagactcccacagtggttcttctcttttgctgagggggggtgtttatggatgtgtatttgaaacacatgccttgttaatcagttgcacatctctaacaggtgtgggaaaactactatctgtcaggtatttgcagccttggcaaatcagaaattatactctgtcagctgccacttacacatggagacatcagacttcctgggtggcctgcggccagtgagacaaaagccaaacgacaaggtttgtccagcagcaagtgttcctgttatttyaaaaaactgcagttrgctgtgcatgagttagtggtggggtttctggagctgggttctggtttggttaaatgtgcatatctgcagattttctctggtctacaagggccttcacaagcattctggtgtgcaagttctatctcctgttctcagattcttactttcctcagaatgcctacttcacccctggaaacaccagccagctgcatgtatattgtctgtggagccacctgccctttaattttccccactttttcaaattataggaagaaattgacacatcaagactctttgagtggcatgatgggcctctggttcaggccatgaaggaggacggctttttcctcttggatgagatctcattggccgatgactctgtcttggaaagactcaacaggtacgtgcctgagaggtttgccttgtgtttgayatttttgttggtgtgatttttttttttctccctgagacagtgttctcactctgtcaccccaggctgcagtgccgtgtcatgatcatagttcactgtagcctcaaacttctgggctcaggtgattgatgtgatttttatagatatttaatcttgtgcacagtaatacttctcataggtgcaccttagtaaatgcttgaaattattgatgtattaccatgtcttttggctttagcattcagtgtttcctaaatttctaggttttttttgctatcaataatcagaacaatgggatcgtggaatggtagggctaaaacatgagccaaagtcaaaactattttttaaagtgaattatatccctactctcttaatattttgaaagaactgtagtcagaatcctagacccatggctataagccatcatcagacctcagaccaatatgaatcttgatgtagtaacacccattttttcttttgaggtatagtttacatatcataaaatgtatawttcagtgagttttagtaagtttataatcccatgatgggttcttcttgcaagctatatgcatagaactgagtcactgagttagtggtattgcagtagagaaataatttagtagttgcagagctagccaagtggaaggacaggagtttattactcaaatcagcttccctaaaaatttggaagataggggtttgtttgtttatttttttagacacagtcttgctctttatcccaggctggagtgcagtggtgtgattttagctcactgcaacctcagccttccaagtttgattgttgtgcctcagcttcttgagtagctgggctacacatgtgtgccatcaggcccagctaatttttgcatttttagtagagatggggttttgccatgttggctaggctggtcttgaactcctgacctcaggtgatcygcccaccttggcctcccaaagtgctaggattatagatgtgagccactgcacccgkcctggaggctagggtttttttgtttgttttttgagacagagtctacttctgtcacccargctggagtgcagcgatgcgatcttggcccactgcaacctctgcctcctgggttcaagccattcttttcattcagcctcctgtgtagctgggactacaggcatgtgtcaccactcccagctaatttttgtatttttagtaaagatggggtttcaccatgttggccaggctggtctcgaactcctgacctcaagtgatcctcctgcctctgcctcccaaagtgctgggattacaggcgtgagccactgtgcccggccgaggctagggtcagaggcctagagaatggggaatgctgttgggacagggttgaaatcacaggaagttgagctatctttttgccctaaataagttcatgggatcataagacctgttgagccacttcttggtatgggtttccattccaggtggtgctagccgttttatcagaatcagggtctgaaaagtaccttaaacactaatcttaggttttataatagagatgttatcttataggagcaattgggaaggttatgaatctcgtgacctctggctgtgtcctgagccgtaattttaaccttttggttagttttatgaaggaggggttagttttgggggggcgctattacttttcttttaaagttgaactgtaaactaaatttctcccatagtttacttggcctatacccaggaatgaacaagggcagcttggaggctagaagaaagatggagtcagttaggacaggtttttgtgtttttttttactgtcataactttttgttagacttttttctcactcataatttttgcaaaggtggtttcaagctttgcaaccatcacaatttagtttttgtgtttgttttgttttgagacagcatcctgctgtattgcccaggctggagtttagtggtacagtctcagctcactgcagcttctgcctctcgggttcaagtgattcttgtgcctcagcctcccgagtagctgggattacaggcgtgagccagcacagtctgctaatttttgtatttttagtagagatcttggccaggttggtctccaactcctggcctcaagtgatctccccaccttggccttccaaagtgctgggattacaggcgagagtcactgcgcccggcctacaatccagttttacaacatttccatcattcaatagaatcctttgtgtrcattacactaaatttctgattaatctcttttttgtctctgcagatttcttttctgggtatttcagataaaagttctcttctcttactttgcattgatgttttgaggttcattcctatttcagcacgtattattagtttgttcctttttgtcccgaatagtattggatataccacattttgtttatccattcaccagtcaatgatatttgagttctttctagtagttggctattatgataatgcatgcaatttatttgttttcttgtaagttattcatttttaagaccaatgccttaatagtttataagttgaaaagtttttttttcttgatcagaaatagccattattacacagaaattgggatagtgagtcattttaaaatttgtgataggaaaccattaactaaagtaaaaattcagtagaaagaagataacttttttttttcttttaaagagcattgaagattgtaaaacagaaagattgyataagcccttttcactgttcttcaatttttcttktagtgtccttgaagtagaaaagtctctggtattagctgaaaaaggcagtccagaggacaaggatagtgaaatagagctgttgactgctgggaaaaaatttcgtattctagcaaccatgaaccctgggggtgactttggaaaaaaggaggtaaaactttactgatgcacattttctttctaggttttgacctcagcttactggtactcgtaaatatagtatgtaataatggatttggaattttatgttaggtaaaaagtgggtaaaaagtgtaaaaactcaaaaatattttaaaataattattgggttagaaaaaaattctgacacaaatatctccttatttgatatctcactttgtgtatgtgcctgaaatgtcattgttacagtcactttgcctagccctttacatatgttaccctgagaaagctcacaggagctctgcaagaaagttattattgtagttttatggatgagaaaagttggatctgaaatttaagtttaacctctgtttttacagtccactttcttaaacacacctctgctttcatgggtggttttaaagtgacaaaaaagtcacaaccaggaaccctcttctggtttgtagatggagcttatttgttctcgtaagggttatgtgtgtcactttctgactgctgataaagtaaagggcagagggtagttcctatgttcagagggttgtgttcagatatatttgggaaccaacaaccttgttggtttccagctcaagaaacctttcagtggagaagtcagcactatgtgttggatcccagtctgttaaagttaggaagagagtgatgtaacaggtcagggatgatgagaagaaacagaggggttgatcttaaataagacaattaagagtgttggtaatttggtgggtagctgaaatgatatattgggcctaggtttcctcagtatcataagatgaaaattgtctctatgcttcaagatatgctctgaagagagggaataaaatacattgcattcaaaatataaaaactggcttctgggcaagtagaaatgccacagagaggtctgatttcaagtttgtgtatattagcttggctgtcagattatcttatcttgttttcctcaagtcaatgcttgctgacttttacccaagggaaagttactttttagtttcgcatgcctaacaagcagagcaaggtaggatgctggacaccrgaggtactggttgtctatgatactgatgaggtacacacacgtatgctttattcctgggcctctgtggtagaccagatagatgatcatcaagtaaaaggaaagtaattacaaagtaatcagacaaaccaataatgatgcttatgtggcattgcaaacatttgtgaatagtgtcaactgaccttgtggtgggaaaaggaatctacaggggcaaaggccctaagactggagtggctaaacaatttcttgttattcaagaggtagaatatatactttttaaaatcacactctcattgagctatgtaaaagaagtttcttcctcctacatcagactgcccttctctgtgggaagacaggtgtttattttctctgaagtattatttaggtacctgatgcaaagtaaaggtaaagtaaaaggaagaatctttgcctgaggggaagagttcagatttgactgggactggctggaatcctgcttccaccacttagtctgtaaggcctctggaccacgtctattaagaaagtgatgatgatactggaaggtgtcatggaatataaggagtcaagacaaagtacatcttcaattaattatatctgatagtagaaataatttttaaaagtgtgtagtatttgctggacttaacagctaacaacattctttcaagacttgttttccagctttccttacagttttaaaaattcacattgaagttttgtgtttcttatagctgtctcctgccttaagaaaccggtttacagaaatatggtgccctcaaagcacaagccgtgaagatttaattcagatcatcartcataatcttcgtccaggattgtgtctgggcagaatagatcctaaaggtgagagtttgcaggtggtgatggtagtattgggtcatagaagggtttgtgttgggagttgagggatctcttacaggacatcagccctgtgtgtatatggtgtgttataagaagaaaggagataggtaaatgaaacaaagtagacaaggagaatattactattctgttaccttctgttaaagtgtcccatcttcatattttcatcattaccacttgacacaatggctgtagaatttcagctgcatttctttagttgtcatcaatgaacatgttattctttcactttatttaaaaatttttttggctaggtgtggtggttcacacctgtaatcccagcactttgggaggccaaggtgggcggatcacttgaggtcaggagttcgagagcagcctggccaacatggcgaaaacccatctctactaaaaatacaaaaattagctgggtgtggtggtgggcacctgtaatcccagctacttgggaggctgaggcaggagaatcgcttgaacctgggaagtggaggttgcagtgatccaagatcgcgccattgcactccagcctgggcagcagagccagactccatctcaaaaaaaaaaaaaaaaaattaggctgggattgcaccattgtactccagcctgggcgacagactccatctcaaaattaattaattaattaaataatttttattatgaaaaatctcaggcacaaggaaaatagattagtatccataatctagaattaacaatttaaaatatccaataaaaggcaacactcctaactatatggttctttttgtttttgaagcctgtattggtttgatgtatgcatatttatcttagacattcaatggaataaatttagaacccagatctggttccaagactaaatacatagttttttggatcattttttatattcttaaagaatataaaaaaaagatatctgcttcttggaaattggaattcatggctatgtttcactttttaaaggtgccctaccacacattttctaaaatgagtagagtagctgtagagagcatctaatctgcatggaacccattctcacctgtggtgttttagggacgactgattctttagtcatctgagcaaagacttctttttaggaatggcccacggtgaactgccacatttataggtacgcacactgctgcttgaatggccagaattccccatgccttgttgaacttccttttttctctacagtctctaccaatatcacagtcacccagtggcataagaattgactaagcctgtagttagttgtcagactcatttggagggcttgttgaagtgcagcttacagggccccacacccagtgtttcttattcagcaggggcagagaatttgtctgyctaacaaagcctcaggtgatgccactaatactggtctaaggcccaggctcagagcctcagaactcagaacccatgactcttgtgtgctgtttgcagcagcacatttactgtgagaattccagtaaaagaagaagtataatacagacttttctggggggttgtggggagacaaggtctctgtcacccaggctggagtgcagtggtggaatcacggctcacagcggccttgacctcctgggcccaggtgattctcctgtctcagtctcccaaatacttggcactgtaggcatgcactaccacgccaggctaatttttgtgtttttttttgagagatggggtttcaccatgttgctcaggctagtctggaactcctgggctcgagtgacccgcctgctttgccctccctaagtgctgggaactaggcaggagccagaagaccaaagcaggcctgaagacagaaatcgttaaccaagcatggtttgtcttttgggtctgtgtcggggctggattccttcaggaagttaccttttcatctcctatgggctgtgcttattcctttgttatttggattgtgataagaatgacagagggttcagttgctgtcacgaccatgcttgctgcatcaccagtgtgctccatgcaagcatgggagccctgaggacttacctctgagcccacaccttgtccttaaggagcttgtttactccaggctttctaggctacacagcagcagacttcccagggaggcattagagaccttgaaggggagcatggtgaataagggaagtggcttaataattcacagcagttatattttctagaaatagatcaggaaggcacaacataaaaacttctttaaaaaattgtgaaatataaaacaggaaactagacaaagctttttgtttttagattttctttaaagatagttaagatttgatgaatttatttatttttttgagacacagtcttgctatggtgcaatcttggctcactgcaacctctgcttcctgggttcaagcaattctcctgcctcagcctcccgagtagctgggactacaggcatgtgccacaacgcccagctaatttttgtatttttagtagagacggggtttcaccatgttggcaaggatggtctcgatctcttgaccttgtgatccgcccgccttggcctcccaaagtgctgggattataggtgtgagccaccatgcctggccgaatttaatattttaactaatagtgtccttctaaattgaattctgatcctaattgtagtacttatatttattgtattatcttaatgagtatataaataccactgtgggttctacttaatttctctagtatttttagttcacaaatctctgtagtaatattatccatatattcacagtatgaccaaaacaaaagattctaaaagccagtcatggtagtacgtgcctataatcttagctactcaggaagccaaggtgggagaaacccttgagcctaggagtttgagattacaatgaactatgattataccattgcactccagcctgggcaacagagtgagaccccatctctttaaaaaaaaaaaaaaaaaaggttctgtgatattgatgtgtttaaaaaaaaaaaaaattgacctgtgaaaggcacatgaactgctttttacaatctcaaacttttgtaaacaatacttctgtattacattggttaatgtaccaagtattggtacattagtcaatactttaatgaaccattctgtttcattaaaacaaactrttggccgggtgctttctttcacacctgtaatcccagcactttgggaggccgaggagggcagatcacgaggtcaagagattgagactatactggccatcatgggaaatcccgtctctactaaaaatacaaaaattagctgggcgttgtggcaggcgcctgtagtcccagctactygggaggctgargcaggagaatcgcttgaacccgakaggtggaggttgccgtgagccaagatcacaccacttcactccagcctgggcaacagcatgagactgtctcaaaaaaaaaaacaaccaagaaacaactatcatttacaatgatttccttgtgttatattctaaaagtggagataagaaactgtatagttctccttagataaggtcagattgctctccagaaagatggtatcatttacaacactgccagcaatgtagtgaatgtgcctgcatgccacagtccctccatcagggagttctctctctctctctctctctctctctctcgtttttttttttttttttttcttcttcctttgagacaatgtctggctctgtcatccaggctggagtacagtggcacaatattgactcactgcaacttctgcctcccaggctcaaaccattctcccacctcaccctcccaagtagccaagtagctggaactacagacgtgcccaccatggccagctaatttttgtgtattttgtagatacagggttttgccatattggccaggctggtctgaactgggattatagataggagccatggtgcctggcctcattttaaaaaatatagtgaaatccattattttatccttattagtttagcagaggtttaaaatttccttgtcttttgttattagtgacatggaacattgtttgtgttttatttttatttttatttttttgagacagagtctcactctgtcacccaggctggagtatagtggtgccatcttggctcactgcaacctctgcctcccaggtccaagcaattctcgtgcctcagccacccaagtagctgagattacaggcacgtgccaccatgtccagctaatttttgtatttttagtagagacggggtttcaccatgttggccagggtggtcttgaactcctggcctctagtgatctgcccgcctcagcctctcaaagtgctggtattacaggcatgagccaccgtgcctggcctttatttttaatgaattaatcattttgcatttggtattcattatgtcttttggggtgatactttttattacatttttcacaggttttaatattctgttacctttatatatttgttttaaaaatacatatgtgaacctatttctctctgattttgtttcttaaatggtcaaaatttaatttctattaatggattttttcattttcatttttttaatttacctggaatttattcttctctgaagtgtagatctaagtactagtatttactatctagttgttgaartagcatttaatttgtttcctcattgttactggaatttcccctttgctttgtcattttaagctctttttaaagagtttttttttttttgtaatcagtattcttccaaccaattacatttcttctaaatcacaatctatatagctttggaggctgtatatatatatagcttttggaggctgctttatattatagcagtgcttccttctaatcttttctttctttttaaaatattctttgatattcatactttagagataaatgtctactgttgttgacttaagacgttttataaagtactctgctcaatttaattgggattactttgaatctatatatactacttaagtattttctttatttagagacaaatattatctgataggaaattgtgataattagaatattcaacttgattcatgaaacaaaatttgtgaaccccctaatttgctgaattctgattgctgaatagatgtaaaaaaaaagaaaaaagaaaaaaacttgaatgcatgccattgaaaagatgacattctttattgcattaaatggaaaaaataaatttatttaaaatacaagtaaaattataagatataacaaaatttgcatattttctaaaataattataatagaagttcaaaactgtgtccgaactcaaatcaaatgaatatttctttgagcagttttcaggtcagtatctaaaactataactcccaaggttttgttttgttctttggatagggatggactgctattgatgaatcctttcagaatttgatcaaagctgcaggctgcttttgttagaaacagcatttatgtacattcattcacagaactttgcttagaaggagcagagaccccttttaggccatttgtgtgcccctggttatgaacttttgttctgggatctcccgttaacagcaaatgctttttttgtttcttgtgtttagggtctgacatacctgaagtgatgctggatttcattgactggctgacccaccaagagtttggcagaaagtgtgtggtcagtatcagagatatcctgtcctgggttaacttcatgaacaaaatgggggaggaagctgctttgaaaaggccagagatcatctccactgtgacatcttttgtccatgctgcatgcctggtgtacatagatggaataggttcaggtatgttgtctggtagctggtggggacaaggggctcgtatagaggggcataggaaaaggagcaagcccaggcctctgacccagctattttactgaatcacttctcagaacatttctaaaactcagaatggctttccttttgtttgtactctttgaaaggtgattggcacacaggatacactgcaacttctcaaagctggtagaccaggtacttaacaaacatgaagtggtgattatgagtagagtaaagactgctgaaatgtctttgcttctgaagcactggcttttttttttttttttaaattaagttctgggatacatgtgttaggaataatgcttaaaattrtaaagaaattgaacacttaaacaaagggtttttagcaaagcaattttatttttgtgcagaggggtgtttttttggccagytgccatgagagtacacttgaacaaagggcacgagagcctttatttttgatgcaagttttgtttttgtatttttcttttattggccggggttgggttgtataatttaaactcattttggttggctagacatttgaatttttttagataaggtggacatgttaaagaaagtggagaggaagggggaggggtgtttgtaatgagttagaaagttagttttttttttttaaataaggaaaggaatgtgagctggtattgataacgcctggtattgtggcatgcctgggcatttaacaaaggaaaaaaggagaaaaaggaaaaggtgggggggrggcggtactatgaattaaagaataaaagattgatcagattatttgaagagaaaccgaatatgcgggtttgttacataagtatacatgtgccatggtggtttgccgcacccatcaacccgtcatctaggttttaagctcctcatgcattaggtatttgtcctaatgctctccctccccttgccccccatcccctgacaggccccagtatgtgatgttcccctccctgtgtccatgtgttctcattgttcaactcccacttatgagtgagaacatgtggtgtttggttttctgttcctgtgttagtttgctgaggatgatggtttccagcctcatccatgaccctgcaaagaacatgcacttattttttatggctgcgtagtattccatgctgtatatgtgccacattttctttatccagtctatcattgatggacattcgggttggttccaagtctttgctattgtgaatagaagcactggccaatgtttaacatgagtagtaattttttgataatgggcctgaatattttaagtttattttaatgtcataaaaatcactgtggtttttcagccatgaagatttgaaatataaataaaaatggttactagtgccatattaggtactgtatgtaggctgatttatcactgagtgactagagtgctttactgaatgatctgctgcttaattgataatccatagattgtgggggatgcgtgttggacttctttcttaggactgcttacactagaaatcacatttaggctgcagttttgctgaggcctcttttttccgggaacctgtgctagagctcctgcttaatggtggtgaagcttggtgttgtactgttgcttcatggactgatcctctgtcttttaggggtaacttcctctgggtttggtacagcccttttggcacgaaaagaatgtctgaaatttctaatcaagaggcttgccaagatagtacgacttacagaatatcagaaaaatgagttgaagatttatgacagaatgaaggccaaagaattcactggaatagataacctttggggaattcatccattttttataccaaggggtaagaatgatttttaaaaaatgaattttccttttctatagatcatagatacttggcttttattgtgacttagttttaatgtgtaatactcatgattatatttgcactaactgagttagattctgacttgagaataaccataattgtgtgaatggttgaaaatacctgactggcatgtaaaaatagagggaaatagagacttcaatctataaatagattgtcttatacagtgcttatttttttattagttggttcccacattaggaactttcctatagtaaagctctaaactctactaatgttgacaataaacttttaagtggcttgcaaagacctatttagcctataatgtatcttaactatacaacctcatcatcttttacagaaacaggttttgtgaacccttgaaggctggtaatgtgtcattcctgatccggtccctggcatctgacatttaggcctcacagtcataggcactcagaaaatttctgatggatgagtgaatgattaaatgggaaatgcagtagtctaggagatagtgggtttgtgttctaattctttctctctttctatctaactagattgtctctaccaagtatttaaatgaggcagttagattagctacttctaaggtgcttctactttttcaggatgttgtttctgtagcagagtcatctgtttcttgtccctccgccctctctatgttaatgattgatgaatgcctgaagtatatggagttgcagtggcaattactggggtttcagtggtgaacataaccagtccaggttccattgcccttgcccctgtcctcagagctccatctctccttagcagtattctctcttcatccctgatgggctgtataatctaaccatcaaatcccttctctaagccaccatcataggactcagtgctcctgtgtaggagatacatgctagtggcctagaactggggtggtccttgcttctgctaccaagggtgaggtaataaatgttttcctagcctcactcccttcaaactggtgtacaaaaaaaaaaaaaaaaaaaaaacgaaaacaaaacaaaaacttcttccaagagacagtggcacaaatgttaaatattacaagactgttattagtcctgcatatcagttaacttacaggttaaggacacagtgtgaattgttttggtggccaaaaacattggatgaagttgattatgtggaaccatgtggcccatatgcctagcttacacttggtttttaggaaagtaactatgaaggtaaattgtacaagtacatacagtgattcagggtgtaggttgtgaaaggacaggtgtgtgtttgcatgtacatgtatgtgtataggagatggagagatctgtgtagtaggcactgttgaagaaaacgtgttattggatattcctttaaagcattttatggatctaaaagtggggaaatattgaaatagggattgaacattttcactgcaaatggtatttcactaactgataacccatgtggtagatttttaaaatcttgagttgatgcatacatgtgatttgatgatgtcccgcttatacatgactttacttttctccacttaaggacctgtcctacacaggaataatattgcagactatgcactcagtgcagggaccactgctatgaatgcacagaggctcttaagagctaccaaactgaagaagcccattctcctggagggttcccctggtgttggcaagacaagtttggtgggagcattagcaaaggcttcaggaaatacccttgttagaatcaacttatcagagcaaacggtaagctcggtcatcctacagctgatggagatagctatagatagtaatgtctgtgtcaatttatatttgcctaatcagaaatgattacattatcagtatcctcaaatttttcttttcttttcttttctttgtttttttgagacagagtctcgttctgttgcccaggctggagtgcagtggggtgcaattctcctgcctcagtctccctaatcactgggattacaggtgcccgccaccacacctagctaatttttgtattattattagagacagggtttcaccatgttggccaggctggtctcaaactccttatgtcaagtgatccacctgccttggcctcccaaagtgttgggattacaggcgtaagccatggcgcctggcctgtatcctcagatatttcatatcataataaagcccacagcaacatgaccttccaaactaaatcttctttggatttgttaattgctgacacctataatattaattctctctggatgctttattctaattctctttcgagagagaattatccactttggtatttattgtaatataaccccagttaattttttgcttaaatttttttttaaaaagtggtagaaataaaatgacttttaacaatctaaggaaaatatggtacagatgacaaattgaatgagaatcctttggaataggattttgttttctttttttttwaagcctgtcaattaaattccaagtacagccaatgttgagaactgttaatctagagcaccagctcaaattgattgatatatggaacatgttgggaaagttcttgggggcatgtttgggctcctggtaaagagagctgggattggttagttctatcttgggtgtaggaaggaagagtartggtgccagccccaagtatttatcatttcagatttagggkgktagaatccagttgatttttaaagtaataatggcttytttccatttcttyccctttcaaaggacatcacagacctgtttggagcagatctacctgttgaaggtggcaagggaggagagtttgcctggcgtgatggccccttactggcagctttgaaggcaggccattgggtggtgttggatgaggtgaggggcctgtttgtcatgcccaagacggtgatcatgtgtgtgaggagcagtcatcctttcacagctccatttcacaatccatttctcagtggaagatcccgctgatgacttttctctaatgaaaagatcctctgtagttttctttaagaatgaggaaggtcacttggcagaatacacaaaaagaggcccttgtacataaaacctacaaactctcccactgtttaaagttatccttcagaggaaaactgcatcgtcactagtttagtctctgacaggcttgccgtttctgcatttattttagaggcattttataaatagcgtcaaccgcttcatgttttattagtgcaccggagagactaaggaaagacatacaaaatgacctacygaaatgaggaaacgatccgttatgtgtgcatatggggtaaattattcatcagaagaaagagcagagtatgagacatgataaatactgaatctctgacaactagagatatggagctgggtcagtttggggtgtacaatattcaggaaaaggctagaaatatttgtggagctgaaatgattagagtgatgtacgtgtcacaggtgagactttggacacaggcygcaacaggtcccccaggttcagactcctgggtctgatcatcagagagggtgctgtgggactcctgkctgctgagctgctttctgccttttattcttgggataacaaggagagggaatttttttccatttttcagatttttttttgaacaagatgtctgatagaatatatattagccaggaaaagagaaagcctagttttaaagctgaaggctactgaccatacttagtatttagtggaattgcatatttagtggaattgcattcagggacgacaagacattctagatttataaacacatttaagagcggccttctgtttgggaatatacagaagtgtttgtgctttgtggtgcttgtgtaaacatgacacttgaaattctaatgtagtgtgctctgatttttgcctgtttgcattttaataacttgtattttcccratctcctttttctatgttaccaacaaaccacacatgcttcacatccctgagctctgaactactcatctgaagacctacattcagctcttttcatcctggcacaagagccccttgtaattgttcttatttacaaaattggtggaaatcagctgtattaactcactttatatcctgactttgaaacccgytggagattttgttcagtgtttgagatgggaaagtatttaaagagttaacaaaccttatctattctctacaattagtgttacatgtctttttctttttcttttcttttttttttttttctatttttctttttttttttaggcagagtctcagtctgccgcccaggctggagtgcagtggtgggttctcggctcattgtaacctcctcctcccaggttcaactgaatcgtgaatctcctgcctcagccacctgagtagctgggattacagtcatgcaccacaatgtctaagttttgtatttttagtagagacaaggtttygctatgttggcccgcctggtcttgaactcctggcctcaagtgatccacctgcctcggccttccaaagtgttgggattacaggcatgagccaccactcctggctaatttgtgttacacatcttaaaaactcagattgtgaaaatgaaatatctgtgtattggcaagtttttctgcaagttattacttacagagcaggttaatataggttatatgtaatggatacagtttaacttttgagaagattcttaactttaaaatttaatttgagcatttattcagtttaaagattattaatatatgtgtgtatatatacgtgtgtgtgtgtgtgtgtgtgtgtgtgtgtgtataaaataccagacaaaatctctaacatacatgggaaataaagaataatagaattggaccaggtacagtggcttatgcctgtaattctaacattgggaagctaaggttggagaattacttgagcccgggagtttgagaccatcctggacaacataacaagaccttggctctaccaaaaaaaaaaaaaaaaagaattagctggatgtggtggtgcacacctgtggtcacagctatgcagcaggctgagatgggaggatctcttgagccctggaggtagaggttgcagtgagctgtgattgtgccactgcactgcagcctgagtgacagagtgaaaccctgtctcaaaaacaaaagcataatagaatgaagacaaaccaaccataactcagccaaaaatacagaaggttatcaatattgtttgaaattccctttctgaagataactctagctttatttgctgcatattattcccctgctttttgttgcagttgtataatatatttgagacaaattatgtactttcttctttaaatagcttaacctggcttctcagtctgtattggaaggactcaatgcttgttttgaccaccgaggagaaatctatgtgcctgagttaggaatgagctttcaagtgcagcatgaaaagacgaagatttttgggtgtcagaatccctttagacaaggaggtgggaggaaaggcttgcccaggtctttccttaacagattcactcaggtaagatttgctgttgccatagagaccaaagatagactcggaggggataagactactattatgaagcctttaaggatattcactatgagaattagagaggatcagcttaatgatcctctttcttgtccttatatgatcaatattaatgtgactgattcccatcattgcttctgtccttcatcttttgccctggaagactagatgtgttatcagctggaagaaagtaaggtccccagccttttcaggattctgtgactgcactytgggatgaagtccaatcttggaccttttcaattgtccctctgatctgttgaaatatataagaaaaatttttattgaaaataatgcattttaactaaagaaaagaaagaacagaaaactactatgaagaataaaaatccactattccccagtcagtcattattaacattttggtatcttatgcctttattcttacttgcagaggggtacctgtgtatgtgtatgcttacttgttttaacatcagtttttcagagtttggccaatccagaggtttggaaatgtctctagatttctttagtgtcactgtctcttatgattaagaattggctgagtatcttttaagaatgttttattggctgggcatggtggatcatgcctgtaatcccagcactttgggaggccaaggcaggtgaatcacctgaggtcaggagttcgagaccagtctggccaatatggcgaaaccccgtctctattaaaaatacaaaaattagctgggtgtggtggcaggtgcctgtaatcccagctactgaggaggctgaggcagcagaatctcttgaacccgggaggcggaggttgcagtgagctgagatcgcgccattgtactccagccttggcaacagaatgagactccatcttaaaaaaagaagaatgttttattgagaaaactttcaaacatatggaaaaattggatgacttttatagtgaatactcgtatctaccacccagatttaaaagcattttacattatacataggaaatttttaataacatgtatcttttttttttctttttttgagatggaatcttgctctgtcgcccaggctggagtgcagtggcgtgatcttggctcactgcaatctcctcctcctgggagcaagcaattctcctgcctcagcctcctsagtagctgrgactacaggcgcatgccactatgcccagctaatttttgtatttttagtgaagacagggtttcgtcatgctggtcaggatggtcttgatctcttgacctcatgatccacctgccttggcctcccaaagtgctgggattacaggtgtgagccaccgcactgggcctcttttttctttaattcactagaatagaccttaaaaacaaaacctctactcagctgtatttagaagattttatgattctttattctcaaaacacaaaaaaagaaatttctataactgaaaattatatttctcatgtattgktacttggtattaaagattttgcataataagacatggtagtcatttctagtgtttggtaaagagaaacaaaggcatttcttcatattatttttggatttctaggtcttcgttgatccccttacagtaattgacatggagttcattgccagtactttgtttccagccattgagaaaaatattgttaagaaaatggttgctttcaataaccaagtaagtacctacacgtattggtttctttttttttctggctgtatttgaaccagtattttttcaacatagagttctaccaaattatcaggatctctaactaaaaaaaattactttgaattctacaggtttctagtggaagggacactatgtagtggaggcttccagtaattcatttctgtattgtgactaccagtgttaatgcttagaggataagccaggcatttggaagtcttgagaaagaggctctgaatcaagcctgttaatttttgtttcagattacatatgcttttgtagtacattcctagtacttaatgcagtgcctagtagtaagcagggcatgtttcccaatcaggatgttttctttctagattgatcatgaagtgactgttgagaagaaatgggggcaaaaaggaggaccctgggaattcaacctccgggaccttttccgctggtgtcagttgatgctggttgaccagtcccctgggtgttatgatcctggtcagcatgtgtttttggtctatggtgaaagaatgagaaccgaagaggacaaaaaaaaggtgagtttcacrcttggtatttgtatttctttccatctgaaagttgatttccygtgggtgagaaaggacatacactaattgcaagccttwttttttttttttttttttgagactgggtttcactcttgttgcccaggctggagtgcaatggcataatcttggcttgctgcagcttcacctcccaggttcaagtgattctcctgccttagcctcccaagtagctgggattacaggcataagccaccagttccggctaattttttgtatttagtagaaacggggtttcaccatattggtcaggcagatctctactcctgaattcagatgatccacctgtctcagcctcccaaagtgctgggattacaggcgtgagccaccacgcccggctagcaagcctgttaaagctgcttcaaaatttaaaagttaaaagaacagactaaacgttctcctaccttggggtctcacaatatagagtagcttgctttagaggacataatttgcttatctatccaaatccccatgatcacataccttaaagcagtattgccctccagtagtaaagaactaagtcttcaccatctttacaggcaccaaggtgagaagcaggaggaggcagacaggtgatactccgtagaagaggaagtttttctgttttgttttgtttttaaataaatgtcaaattacaaagcattttgtctagaaagtataatcgtataaagagagaatattctgtgtttaagtgaaaataaaaatacctgtttgtaaaactagaattcccactgtaaggaattgtaataacgtgtgcattttagtttgtggtatttaaaatcctgtctcgctgaatgctcacartagctataggcaggaggtgctgtcatggcatcttacaggtgaagatccaaggcttaaagttatggagtgtcacaggtagcagagccagctttccagtttaggccctctccagtttgtctgctgtttccttctagtaaacttcactgtttgaaaataaatgaatagatacatagatgcatgcactagaagcagtaacctccttgttgaaatgtgaacatgtggctggcccatagcacatgtgactttcacagccctttcattctgctacccattctgtttgttcttattttttttctttttttggattgcaaaaatttattaaaattggagacattgttttaatcttcttgtgccatgagactccatcaggcggtctacaaagaccattgggaggctgaggatcacttgagcccagaagtttgaggctgtagtaagcttcaaaggccgctgcactcyagcttgggtgaggcaagaccctttcaagcagtaagctgcatgcttgcttgttgtggtcattaaaaaccctagtttaggataacaggtctgcctgcatttcttcaagcatgaattctgagttctttgcttctttaaaacttgctccacacagggtagtcaagccaactctccatacctttaaaaggtatgacaggaactrtcttcatgtccttacccaagcaagccatccacggataaaaacgttaccagragcagaaccgttaagctggtccagacaagttggactccaccatttcaacttcagctttctgtctaatgcctgtgtgccaatggcttgagttaggcttgctctttaggacctgggaagaaacaattcagtagctattctcatccctcctttgggacagaactgtccataaggtgctatccagagccacactgcatctgcacccagcaccatacctcacaggagtcgactcctacctcgaaaagctgttcttattttttttgaggcagggtctgactttgttgcctaggctggaatgcagtggcacaatgccggcttaatgtagccttgacctcctgggctcaagggatcttcccaccccagcccactgataagctgggactataggcacatgccaccaaggcatggctaatttgtttttacttttaatagagatgtggtcttgccgtgttgtccaggctggtcttgtactcctgggctcaagcaatcttcctgcctcagtctcccaaagtgctgtgattacaaatggagtgagccactgtgcccggccacccagagcttctttagtgtggtattcagaatctaattacacactaactcatttatcatacgtaggtgactttcaatcatttgattaggagaaagtcttagtagtttttaacagctttattgatatataattcacataatcagctagtattttaatttcttcatccacttatagtatattaattatgaccaaaacacatgccagttgttgaatgattgattagtcaggtgctgggtcattgtggtatgtggaagttttccatcactcttccaattcaaggttattgtaatggaccttataggtgttttctagcgggggagacaaggtcaagaaaaataatgttatagaaggataaagtctgtaaaagctagaagagtccagttgaatggaattttgattttataaagctaaaccaaagagctagattgggaattttttttttttttttttgagatggagtcttgctctgtcgcccaggctggagtacagtggcgtgatcttggctcactgcaacctgggttcaagtgattctcctggctcakcctcccgagtagcaatatttgtaattttaaccctctggtagaacatcaggggttggagattatatactttagtgtggaacatgaggtcatgtatcacctggactcataggtaggtgacaggaacactttcctatgctgcttttagtctcacagtccaatgtttgacactgattatgattttatctatattatttttattttttaacttcattgtagtattcaattatgtaagtattgctgctttttagaaatactattttgtatactttatttatwttttttctggctttaattttccctacttctgtgggctaaattaatgttttttatatacctctatccgccccccaccattactcttagattttttagagatccaaaataaaagagtcaacagaacattttctaatagcattactgctaatgaaaggataacaatgtaaataattggttagaggaataaatttggttttcatatctacataaatgtttggagggataacatgttttttggaggctgactggcttagatttaaaatcggtcrccaaccatgggcaaattctataactcttgtgagtgctgttgtctatataaaatggacatggtaactattttgcatgggtataaagatcagaaataatctaccaaagtacttaatacagtgtttggtacataggaggtggttaatgaatggtcatttttctttataatcttcgtattactgttctatcctctttttaggtagtatcttcaatgatgaaagcaaacaactctttttttgtctctagatttcaatactacagtgtccatggcttcaatttaatttatggtgcattgttactggaatctcagatagtttggaatatgactgctatgttctcaatctcaaatttactttcattccaaagaattaaataaatgcagtcaatcctttttataagagaaaattcaaaaggataagggaattgtggccagtgtttttagaatagtgactcttatcactgtgcttgttttctagaaagtttgcctaagaattaggtggagtgatttgtgttttyattgcattatcttcttcctttaggtcattgctgtattcaaggatgtgtttggttcaaattccaacccatacatgggaaccagactatttcgtatcactccctatgatgttcaggtaaggagactaggataatcctctatcctttgacattttttaatggtttcttctgctcccactaccaggcacgcttatggaaatctcactggcatgtcttttcagttgggctactcagtcctttcccgtgggagctgtgttcctcacccgtcccgccatcccctgttgctcctgcaccagtcattccaacccctggagtcaatcatgaagtgtgtgcagatgagctggatggtcatcctggtcgggccagcctctgtgggcaagaccagcctggtccagcttctggcacaccttactggccacacattaaagatcatggctatgaacagtgcaatggatactactgagctgctgggtggatttgagcaggtaaccagtctgccttcatattttctggcaaagcataataaaccccgtggtctgactgagagtcttctgagttggtgatgagtacagataacagtattctctgaccctatgatgagttcatgtcctctggaaattacaggttgatcttatacgaccttggaggaggctgctagagaaggtggagggaactgtaagggcactgttaagggatagcctccttatcagtgctgatgatgcagaagtagtgctgcgagcctggagtcattttcttctgacatataagcctaagtgtcttggagaaggtggtaaagctatcacgatggagattgtcaacaaactagaagcagtgttattgcttatgcagcgactcaacaataaaatcaactcmtactgcaaggcaggtatgtatatttggatctctgtatcaggaacttaccattgcttatattgtgtccatttacacgtaatagatttacaaatgttttgtattaatttagtaattattaacaatcagaacttgtgggaaagtttgacctagaaagtaaaatgaagctgaggtaaagtattcagaatagttkatcctgaaaaatcaaataggaaaaaaattggttacgttgctttatggtttattttgtgtgtaatcacctataatgataaaacagcatgtaaaacttttattattactggctatttttttactcaataatttctcaggaaattgagcatttttaaactgaagaataggagtctgaattcataggatgtgtttattcatttgtgtggagatggaggaaatatatcatcctgtatgccatccaattaacatggaaatttctctcattttgtggtgccactttcagagtggtggtgagcatgctcttagggaggattcaacctaaaggcccacaggctgggtctgtcactatgcttgtcattctttatttccaaagcctgcttgtaactgattacaaagtgttgattccttatagccgaagaaatcagacatcccacttcttggccagcaaacattttatctgtggcggtgggccactcatttactttcttcattgttgatttgatctgtcatttctcactttaagcctgccatttgaacttgaaatcctttactcattcactctaattataaaagatatccgatgcagtcatgtgtcatatatttttaaatgggtattgtaaaactcaccattgagttatgaatttctattataaacactatactgaatatatgtacttttaatcaccgtgacaacactgcattataggaaggattatctacatctaatagatgaggatgtgaatattcaaagagacaaaattacttgcctacagttttacagttagcaagtggttggactatggtatgttaagtctaaacctcgttactccctcatctttagaagtagaaatccaatgtgtattaccttgtgatatgaaaaatggtcataaaacagtttccaaccaaaaagatcaactgaaaaatttcgagggaagggctatataaactataaagcatttggcaagtaattaccagttattactatattactataatcatatgatatgctcattataaaggaagcccagtttgcactgtgtgaagttatagcactttcatttagtataaatgcactgataggtgggaaacgtcctccttctgccatttgagaaaccgtaatacagaaaaatcatttgccacctctatcaccctagagtcaaccctgagtagctattaatacagagagccattaaaacgtattttctgtcttaaacttaactttcctatctgtgtttaaacagaagcaaaacaytcttctatttattcttttatgaaatcttaaaaaccttggctagaagtatcaagcttccttttcataaacttaattctttgtttgaagttaagtgctgtggatggtgattcttccctgtgacatttcagagtttgccaaacttgttgaagagttccgaagctttggtgtgaagcttacgcagttggccagtggccatagccatggcacatttgaatgggttgacagcatgttggttcaggccctgaagtctggagactggcttctgatggacaatgttaacttctgcaagtaagaaccttatgcctaatcagtggtccaacttgaaatttgggatatgcttgtcaaagtagaaacccagatagaagtgctggtattttgaagctactrtttttcttaattacgcaagcgtcctcagccatattctgtagacttctccctgtggtgaacagtggtaattcgtcatcagacagttataagatttcagctctgtatgataattttcagccaaagcaaaggctaacaaaattggattatttttcctggcaatgtcctttgagttaggccttttaatttaatatcagaagtcttccttttgttagggtttcttcagtgcagttttttctaatgcagggtctgacacagggcaggcatttattaaatggccatcagtgatgcagcaattcaaccatgtatcattcttgatcttgcagtaaggtaaaggacaagtgtgaaactattgtacatatacagttaacatagaagctactacaagttagatgatgactatttcttcacggagcatttatctgaatgttacaaattgaaatccagcygccttaaatggatttgataatgttgagggatggggggcaggaaaggaaaaagtgaaaaggttatagtgcaaggaacttatcattttctttaatttcatttattcaaaaatatcttgtgtatttactgtgtataaggccctgggctatgtgcctagggaagcgagaaggaaaatcartggggaatctacttttgaaagagatcactgttgtatctgggtgaatgattgtgccgaaaggaaatgtgagtcaaaagcatktggagccccgtgcatggaaggaaagaagagtcaatgcagcatgtcagcctatccaccatctgaattctgtctctgcagcccatcagtgttggatcgtttgaatgctttgcttgaacccggaggtgtcctcactattagtgagagaggaatgatagatggatccactcccacgataacaccaaatcccaatttcaggtatttgtatctcttacatttctgcctcagaatctgacagcctcagtagcagaggtagacgttcagtaggacttccttatatattttatttataaactgaatcatggagaagttcacccatttattaattcacttaacaaatacttactgaggctttactatttgccaggcattgctgggctctggaaacacagcataaacaagaggggcaaggtccttgccttgcattggtgacgaaggtgggaagcagagataccagtcatgatccttttgcagtaatttaggcaacacatcacagtggcttagatgagggtggtcagatgggttggtttgctgatggacatgtgggttgagaaaaagaagaatcaaggatgacacctatgtttttggcttgagtaactgggtaaatggggttgccattcattgagaaagggaagactggtaaaggagcaggtttaatgtggggagggtctaccgggaatcagctgtttactttcagacatacatcagaggtgtaagataactagatggagatgttgatgggcattcaatatatgaatccagttgtttcaggagactacacttgcttcctgttctgctgtctgtaggtgagttagaataatgaattagtacagcctactctggggaatatctgaaggttaaatttttaaagttctcagcactaaaggtacactggatatatcatacacagttccttaggaaagtaggtttagagaaaatcttttgctatattgatgcatgctagaagtaaaagatccttggtgtgaattctgtgacaatgagccacataggatttgccctcactgactgatgctgagctacacctttggttgcactgggatttaaaatcatttttttctttgaattgctatttttctagacttttcctctcgatggatcctgttcatggagatatatcccgagctatgaggaatcgtggacttgaaatctacatttcaggggaaggggatgcaagcaccccagacaacctggatttgaaagttctgctgcacagccttggattggtggggaacagtgtatgtgacatcctcttggctttacacacagagacccggagcactgttgtaggtgaggtgcttgacttttgggcctttgcagagttttagtcttcaagaaatttatgtcattccattggactgctcatcaaagatttcgtacatttagtgtatatagaaattatcaggaaagcttgttaaaaatgtggatttccagacaccccaagagattgggttcagcagggcagggcaaggcacaggaatcagtatctgaaagacgcttcttatgtcattctgatgcaagtaagcagaggctaaccctcgagtaattccactttacgcactgaggtttatgaagtttgcccatcatttctccagggtcatcaacagcctcttgaagttggaataaagaggaaactttgagttgtttaaagcagacaggtgttactttttctaaactttcaattacacaaaaaggaacaagataataaatgaagtattgcttgttggataactactctgtgttaggtaccatgcagattgtttatttaatctttttttttttttctttttttttgagacagagtctcactctgtcgcccaggctggactgcagtggcgtgatcttggctcactgcaagctccgcctcccaggttcatgccattcttctgcctcagcctctccgagtagctgggactacaggcacctgccaccacgcccggctaattttttttttatttttagtagagacagggtttcactgtggtctcaatctcctgacctcgtgatccgcccacctaggcctcccaaagtgctgggattacaagcgtgagccaccatgcccagctgtttatttaatctttacattagttctgcaaggcatatgttttcatttttcagataagactcagagagtttgagtaatttatcagttaataataacagctggaatttgcaaataggcctgttggatttcaaatcccatggtcttttatgaggttacactcaacttgccaccttcagtgtgtgtcagcattagattaaggatatatgtgaccagactttatcacatctataaatgagtcccccataataaactacagacagccatagagaaacaggggagataggaatacaaaggttcctacaggtcctttgtgccctcggaggactctagagtctacttggaatgttttgtaaagtaagtatttgggtggggttgacaggaaggaggtttgatgggagggcagaatttatccattttcattggagattttaaagactctattgtttatagatggcaatttttttttaataggttctccaacatcttctgtatcaactctaatccagacagccatactaattgtccagtacctgcagcgagggctgagtttagacagagccttttctgaagcatgctgggaagtatatgtctgttcccagcattcaccagcaaaccggaaggtactatgaagtattgcagaatgtttctaagttgtaataccctacattcttgagtacgaggaaattatttttaaaggtggcaacccagtgacctaagagagttgaccactgcagtttgctctaatagagatctggtatccaggtacttttctggaaaatagcttgaatgtaaatattccttttttttttttttaaacttacatgtcatcaggaaaagtagaatttgacttgtgtttttsattgaagagtgtattaaaagttgttgtgaggtggtcgcatggactattattactttgctggtttttggggaatatcacttttatgttggtaccactgtattgtgtttttgtctcctaccagcttgtacaggctttactggagaaacatgtttcttctttgcgagcacatgaaacctggggagactccattcttggcatgggactgtggccagattctgtgccctcagctctctttgctactgaagattcacacctgtctacagtccgaagagatggacagatcttagtatattgtctcaacaggatgagcatgaaaaccagcagctggacaaggtcagtggagccttcagcttgtgtctctggtttcttggctggtttttatttttgctggaaatggtcaggacacaatatatttaactggagcattctgtggccatttattgtgtagctgtcatagttttattgttcattgtgatattgctccctattgattatttattaggtatgttttaactttcttcctcygtgggagactctccttttctctcttacctttgatccaatatttgtgaaagaggttttctcagttatttggaatgtgaaataaaaggttattctagtactgagtttgttcattcaaatgaatttcaggagtcagccttttaccttgcaagacttagagaaaattatgcagtcccccagccctgagaacctgaaattcaatgcagtcgaagtgaatacttactggatcgatgaaccagatgttttggtcatggctgttaaattgctcatagaaagagcaaccaatcaggattggatgctcagagttaaatggctttatcatttagccaagaatataccgcaggggcttggtgagtagaacagcttaatttgtccactgatgtgatttatatacacttatgctatttaagtgcctcagcagctgtgttaatctgtgactacactgttaaaattacagttgggaggtctcctaggaagaaatttgtggtctagcattactgttaaggagcaagtctgcctgtagatgtgtcacaagataaacttttgtttccatgttatccttagcatttcaggatatagtcaccttcctaacaaattcaaaaggaaagcatactgtattattttactttttagttttgaacatctgctttttgtgctgtactactgctacagaaccattctatatgggaaaggtattagttttgataaatgcatttcctctaaaagtatataagattctaatcttattttagttccagtgctccatgttgtcacacttggagttgtcccttggtatctgtgggggattgatacaaggactctccctcccccacccagggacatcaacatacgtggacgctaaggccccttatataaaatgggatagtattttcatataccctacacacatcctcctgtatgcattaaatcatctctggattacttataatacctaatacaatgtaaatgctatgtaaatagttgttgtagtacgttgttttaaaatttatattatttttgttgtatttttattttttgtttttttaaatttttgaatatttttgatctgtagttggttgaattccacagatgtggaaccctcagatatggagggccacctgtactttctttgtagttctttcgttttaagagaggacaaagcaacaataacaacattgcttgaattgtaaagtacagaacatggaatttgttggtggagattaagtaattgagtttacatgagcctttctacttcatgagaatttgtcaataagcccatggatgtttataatattttgtaacacatgtggtcatctgtctaaatatatgtagagaatttttataaatatttttatctgtattgtcctatatgatagccactagccagccagagagggctactaaaatgtaaatgtagattagatttaaaaaaataaaaaatccagtcctttagttgcactggccacatttcaggtcctcatatgtgactagtggttattctatgcagctgtagaacattttcatcactgcagaacgttcaattggatagcactgctttagagtctaacactggtttctccttcctccacagagtccatacaaattcatttggaagccagtgctgcatctctcaggaatttttactcacattccctctcaggtgcagtcagtaatgttttcaaaatattacaaccaaatacaacaggtatgcacttttgatttctagctctcagcactgttttggaaacttatcttttgactttatggggaaaagatctgacctgttagaggtctcaacataacggtattttttagaagactcatgatatgcagaagcaaattctccttctttttttttgaaatttcttttttttttttttaaagggacagggtcttactaagttgcccagggtcttcttgatattctggcctcaaacaatcctcttgctttggtctcccaaactgttgggactagaggcttgagccaccatgcttggcctgaaactatccatttatcctccagcttctgaaggaggctgatgatatgccatggagtaaaaagaatctaggagttggaacactaggccctggtaccaactctgccacaaactggcttggtagatttttggctcatcattcactgtctctgcctgtgtttagaaactaggggaattaagctcttatttctctgaggtgccttccacccttagctttgtgttgtctaccagtatcgttagtaggaagagtttcaaaccacgagatatttgacttaaaggaaagttacacagggtcatttaatttaggaaaatataaacctttaatgatagatgcggtgacttgtacctgtggtccagctacctgggaggttgagakaggaggattgtgtaagtccaggagtttgaggctgcagtgagctgtgatagtgccactgactgcattctagcctgggcaacagagccagaccctgtctctgagaaaaccttgatgacgaagttataaaaccatagtgataacagaaatagacatctaagatatctgatcaaaggaagtattcaagattaattttttttaaataaggagtgagagaataaacatttcctagaacagagtaatattaacttgattggcacaagcattaatgargaaaatgggcattttcacaacaccagatttaaaattttctacctccatcttcatttgatgttgatcaaaatataccactggccatttggtttagaagaaaatatgcatgatgcttttgtgctaaataattcctttatgtgcactaaagatcatggagtgaatgggaagaaatcaaacaatagagaaaaatactttgctagtcaagttgtggctgaactaaggcatggctttccactatgagaggattgtaacttttacaaacacagttctacagtagcagctttcattttcagcaggcatcgcttgtcctctgttggaacacattagctccaactgtccttttcagttttgtagcccttttatcttactgagtgttggaatatgggttccctccttaatgtacctgctgttcacagtatgtcctgggtagtctgggtagtctactatatggtggatgcttttaaaacttaaagtgctccactgaaccgtcctgccagccaccttcaaattaatgttacccttttttgtgtcttgcctcccttccttgggttttcacaacttctggagaatgtcagtctcctcctgctgcttcacagaagttgtgtcaggtgtgagccagaggattgtggggcagcagcagccacattctgattatagagaatttgtttttaagtttaaaaaactgcattgttttcttaatgaaaacagatagtgaggtgtatttattcattttctgccatgtacgtattttttttttttttttaagctaatggtgaccactgtgtaatttagcccatggattagtgtgatctcaggaagtgaattcattggttggaatgttgtattctagtagggattacctttatatcctgcattgggatgaactttcaggacatacagatactttgcatttggtaaagatagagtgtaaaagctattaaaccctgctattctagtattatgggatgaaactcatggtatttactggttcaacctcttccccatcatgattcaatgtgctcaaagtaaaacaatgaaaatattcaactgaaacttcccaggcaaggagtttctccaatatttctgatttttgttttgttctgtttttaaactagatgaatttgtgatccctctggatccccgatggaatatgcaggctctggacatgattagaaatttgatggactttgacccacaaacrgaccagcctgaccagctctttgcccttttagaatcagctgcaaacaagtaagtgaaacctgctgctctgggcactgtttgcctcactggcttctcggattatacctttcctaagaatctgtcaaatagcttatgtgtgttgaattttgtgaacctgagaagttgtggggtgttggacatgattgcctttatcatacgataatcatattttctactgttttctgttttttgttttgcttttgagacagggtctagctctgtcactgaggctggagtgcagtggcataatcttggatcactgcaacctctgcctcctggccttaagccatcctcccacctcagcctcccaagtacctgggactacaggtacataccaccacacctggctaatttttgtacttttttgtagagacagggttttgccatgttgcccagactggtcttaaacttctaagctcaagtgatccacctgcctcattctcccaaagtgccggggttataggtgtgagccactgtgcccagcctggtttttgtttgattcccagcagctcctcccattttcacctacttgtttttacttgtctcttcctcagcaatctctctgtccacatcatttcctgtcctcaaatgttggagacataatagcacctccatacttatgtacacactcacatatgaatttacttaattttcaaagtgaatccacaagtatagtgtgtacctcagagggtgccttgcaagctaccagccccctactcctctgctccaccaactcctccatttctaccatggccactttgaagagttcacggtgcagtttgtcagatcgtgacagaccaaggcctgggagtctgcctagacccagctttctccatccatcgatctttcctttcaccttagtagttgtcactttcatctccatctctttagtccaagatttgcagaggcaggagaggaatggcaggatgaaggaccctgatgttccaagtgttccagcaaatagaggatatgattgaaaatgttattaaccgatagctatttgttacgttttttgaatctcattccaggacaatcatatatcttgaccgggaaaaacgggtttttactgaagcaaatttggtttctgttggtagcaaaaagctaagagagagtgttttgagaatgtcctttgaattccatcaaggtaagaacatttaccttttgtgttctctaattaagcatctgattgcataatgttgctaaagttgagaggcatattcagcagctgctgttgtttactggtttcttttaatctgctggcctgattttaaacatgtccccttactcaatagtaatgactaacatttactgagcacttactttgtgccaggtgcttagctaaatgctttttatgtgtccttgatctcatttactttttgtagccacctgtgatataggtccccatgttgttagtgaggaaacggagacacggagatgctcaaggtcacgtctctagcaagtaacagagccacttgaaaactaggtctgtcagctgaaaaagtacatattcataagcatttattataggagggagcatttctcccatgttttttttttgttaattgaaaagatagttgtgcttgttggaaaaaattcaaactattaaagtataaaaattgaaaaagttcatctttacatcagctactgttagtaatagtttcatttatgttttctcatatctattggtattaactatctatctaaacatatgtacttagttttcattttatacttaaatacttgtataaaatatacatttttttctttataatctgcatttttccgtgagacattatttacatctgtaggtatacatgcctcatttgcagagtttaataatacagattgaacatccctaatatgaaaatttgaaatctgaaatgctccaaaatcaggaactttttgagcactgacatgatgccacaaatggaaaattttatacctgacctcatatgatgagccatagtcaaaatgcagtccaaactttgtttcatgcacaaaattattaaaaacattgtaaaatagaaaatttggactatgtgtttccccaagatacctcattatgtatatgcaaagatttccaaaatcaaaaaaaaaaaattgaaaatctgaaagacttctgattctaagcattgcagataagagacactcaacctgtagtaggcaaagaatttgcttttgcttttgctctcaaaattgacctttgtactggggatamcatttaaattctagattacagtttattttgaaaatgtccagagattattttaaatctgatgaaatgttctcattttatttatgttgactctcagatccagaaagctatcacactctgccccatgaaattgtggtcaatcttgctgctttttttgaactttgtgatgcactagtcctgctctgggtacagtcctcccagggaatggtgtctgatgccagtgccaatgaggtaaggaactgcaycttgttttatttttaaacaacaaaatttatctttcttggcataaagattcttagggctaagactaactttagtgttgttatatgcccaatattatttaagaaacttattcttaacagttttaaatatacctatacacatatttaaaatcttcattggggtataatttacatattataaactgcatatatttaaagtgtataagtcttgacatgtatacacctgtgaaaccattatcacagtcaagataatgaacatatccatcacccccaaaggtttcctcattccctttttgtattttcttctttcctgctcccacccacaacgaggtagccattgatctgctctcttactgtggatcagttgtattttctatacgtggaattatgcagtatatatacttttttgtttatattctttcactcagcattgtgatttggagatgcatccatgtggtttcatgtatcagtagttcattcctctttattgctgagtagtattccattgtgtggatctactacagtttttttattcgctcacctgttgttagattgtaacagttatattttaatccacttaagtcctcttagacattattgtcacatgtggattaaatggaatttttaatccagattattctagtaagtctagtaaagtagagcagccagtcttaaactttttgatctctgcctctatactcttaaaggttctcaaaaactccaacgatgttatatctgtcagtttttacatattaagaactgaatctgaaaaacataaaaaaaacccataaatttgcttaaaaatacagtagcaaagaatttcacgttaatatgaataacttattttcaataaaaaatagcaatttctaaagtaaaatttgagaaatgtggaactgttgtacattcctgcaagtctctgtatgtctggcttgtgaaaagatggattcttgtagtatgttgtttgggataaagtttatgaagaaaaactggcctcctatagttaggaggttggaaaggagaggaatattttagtaaccatttcatataatttcaaatattcttatttgatggcacaccaaaaatgacaagtagttttgtaagggttatttgcaatggaaaatctgagcaaataatcagtgaacttcttgtgttaaaattcattggccacggccaggtgcggtggctcacgcctctaaccccaggactttgggaggctgaggtgggcggatcacgaggtcaggagatcaaggccatcctggctaacacggtgaaaccccatctctactaaaaatacaaaaaattagccaggcatggtggcgggcgcctgtagtcccagctactcgagaggcaggagaatcgcttgaacccaggaggcagaagttgcagtgagtcgagatcgtgccattgcactccagcctgggggacagagcaacactccatctaaaaaaagaaaattcattggcctagtttgcaccttggatagactttgaccctgcattagtttatagctcgtgcactggtaacttggaaaatactgttcactgagttggcacatttcattcttcaatataaataagtaaaaagtcacacttgtgaaaaatcacaaatctcttcagaaaaatcgttaccaggaagtcatcaaactctgttttccagaattttttttgagacagagtctcgctctgtcgcccatgctggaatgcaatggcgtgatctcagctcattgccaacctccgcctcctaggttgaagcaattctcctgcctcagcctcctgagtagccaggactacaggcacgtgccaccacacccaggtaatttttgtatttttagtggagacggggtttcaccatgttggtcaggctggtcttgaactcctgacctcaggtgatccacctgcgtcaacctccgtaaatgctgggattacaggcatgagccactgttcctggccagttttycagaattctaagttttgcttaaaagctgaaattttatcatggcaacatatatcctcaatttttttttttttttttttgagacggagtttctctcttgttgcccagactggagtgcagtggtgccatctttgctcactgcaacctctgcctgctggtttcaagtgattctcctgcttcagcctcccaagtagctgggattacaggcgcgtgccaccacgctcagctaattttttgtatttttagtggagatagggtttcaccatgttggccaggctgktctggaactccttacctcagatgatctgcctgcctcagcctcccataatgctggattacaggtatgaaccaccgcacctggcctctcaattgtttttcttgaagtgacaggttcacattgattttcaatacagtgtctgtcagatagtcataatttgcctgccagtccttctttttttgtactattagtgtaaatgtcatcatagtgaaaatggcaaataacatgatattatgaaaatagctttgacttcatggaaccactataggaaatcactaatctagaaacaatgttactgtgaaaatgcattattcaaagagccatgttggagactcatattacctgatttgcattgcaaccctgtattaaacaaaaccgtatggtattgtcttaagaatagacatttaaaccaataaaacagaggattcacagatagaccccccccccttccccatacatggtcagttatttttgttttgttttttgttaaatatgcaaaggtaatttaatggcaaaaaatggtctattcagtaaatggtgatggaagaattagatgtttatataaagtaaaatgagcctagccaggcacagtggctcatgcctataatcctaagtactttgggaggccgaggtgggtggatcacctgaggttaggagttcgagaccaggctggctaacatggtgaaaccccatctctactaaaaatacaaaacaattagctgggtgtggtggcaggcgcctgtaatcccagctactcaggaggctgaggcaggagatcacttgaacctgggaagcggaggttgcagtgagctgagattgcgccattgcactctagccttggcgatggagcaagacgctgtctcaaaaaaaaaaaaaagggcctttacccctacctcacattatatgtagttacctcaacatggatgaaacctttaaaaatagaactgacactatgagctggctaaaagaaaacgtaggagaagatctttacaatctaaatataggcaaagattttttaggattctttctaaatgaaaaaaaattgataaattgatttcatcaaaatttaaaacttctattcttcatagatacctttatgaacatactgtgagagaatgaatatactgggaaaaactgctaacaaaacacataaattccataaactagctataatacaacctagtttttaaaatgagcaagacatctgaatagaatatcttcttggaagttctatgaatgcccagtaagaactttaaaaattgcagtgtcatcagttatcaaagaaatgtaacttgaaaccgcagtgcggtaccatccaccagaatagaattaaaattaaaactaaagttaaaatcattaacagcaagtattggcaaagaaatgaaacaactgaaactcttctacacttctggtcggagtacaaaatggtacagctgctttggaatacagttagtagtttctcataaaatctatactttgacccagcaattccattttctctaataacttcatgcttcaaatactaagagaaaagatcttcacctcctctgtctgccttactgttcctacatatattccagtccagtcttagacttttggtgtatgtaaattgagcattgattagcaattatagcctatgttgtgtgtcttttcccgggagatgttggtgagcagtcttggttcactttgtttttatttttcttcttgctttagtctttcttcatgccatcttatctaagagactttgtttttagatcktaggttctctgcggtggcgggaccggttctggactgtggccgacacagtaaaagtagatgccccaggtctggcccttcttgccctccattggcactgggttttaaaacatctggtccaccagatcccccgacttctgatgaattatgaagacaagtaagattcatatttagagtaataatgtcaatgattacagatagatgttaaggataagatttggaaccgaaactgtttcttcttgctttattttggtttattcccttggcatattggtgaatgtacaattaaaagaaagaaagaaagaaaatattaatggcttctcttactgtctagcwtttccccctttccttatttcccctgtgcccttgttctcctttaaagatattacaaagaagttcagactgtctcagaacatattcagaattgtctggggagccagactggtggcttcgctggtataaagaagttgcagaagttcctgggacgaccgtttccttttaaggtacacctggaagcatttagtaaataaaagaaatgtgactactrcttctgaagtccttttggaacttgggaactgacattgtataagattaatccttgtcttgaaagcataactcttgcagttttcctttggcatctgggggtgattggttccaggattctccttggatacaaacctccaggaaagtccaagacttttatataaaatggcrttgtgtgtgtatataacctatgtaccctttatatcatctctaaattacttacagtacctcatacaatataaacgctgtgtaaatagtsattatactgtattgcttaggtaataatgacaagataaaaaagtccttatgcgttcagcacagacgcarccatccatttttccccctgaatattttcgacccacggttggttgaattgatgcggaacccgcacataacaagagggcaggctctatcccatgaatcctgtttagtaatttgctacatattatcatcttacttattcctgagactgttaaggctgggtagagagttaactttattaccactgtaaaatctcttgacagcaacagaaataaacaagtcctttgttttctggaaacattaagaatatatcataaatttattctgagacctgtataggctactaaagaaaaccacatttgtgctctatagtatgctcttgtgggtgttgttgtttcaggacaagctggtggtggagtgtttttcacaactgaaggtccttaacaaagtccttgccatcagggagcagatgtctgcccttggggagagtggatggcaggaagacattaaccgtctccaagtggttgcttctcagtggacattaaagaaaagtctcctgcaagcctggggactgatcctcagagcaaatattttggaagatgtcagcctaggtaaaatattctagcacttggctagctgacagatgctctgaaaatatcctcttgctggtagttaataagttttcccttagatttttcttttctgggtgatgtgaggggtagagtttatatacctttatataagtgtcaggcataggactaaatttcacatatatttttaattccatcagaatcatgtgggtattaatatcatttcacagatgagaatctcaaagcttaggttaaggagcttaactctgattagctcaagttaagcttgcagtcacatagcaggttgttgagaatctagaggctatactcttaaccattgtgctctcatacaacatttgtctttttgtccagatgaattgaagaattttgtgcatgctcagtgtttagaactgaaagccaaaggactctcacttggttttctggagaaaaagcatgatgaagcttcctccctgtcccatccagacttgacctccgtaatccacctcaccaggagtgttcagttgtggcctgcaatggagtacctggctatgctttggcggtacaaagtgacagctgattttatggcacaagcttgtctcagaaggtaaaccatgctttcagttgttttccttgcgggaactttttttcttgattattctgtgtatcctatacccataaacaaaccacagacttgatagggatggttaccgaagcagagggaagtgatttgccactttggaaagccaaaatttattgaaggttttttttttactagttttgactctactttaaaagtcaccgagaattttatcagtagagttgttcatttttagataaatgtactgtaagttttatgttacaccttccctaatgtagcagctttccagtagttcattgatagtccataccccaccctctccctctttatttttggaacagatgcagcaaaaatcaacaaccccagataaatgaggagataagtcmcctcatctcattttgtctttatcacacacctgttacacctcaagagcttcragatctgtggtccttgctgcatcatcagaaggtaaaaatcacaataagacataagcctcctttacattatgagttggttagattttctttgacagactggttgggaaacattttatttattctcaaaattccatattggaaacctcaggtttttttgaattgcctcttaaagggaagaattttaaatattcttttatagtaattatgagggtatattacaactcttatcacaggagtaytcatttggtttccaattaaatgagatgaaaatatttgctgcttaaaatctcccaattgctcaaaaatatattgtgagagtgttttttatacttttttgtacttttcctctctaataaattgaatatgaatactggtacactcctgttaatagaatttcattagtacagctttaaataaaactgtaaacatgtcacattccttgaccaagttgactggggtggcagagaaacggaaaaatttggattaatacctttaaacttatgacagttttagatgggccttagaagaaagaagacctaataatttatggagtctttctcaggtattctcttacctaattattcctttatttctaggtgtctcctgaaraaattacatctttgtggtccgagttatttaattccatgtttatgtctttctggagcagtactgtgaccacaaatccagagtactggctaatgtggaaccctttgcctggtatgcagcagagggaggcacccaagtctgttttggactccacaytgaaggtttgttggtctaaaattataaaaaatgtttgatagtggcaaaagagtttctgaatggatctatcaataaacatttattcctagcatagagtggtgactaaacaggtgattgcaacactttactttctgcagaatgttaaataagtgtactgtcagtaaaagtataccatgttaaataatttgtgaaattttgagataagtcaaaaaaggttttattgaaaaagtctattttttctaattaaaacatttttcccactataaaacatttaaacagtgcagatatatgtatatataatacagaattcattagaaatatccactctgttctatatccttctgtttacatatatttttatattaaatacatacgtaaacaagaattaagtacacatatatgtaacagaaatgtgtatgtcattccagcttatttttaaaagttattccattgtatcaatgtgcttgaatttattttaatcactttcttaccgataaagtgttgaagtttcttgcattttctccctcttcctataataagcatgccacattgactatcctagtatacatctttgtccacttgttggagcatttctatgcataagttgttagaattagaattgaatccttggtcagagtgtctacacattaaaaacaaaattatggttattgccagactggaaatgtggtttttgcttttcacttttttaaagatgtgaagagccagtgaagagggaagtcctgaagtcttagatgaccacagtgaggtttagtttcctttaacatggagatgaggacctgttcatctgcttgctacactagctgttataaacattttcaatwgtttctgtcatatagttaaaaagaactcatttgcacttctttgataagtgtgaagattgaacatattttcacgtttactgatcccctttagttcttctctgaattttcgagtcatagtygtgcttttttttaaaaaaaattgtgttggtcaggcgctgtagctcacgcctgtaatcctagcactttgggaggctgaggtgggtggatcatttgaggtcaggagttcaagaccagcctggccaacatggtgaaaccctgtctctaccaaaaatacaaaaattagctgggcagtagtggtgtgcgcctgaatcccagctacttgggaggctgagtcaggagaatcgcttgggcctgggaggcagaggttgcagtgagccaagatcgtgccattgcactccagtctgggttacacagtgagaccctgtctcaaaaaaaaaaaaaaatagggttgttcagcgtcagtttattattgaagatctttttatgtattatggatattaagcctttgcccartatgagttggaagtatatttctagttttctgtcatctctcaagtttgttttcttatatgtcacaagttttataatttttttccctccaaatatgccagtcccttctacttattgactttagtgtcatgcttttaaaaaatttcttcctccatcacttcgagttcaaaactattttccattattttctcctatatttttattttatgttcaaatctatttcatcagtatatgttgttttatgatatagggatgcaaattttttcttttatacaaacagatccaaaagcgatgtaataacatcattttgactaattcctcctttccactctcatgtgaaatgccttattgccccaaatgtttttggatttacctgaactctattccattcttttgcactatcaaaatggatttattgtaaaacacccctcaaagcctttagtgataaactttggatccctgagggttgtatggcattatacagagttgactatcacacacatttggctgtcaccctttgacaaccctttgctgtggacagctattactgtgtcccatctaacagtctaaggagcacagacatggcatattttgtccctggctcttacatctgtctctcactcctttccttgcaccctgagttggctcttatcctcctgcagtgtgtttstttcccttctgcaagaatgtgctctctgattcccaggtttgcgggctttcctcatgcattactaaagcatccattgctcatttcctagagcatggagtccactttcatttaaggtatactaacctgttctgtccttctaggccagtctctgagtgatgcttacctgttccaagcaacctgaactgtctgtttctttcctctcaggttccctaatgctgcttctggaaattgtcttaatttctaaaagttattgactcttctcttgtcctttagggccccggcaatctcaatagacccatattctctaagtgctgctttgaagtcttaaccagcagctggagagcaagtccctgggatgtgagtggcctccccattctttcctcctctcacgtgaccctaggagagtgggttgagagaactcagcagctccaggacatcagttcgatgctttggactaacatggctatctcttcagtagcagaattcaggtattccctcgccctggaagcagactgtaaagttcctgtcttttctccacagcatggagcagagacccagtgagaacttccttctstagtggctagttctggtgtttgaagtgagggtattttctgcctgaatcagcatgttttcaggctaccgtgagctggctggttcccatgtcagttttaagcatattgtgatcaagagggtgaacttagtaaaccaaataagaccatgtgagaacagaaattcacctctacatattgatgctgcattctgtggttatcatttcttgagagaattatactgtatgaaaaggaatgctttttgatacagtacaaacctttcagtgctttctttttgtccccacagacgcacggattcccaactccaggggcaggtgctgttccggcacctggcaggcctagcagagctgctcccagagtcccggcggcaggagtacatgcagaactgtgagcagctgctgcttgggagcagccaggccttccagcatgtgggccagacacttggggacatggctggtcaggaggtgctgcccaaggaactgctctgccagttgctcacctccctgcaccactttgttggtgaaggggagagtaagaggagcctgcctgagccagcccagcgtgggagcctctgggtgagcctcggcttgctccagattcagacatggcttccccaggcacgctttgaccctgcggtgaagagggagtacaagctcaattacgtcaaggaagaggtatgggaggcaagagtwtggagcatgggctccttccctgacgtgctgggtttgcttattgtattactccttttattcccttttgggtgctcagatcatcacaagcatgatattgcataagttgccttatgacttcccaggagtctgttttagagactgtattttcccctttgagagttgtcctgactatactcatgctctgggaggagcccttcctaaggttctgagrtctctgccaataggtgcaatgggcagagggcaggtagaaaacctgagccattgtcagaaatagtggtacctctcactgtctctggactctctctacctgagcttagttttggatatttgggtttttgtttgtttgtttgtttttgagatggagccttgctttctcgtccaggcaggagtgcagtggcacaatctcggctcactgcaacctctgcctcctgggttcaagcaattctctgcctcagcctcccgagtagctgggattacaggaacccgctaccacgcctggctaatttttgtatttttagtagagacagggtttcaccatcttggccaggctggtcttgaattctgacctcaagtgatccacccgccttggcctcccaaagtgctgggattataggcatgaactaccatggccagcctggatttggatatttctttagatagaatatagtatccctatatcctaggaatttttaacttattggtgcttgctatctaaaactcaagaatcaagtagaggctgggtgtggtggcctcaccctgtaatctcagcactttgaggggctgaagtgggaggagcagttgagcccaggagtttgagactaacctgggccaccacatagtaagattcctgtctctacaaaaaargraaaaaaaaaaaaagctgggtgtggtggcatgtgcttgtaataccagctactcacgaggctgaagcaggaggatcacttgagcctgcggggtcaagcctgcggtgagccatgactgcaccactgcactccagccaggctacagagccgagaccttgtcttaaaaaagagtcaagttgatttgggtaatgtggtatcccttgctatttgaagttttgaaccaagttcaggaactaaatacattaagatgatggtatgttagtacatattttgaagaaggaaaattatattagttggagtgaaggctaagctcctatagcagagagactaaaaaattcagtggtgtaaataagatcgtttctttcccctcacagctctgatgtgagtggtgtagattaatggagcagagccacctctccttgggtcattcaggaacccagattccttccatcttgttcctctacgtgtccccaggacattgtcctcatgtgcatggtcatagctgggacacagtggactaacttctctcttttccattagttacaccaactgcagtgtgaatggaagacccggaacctgtcatcccagctgcagactggaagagacctggaagatgaagtcgttgtcagctactctcatcctcacgtcaggtaacacagcagagtgattatttgttttggggattattgactctccttttgatgtaatgtagttatggtgtgagtagaagtgataatatacacctctaaactacattagcaattagatgccaaagcattgtttatagtcaggaaaaataatatgccttgtgaaaggaggagaggggggctattcaargtgtgtgttcacatggggccaagatgtttgaagccaaaacttagtctcagcatagaagaagtggggtgtgatagtatgcactatatttctctgctattcttggctgtaggtgtgttactaggaaatatggtacgggttggggatcccttatccaaaatkcctgggaccagaagtgttttggatttggggttcgttttttttcttcagattttggaatatttataccagttgagcatcccrgatctgaaaatctggaatccagaatactttaatgagcattttctttaagtgtcatattgtctggcagtcaaaaagttgggagcattttggatatttggatttgggatgctcagcctgtatagtgtagtaggttctgagttccagtcctactcctgacctttggttttagacattgggtagatcacttaatggcttacatctcagtgtccatatcagcataagaagggtaattgtagttatctactccagtgagtcatgatgaggcttcagtaagatatgcatctgagcaccagcaacatacatgacacagtaactgctgtgtaaatgttatccattttcattaactaattgtcagtattatcacaactgagatgatattggaaatattatttcgcagcagctgatgtttcttccttcggttttcctagctgaggatccaatctagatttgctgctcttcttctgacataattggcatattgtgttaatttcccgttaggctgcttcgccaaaggatggatcggctsgataatttaacctgtcacctgttgaagaaacaggcctttagaccccagctgcctgcctacgagtccctggttcaggagatccaccactacgtcaccagcatcgccaaggcccctgctgttcaggatctgctcacacggcttctgcaggccctccacatagatgggccacggtctgcccaagtagcccagagccttctaaaggaggaggcctcttggcagcagtcacaccaccagttccggaagcggctgtcagaggagtacaccttctatccagatgccgtgagcccactgcaggcatccatattgcagttacaacatggcatgaggctggtggcctctgagctccacacctcactcyacagcagtatggttggtgcagacaggctggggaccctggccacagccttgctggctttcccatcggtgggccccaccttcccgacttactatgctcatgcagacactttgtgctcggtgaagtctgaggaggttctacgaggccttgggaagctaatcctcaagcgctcaggaggaaaggagctggaaggcaagggccagaaagcctgtcccactcgggagcagctgctgatgaatgctctcctttacctgcgctcccacgtgttatgcaagggagagttggaccagagggccctgcagctcttcagacatgtgtgtcaggtgagccatctctgggaggcctgccctgcccttcctcctgcagagagccaggttcacagcagggcggcctgcaggacattagcatgcctagtagatacacagtgtcgttggggcgtgggcattttgttttctgttccttctttttccctatttaactatcatgtttggggacctttgcctctcaatttttaagagattaaaaaaaaatgagagcggcctttattatacactacatgtgttttctcccagtttgtcagttgtcttttgcctttttggtaattttgccaggtacttatgtcaacttgcattaagatgttcccttattaataaaagtaatttgctctcattgtatgcaattaagagaatactaaaatttctaatgatcctaccacttaaagctgtataaacgctgctaacataccaggtatcccattccaggcttgcttgtatgtgtatatatattaatatttatctgtagctgtatgtctgtgacactctaaattattaaaaatttgtcccagtggcttacaaatttttttttgtagtagcagcagcttttaaaaaatacaaatcttagcatagttaacagaaaaaaagagttgctccggttaaggtagattctaatccccaccagggcccctgagacatgtccttaaattgctacaaaatgtacaacaaaccactagtaaagtttattctatttgataactctgtttgcttttaaaaacttcatgtatagtgattattttcctgttattctgtattcttcacctgcttcatatttagtgactgccaagtattctattgtatgtttatgacacaagtaatttaactattttcttatcattgaacatttacatttgtatatacttttactgttttgccaaaaaaacaaaaaaaaacaaaaaccaacccaatgccacagtaaatagtctcacagctatatatttggatacaaattttagagatcaggattgctgggacaaagattaaacacacttcttaggctttacatgcaaattaccttcctagatggtgggtgcttatttcctcaacctcagcagtaccggatggttctttaagttagaatttttgccagtttaaagatctaaaatcttagaagtggtagggaatttcagaagtgtctggtaagacacattccagttttgcctgattggtgccctttgaccacccagtccctagtctaagtgtttcttttctgaaccccttggccagctccttggggtgccacccaggtgttgtctgaaccacaaccctctcatggccaaccctgagtctgtccttgttacaaagcacctttacctcttgacaggaagttcccattagctgtactgtggcaagttttacaccttcaaaattacaatgacacagcaggggggatttaggaaactggttgctgaggctacacacttggaaaacaaaacccatttgctctttattccatggaatttagtttcttggatgttggcttttatttgtttttgagtcatgatactttcattttcatgagaaattaatagcaaatcttgcctttgtgaatgcctcagcaaagaaagctcagcttctttctgtctgtgtgactttcaggaaatcatcagtgagtgggatgagcaggaasgcatagcccaagagaaggctgagcaggaaagcggcctgtatagatacaggagcaggaactctaggacagccctgagtgaagaggaggaggaagaacgggagttcagaaaacagttccccctgcatgaaaaggtagagcagtgatggcagggtgtgttttggaatgaattcccttgatgccatatacattccctctgatggctttctctcttcctctttatctctctctctrtatgtatgtattttagagactgggtcttgctctatcacccaggctggagtgcagtggcgcaatcatagctcactgcagcctcaaactcctgggctcaaacaatcctcccaagtagctgtgactgcatgtgcatgctaccacaccctgccgtttttatattttttacagagacagggtctcactatgtcacccaggctgtctcaaactcctgacctcaagtgatcctccctcctcggcctcccaaagcacagggattacaggtgtgagccmctgtgcccagcctgtagtcttttaaaatatattttaatacatatattagtcctatttcattttttcagtcattcttatgcttttttctttcttccttttagtctgattagaagtagattctgatttttaaaagttcaattgctctaatgctatttataggactttgcagatattttggtgcagccaacgttggaggagaacaaaggaacttcagatgggcaagaagaggaagcaggcacaaacccagctctcctctcccagaattcaatgcaggcagtaatgctgatacaccagcaattgtgtctcaactttgctcgatccctctggtatcaacagactctgccgccacatgaagcaaagcattacctcagcctgtttctgtcttgctatcagactggggcatcgcttgtgacacacttctaccccctgatgggtatggtagtttacttttgttatgcccctgggaaatgaaagcaaatgcaaatagatgctgttgctactctgtaacaatcacactcatgaatttcctgttttcgcataattccttattggagtttccttggcttaaagaactgaagctgattcaagaaaattgatttaggattctgtaataagatggattttcatcagtgtacaaatgggccaagaaaaagatggatttttattgtttggatcctttggggtgagggattaagaaaataaggacaaggacttaatttaaatgtgtacgtgtatgtgtttttttttccttagcattatttctgctgtcaaatagccttagtgcttttsaaatgaaataacacatacctgggagcaaccaatcttgtagaatatggtttaatagttggttcattgcagtttcctacatgatttcttggcattatttcatagaagtaggaaggaggctttaagtttcctttctgtttacctagaataggtataaaaactgggaatttggatgcactgagttaacccctacaccatttgtttatacctaggcagtttctgacttcctctgcacattccagaaacttgagagctttaggtagctactatagtattaggattacagttctctaggccaatgttgctttaggggagaatagcattcattagtcycaattagttcattgttgctgatgttgctgatgctctgtttctcaggctggagtgcagtggcacaatctcagctcactgcaatctctgcctcccaggttcaagcaattcttgtgcctcaggcccgcaagaagctgggattacaggcacatgcatgtctggctaatgtttgtatttttagtagaaaagaggtttcaccatgttggccaggatggtctcaaactcctggcctcaagcaatctgcctgcctcggctccccaaagtgctgggattacagacatgagccactgcacctggccctgttgctgacatctttttgacatgttgatagatcaacttactgaattcactgactttaccgtgatgttaacttcacaggagttgaactgaatgaccgactcttgggcagccaacttttggcctgtaccctctcccataacactctttttggggaggcaccctcagacctgatggtgaaacctgatgggccctatgacttctaccagcatcccaatgttccagaagcacggcagtgtcaacctgtgcttcaaggtttctcagaggctgtcagtcacttgctacaggactggccagaacacccagcgcttgaacaggtagggcagctgttgaggaaggagtgctyacagtactgagtctgcaatgaggatgcagcctcaccattatccctgggggcacccacttgcacatrtatacatataaacaaaggcttaaagaactgcagttcaatgagatgttacttactaactgcaggatgaacacaccagttttgtatttctcttgtgtaaatgattggggattctgttaattttatttgttggtcaggagttgctgaccacataataaaatgctgccatgttgctctgttttttttttcagaggtgttttaaaagtagagaactggggggaatcttctggtcaggactctcttcagtaccctgtgacttaggatcactggtattcctactgagatacccaaatctttatttctgcagctcctggttgtaatggacagaattcgtagtttcccactttccagtcccatctcaaagttcctgaatggcttagagatccttctggcaaaggcacaggtgagctaatacctctcttcctcattttagttggtggtcagttggcaaaagatacgtcttgtggcacctttgttgttagacagaaaattatagtttgggctagaaaaaggtaaacatccttggtttttctggcatggggtgagatcattgcaagtgaggctgttgcccctgtggtgagggctagctgccttgccttttatccagtgggatgcagtatctaccrktaatgagggtgcactcctcccagccttccaggtgggccttcattccaactgagtgcccacatacacggttcccctcagtgccctcatggcctctaagttagctgttgcctccccattggacagaaaagggccgcatgtctttgttctaggtcagatagcaaagagcacgaattcaggctccagtctataaacactgtgcttttttgccagcctctaaacttggctctggtggagttctgtcatgtgaacagaaagaacttgaagctgatacactgtaaattcattcctacaattggtgcaagttgtttaagggcccagtagtcttcactcaagcaaagttcaagatgttcttgaggaaggaggtgattatggcattgaataatatctgtagtaaattttatctttgtttctttaggattgggaggaaaatgcaagtcgagstttgtctttgcggaaacatcttgatttgatcagtcagatgatcattcggtggcgtaaactggagctgaagtaagtgactctccttccctctcctaaacttaggttgtaagggcttttgtcttttggtagtttaaatttctttaggatttatatagtattacagctacagaatgtgcttttcagttattaatcacagagttaaaagtagggcattaaaatgacctgaatacagtccagacaacagcatatattcttgagggaggaaactgggtggctcctccatctccatttgggaggagagaaatgtgagcatgtagcttctgcatctttggtttcagatatttcaaataggttttcctaaatgcctccttggcttcttctcgtttcagctgctggtccatgagtttggataatactatgaagcgccacaccgagaaatccaccaagcactggttctccatctatcagatgcttgagaagcacatgcaggaacaaacagaagaacaggaaggtaatgcctagcagtacatttcctgcccacttagagcttcccggctaaatggagtgctgcaaagtgtaggattttcctgctcccgcttctcccgctacatggctttcatgggaatgcctcccatttgacttcatgatatttctgagaggtcagccaagaaaactgtaaatcgtgcttatctaactgagagaataataacaaaagtgtgagaggtttaaatgtcttctccaaaagtctagagaaccagtcgtaggataaggtttccgtcttctctatgtccatgatagaagtcaaactgaaagctgactttttggtaggtagtagccaacatgcttgaatgaacagtcttttattttatacttgtgacaagcaccttataattcattttcataatttgctgtgagtgcatttaacacatgctctatgtgcagctgctacttttatttatttatttatatttgttttttattttttttttgagacagagtcctgctctgttgcccaggctggagtacagtggtacgatctcagctccctgcaatctccgcctcccaggctcaagtgactctcctacttcagccttctcagtagctgggattaccggtgcccaacaccatgcctgtctaatttttgtatttttagtagacacgaggtttcaccatgttggcaaggctggttttgaactcctgacctcaaatgatctgcccgccttggcctcccagagtgctgggattacaggcgtgagccaccacaccggcctgttacttttaaatcagcttagaatttagccatggtccttgcttgagagcttcacattgtgatgtctacctcttggccatccgtagtatcccaaatagattgcgtgcatgttaggaatagggagtcatggtcgaaggaacatatatatttttctctttgaatttttaaagatgacaaacagatgaccttgatgttgctggtcagcacattacaagcatttattgaaggatcctcgctgggagagttccatgtgcgacttcagatgttactggttttccattgtcatgtcttgctgatgccacaggttgaaggaaagggtgaggatttttttttcctttcctttgacattgcacgactaaaatgagttaggctttgaattctctgcatgagacaggtgccttgttgcacgctaggttttaaacaagacacatttagttatgtttaatgcgattcacattagatatagagaagaacattcaaagtgaggtgcagatggttataagtttagtactgactagtgagctctggcagaggtaaattgccagatgaagatctcaggacctaccatgttgaggcagcacatctctctgtctagacattgtaaatgtcctgctaagctgctccttgatccaggccattattagtttctttcatccagtgagagcactgccagccatcaaggaactgcatctaaaactgcccgctgtcaagtactatccctgatcacagcaactgggataaaagtctcactacaagatgagtatagattgtacatgaatgagcatttgaggtgaactgcttaatatgccatcttttaaaaaaagctcagtttctgctgattttacartaagtttcacagaaggaatttgacattgtgattttagaagaacctaggagtacatcatcttcaagaacaaaagtgcaaaaaaacatctgttacaagcagaagtgaaaaataggggagtgttgacagcctgcatctctgggaaatgctaaactcagacaggatccctaaataatgcacctgtgaaactcactgtaatctcatggcatagagagtaatgaggaagggtcatcactgaaatatgaaggccacagctggcaccagtagcacatgcagcaagtgtggtatttttgtttccttttcatttcttccagattcactttgcagtgttctatggaatttgtaccattattacaagcaattctttgaccgggtccaggccaaaattgtggaacttcgttcccccctagaaaaagaacttaaagtaagatgaacagctgtcatgatcactcttgggaggacaaaatcagcaaattctctttcgttaaccctgttatccatttaacactgaggcagggacctaggggaatagaggtgagcattgccaccgctagggaggatggcaatatgtacatcggtggcattggcttcttttgtcacctgcagagtgtgtgagcgattggtggagtggccagtcagagcctcctcagaggactgccacagaaatctgtttgtgttcccctggtcttgcccaggcctgtctcccacctcagagctatgccatgttgtgttggtccacacactactgaattaccatgggggaaggagggaccgctctttttgatattctcagtggttgtggaaccaaccatggtacaagggacatgactaacttggtggttcctaagctggagtatatgtcaggtgacttaatgactgtagcagcactcttttttttttttttttttwaaatcactttgagaccaaaacatttgttgtttttgtttttgttttttgagacccagtctcaactctgttgcctaggctggagtgcagtggcacgatctcagctcactgcagcctttgcctcccgggttcaagcaattctcctgcctcagcctcccragtagctgggactacaggtgcaagccaccaagcccggctattttttctatttttagtagagacggggtttcaccatgttggccaggatggtctcaatctccttaccttgtgattccgcccaccttggcctcccaaagtgctgggattacaggtgtgagccaccgcgcctagcccatggtttcttttttagacttgttttacttgttcactgacacacagtcctgtgtttgggatagagtgagctctggtctttgctgaacagaaatctagaaagaaacagaatgacactagctttataaagccatttcttgaacatcatttatcttacaggaatttgttaagatttccaagtggaatgatgtcagcttctggtccattaagcaatctgtagaaaagacacacaggtaatccatcttttaaaactggagacaaccaaaatagaatagaattttgtgtggtagggagcaaaaygacatagttaccataacctaacttaatattaagtgtgttaaacttctcaaaaaataacaccttgattgttttgatgttgctttcaacaccacccccttcttctccaagcaaagtctacctgcagtaaggattagtgtgccttgagacaaagcaggctatgtctcaagtcttctgccacccactagctgtatactttgagcaaagcaatcccattctttctggctttagtttctcttctagaaaaggaggataacagtacctgccatactttttctcttaaaaataaaacaactattaatatttaaggagagcattgtatataaaaggtacagggtattagattatgtatggatgcatgataatgtattttttatatgtcttcacttgctaatccagtttttttcttcttatctctgtcattacctggggacaggacactctttaaattcatgaagaaatttgaagcagtcctgagtgaaccctgccggtcatccctggtggagagtgacaaggaagaacagcctgactttttgcccaggccaacagatggagctgcaagtgaactgtcttccattcagaatctgaacagggcactgagggagaccctgttagcccaaccagcagctgggcaggtacttggttgtgggacagtgctggcttattcccaagccagtcaagtgggatctgtgttttatgtgcaaggcatgcctcagtactagacaagaaaatgcctttgaaatcttgttctttggacatatatagcatgtatttgcctgacttccctgcagaataaggcaaaaaatcttggggtttttttttttgcttttttttgagacagattctcgtgctattgcccaggcatgattatggctcactgcagtctcaacmtcctggactcaaatgatccttccacgtcaacctcctgagtgctgggaccacaggcacatgccaccatgcctggctatttttttttttttttttttttttgtagagatgaggtctcactttgttgcccaggctggtcttgaacttttagttttttttttgtttgtttttttttttaagacagagtctcgctcaggctggagtgcagtggcacgatctcggctcactgcaagctccgcctcctgggttcatgccattctcctgcctcagcctcccgagtagctgggactgcaggtgcccaccaccacgcctggctaattttttgtatttttagtagagacagggtttcactgtgttagccaggatggtctcgatctcctgaccccatgatctgcccacctcagcctcccaaagtgctcggattacaggcgggagccaccgctcctggccgaacttttagtcttaagtgatcctccctgcctcggcctcccaacgagctgggattatgggcatgagtcatcgcacttggccttgctgcttaaaatttaatgtcagcctgtgagaaataattgtgcttttacctgtgaacatttcatctgctatgagcaaagatttgaagcatcagtttaagaatatgccgttgaagctgcctgtgggctaccacatgaggaagctactgcacagggtgtgaatatgtgccgtgatgtgctggtttatagcagatgctgattactgtggtgtaaatactcctattatggccaatttcaagcaccaacagttaagatttggcttgcaaaattcctgaaaatttaacagtgatacatcttgagttagcaggtctgttacagaatggatgttcctgcttcatgtccttgggtgtggggagctccaggattggaagacacccctcaggagagtaatttctgggcaggcgtagtggctcacggctgtaatcccagcaccttgggaggctgaggcaggaggatcacttgagcccaggagtttgagaccagcctatgcaacgtatgagaccctgtctctccaaaaaaaattactttttaaagagtaattagctttgtcttcttactgtatttcctacctggggctcacagagttagtaatgaaagtccttaagctatttttgttattttagtggttcaaaactcataatagaaactgagcatacagccataagatggctgcagagatatgatatggctaccaaatttattttcttttgactgtatttgtcagctcactgcttctgtcattctgatcaacaattttgatttgctaataatgacaacataggagtttcaggttattcctcaaggaaaaaaaaatgaaaatatgcccttgatggacgaaagctcttcccttcatataacatctgaaytcctgtgtctgaggtgcggkggctcatgcctgtaatcccagcactttgggaggccaaggcaggcagatcatttgagaccaggagttcgaaaccagcctggccaacgtggtaaaaccccatctctattaaaaatacaaaaaatagccaggcatggtgatgcatgcctgcaatcccagctattcgggaggctgaggcacaagaatcacttgaatctgggaggcggaggttgcagtgagccaacatcgggtcactgcacttcagcctgggtgacaaagccagaccctgtctcaaaaaaaaaaaggaaagaaatctgaattcctgaaatttaaactgttaattaggggtaactggtcacaggagtaggaccagtttcgcctggctgctgtgtctgagaaacacaatgtggctcagcaccttaagggcagcagtgatattattcattctactctgttcataattcagaactggagtctccttgtggctatcatagcaagcattgctggatgtaggggcatgggggtccttcagttataatgatctcatatggagcagtaatatggttttctaaatakccacagtatgtctcttttaattttagtgatgctacatttgttctctatttgctgaactagggatgtgtttttgtgygcaacagttaaatttagttcccttgcagggacactgcctgtcattcttggcagtgaggctaacctgtcttttgtctcacaggccacaattccagagtggtgtcagggckctgctccttccggcttggaaggggagcttctgcgtcgcttgccaaagctcaggaaacgcatgaggaagatgtgcctgacgttcatgaaggagagccccctgcctcgccttgtggagggccttgatcagttcacaggtgggtgccagcatccaagtcaagggtggatctttctgttttccccagtggcgcaggagggctgagaatgtggcaactgtgtccttttttgataccttgtgtagtgttgaacagttgattgaataagcaagtgggcttaaaaacccacagagctcagaaacaggagcctactgagaacacacaatcataattttcacattgtcgtcctctcatgtaacttggcactgtgccatcttttatgagagccttgtctatactagttcctgttggttggtgttaccagtaaaggggcacagaggtggatttcccagtgtctaagctgtccccactgtcaaaaagttgtctcacttgaggaggattcatccccatcctcttgctttcttcacttcagagaggcacagcagtttcatttctcaggctgtctttgctcagggaaggtgagagcgaagatctcatagtgtaacacagcaatagctgggaagggaacccagaatttaatagaatgtttgggcccctggcagcctctgactacctccttcaccccatctaccccccaactgcagtgagtgtgctgtcagtgagggtggcctkcctttaatgaggttgcatctaatctcagggagctcttcctttttaaaacttgtcagccgttgctcaaggtgactcaggcctaggggtgggggtgagtggaatacagatccatttgcatctcctggagaggggatgcgctgcaggatgcaaagcctccctcatcctctaactctcccacactgtctgatgtctttggtgtccttgtgctcactggtgactgcctatatttggctggtagtgctgccttaatatagtaccacagactgggtggcttcagtgtgaggctaaaagtccaagatcaaggtgtcagcaaggttgattacttctgaagcctctctccttggcttgcagatggccaccttctcactgtgtcctcccgtggtcactcttcatctgtgtgttctgtgtcctgatctcttcttttaaggacttcagtcagattagattagagcccattctcatttcaccttcattacctctctaaaggccctgtctccagatacagtcacattctgaagttctaggggttgggactttaacatatgaattgagggggaagacacaacccagcctataacactgcctgcaacagggaggcggcacccttgtgttattggtacccacgtgtattcaggaaggcagcttggtgctatatagaaagaacttgggctttggagtaaggtaggccagtgttcaagtcctggctcatctactcgttcaccacatggccttcagatagtgactagacctcactgagcctttcttgaagtctgtaaaatggagctacaaataggtgcttctgaagttgtgcacatgaaaagagaatttacgatgtactagctacaagtggaaactcaatacatattatattaatctgaaatttccttcaagtgattataaatttctagtataatgcactgcacatagttggtgctcagtaagtgcatttgcttgattgattataaaacccctaaatacaaaagaatgactgctgctgttcgggttgttattgtcaagagatttgaaatcctgtgtgttatttttctatttccatgcaccttgaccagtttggttaaaacacttaatgagattttaccaaatgctagggactatgttaagtacccagggtataaagatgaatgatacttggcctttgttctccagaaggtccctggtgttgggtracaaacacattaccagacccctgggattttcttattgtctcccctccccgccttgttttcccttacaggtgaagtgatttcctctgtgagtgagctgcagagcttaaaggtggaaccctctgcagagaaggagaagcagcggtcagaagccaagcacattctcatgcaaaaacagcgagctttgtcagacctctttaaacaccttgcaaaaattggtaaggttctcacttgaaacccaatgaaatgtagtcaccaacttttagggagagaaatgacatgactgattttgggggaaattccatagacagttgagatggtggacaacagaaggtacaggcaaggtttccagatgtctaagagttccactcacatgcaggaaaatcctatgaccagccatccatgattcccaaatatttcccgctttgtatgaggtttctcggaatctatatttttatttatttatttaattaattttatttttttgagactgagtctcgctctgttgcccaggctggttagtgcagcggtgtgatctcagctcactgcaacctccgcctcttgttgcccaggctggagtgcaatggcgtgattttggctcactgcaacctctgcctcctgggttcaagcgattctcctgcctcagcctcccaagtagctgggactacaggcgcgtgccaccacacccggctgatttttgtatttttactagagacagggtttcaccgtgttagccaggatggtctcaatctcctgacctcgtgatccacccgcctcagcctcccaaagtgctgggattacaggcgtgagccaccgtgcctggcagaatctgtatttttaaaatttctgtcaccacgtgctgtaccatatgcttgcagcatagcatagagagcagtgcttctcaaacttgaacgtgcatgtgaatcacctggggaatcttgtggaagtgcagctacagatcctgtttcagttggtgtgggtgcagcctgagagtctgcatttctaacaagctctcaggtgatgctgtttagaagactttgctttgagtagcaggggagaggggggcacatccattctctactaagcatctttgcttaaagaaatgctgtttatttcctaggtttgtcgtatcgcaaaggtcttgcttgggcccgttcaaaaaaccctcaagagatgcttcatcttcacccattagatctccagagcrcattgtccatcgtcagcagcactcaggaggctgattctaggtttgtctgtttttgttttgttttttccctacttataaatggagcaagtaatttaraactccttgtcctcatttgcacattgcaaaaatagggatagcartaccactgtggctaccacttacaaaagtgcctggctcaggatctgactcctgatggacattcaaatgaaagtgtgaggctgggtgcagtggttcatgactgtaatcccagcactttgggagtctcaggtgggcagatcacttgaggtcaggagttcaagaccagcctgaccaacatggcaaaaccctgtgtctactaaaaatacagaatattagccaggcatggtggcacatgcttataatcccagctgctcaggaggccgaggcaaggagtatcacttgaacctgggaggtggaggttgcagtgagctgagattacaccactgcactccagcctgggcggcaaagtaagactctgtcaaaaaaaaagaaaaaaaacatttattttctttctctttcttccttgcattcacctctccattcttcttcttcttcccttttttttttttttttttgccttttgattttcctgaggtctacttgcttcatttgatcatacatgtggaaacctattagaaaatggtatatttttagttgctctatatacatacactcctcataagttctaatatgttattgaatttgcgagtccatacactattgagacaggcagagctacctctgtttacaacacagcagaggatgttgtgaatgatgctttgcatgaactgggtatagtacacatgtgtgttttatttgctcccagggctttaaatttgaattcaacagaacattgtagaaaggggaaattttacataagcattctttttcaggaaaattcacgaagtgggcttgcattcccattcagtcagcagcactgtagctgaatagtagtttcctccttttgataggacacatgctctccagcttacttgagccctcaacaacccctgtgtcttccccacgttgaggtcagctgtcactgccatgcatcattgtatgcttggctgtccttagtcctcttatgttatttgcctggcccctgtaggcatcagagtttatgaccccctagcctccactgccaagataggaagatttcattgaagaaaccatgttgtcagcataatttatttcccctgatacttccagtgctgagttaagtaaaggactratgagtgcctcactgaatgattcctcatagaaataaacctattcagacagctgactcttggttatggccaaatataccaatatctgagttttcaggatctggggtgggagagcgtggttttaattaagtaaacaatgttgatatcttttccaggctgcttacagaaatctcgtcttcatgggatggatgccagaagtatttttatcgctctcttgcacggcatgccaggcttaacgcagcactagcaactcctgccaaggtagaatgatagaacatgagtcttgcaggggctcagggaaagcccttgttctgttcatcccagggcygtattctcagaccttgttaagtgataacagcctgttagtggaactgagctttttgcagtacatccttaaacttaaaatataaatcaatgtaattttgtgcaaaatcagaacaccttaaataaattcagttacacttgccagcaggacagattttcttaatgtttaagaaaaattaaaaacttcaaattgagaatgccatctttagatctttcttccctttgtgaattgagaaaagaccactaataaatgcattttggagttaaatccagttcctgtctatggaatctcaatgatctgtgcaagcataattggagaaacactgctcaaaaaaatgaatatgtcacctctagagtgtggcatgtctgacgcttatagtagaaacagctttctagaggcacatctgtgggtgatgtttgtcagcagccccttcagcatgtttttccttcttctgccaggaaatgggcatgggcaacgtggagaggtgcagagggttctcagcacatttgatgaagatgctcgtccgacagcggcgctccctgaccacgctcagtgagcagtggatcatcctcaggtatcagctgatgagttgggcttgtggcatgaattgggaagaattagatccaagtcagctcagagttgctgcatgtggggagaggaataagacatgctctcaattgtgaaatgaatttaaggcccaaagaggcaggtagggtttctcccagctctgccccttgctttcagtgatatgcctctagtgtccctctccctccgtgctctgaacctcctgagaatatggagctgcagagatttcagggctgtgtcaggcagtgaaaattgttatgggtgaactatacctgtgtctggaatgaggatatacattgccaaaagtccatgtgggccaatagttaggcttstgttcatggtattagggtgagatggtcttgggcaccgatgagatttgagtctgcttctgttacttaggctttggggatcccccagatggcaatctgagccatacatggaggctcctcaatggaaacaaataattaagagatgaggacagttaggaaggttgtcgtcatctgttgaatggattcgtggctgaaggacagtatttccagactattcactttagcttcaggtattttctgctccattcattagggtttatttagcaaagtacagcacatttactagataatgctagttgaagtcactgtagtggtgtggttgtgttgtgatacttctcctgaaagactgagggatgggtttaagtactttgggaggcattttaacagactttttacctatctgggggattcttccttcttgactgtatgaaaaagcccatgcttgttcagaaacacaaatttcttttaaaacaatgtggtaaagtggtttaaggtgccattcattgtgtttttcccatgggtttctctgtacaggaacctcctcagctgtgtgcaagagattcacagcrggctgatggggccccaggcctaccccgtggccttcccccctcaggrtggcgtgcagcagtggacagagcgcctgcagcacctggccatgcagtgccagatcctgcttgagcagctctcctggctcctccagtgctgccccagtgtagggccagctccaggccatggcaatgtccaggtactggggcagcctcctggcccctgcctggaaggaccagaacttagcaagggacaactttgtggagtagtgctggacctaattccttccaatctgagctacccatctccaatacctggaagtcagctgccctctggttgccggatgcggaaacaggatcacctttggcaacagtcaactacgagattaacagagatgctaaaaaccattaaaacagtgaaagctgacgtcgacaaaattagacagcagtcttgtgagactctctttcattcttggtaagtgtgtctatgtctttacacttctctgtgtgcttaggtccttattgtgcttatctaaattgggggtgggaagggaagggtgtgaacagaaagcagcagcttttagacagccctggaacctagggaactcgtcggtttgggggatggggtggggtggggatagggggtgtcatctgcaggttctgagacttcagcggaaacagcgttagcaaaaggatgccagacaaagccctaaataatccacagggagagcaaatcacatcctgccatttgtggtggtccaaaataaaagcctatcacaccaaatactaatgataatggaatatcattaatggaataaatttaccatttattggaataaattaatggaataaatttatcattaatggaataaatttagtaatttattccattactaaacctaggtgtttagtaatagaatcaaattatgaaaataattgtgcttcagtcctctgttactcagtggacctgcacagcactttgtggcatgtgtttagccgtaaaccttcagctatgatgagttctaccttgcatatcttgtagtggttgcagggaggggtgtgtgtttgtgggaactgtaatgcattcctttcaacattgtggcatttctgttgcaggaaagattttgaagtttgctcttctgcgctgagttgcttgtcccargtgtcagttcatttgcagggcctagagtccttgttcattcttccagggatggaggttgagcaaagagactcacaaatggcactagttgaaagtctggaatatgtaagaggagaaattagtaaagccatggctgactttactacctggaagacccatctgcttacttcagatagccaaggaggtaaggaatattgttcagtcagggaatgaaagtccagtgtagaaatgatgtcttatagatgtaagtctcattgtccaaaagacacattatattttggtctacatgtacctgtccagggttctgaggcagggaggtgcggttgaaatccacagctcttaacttttttgccccatttgtttggatgcctgttacatactttgtaacacacataggaaggcagcatcagctcactgtctgttttcccttagattgaaaaagcttggcactgatatttggactaagttagtgtttattcatactgtcttaactgttatttttatattttttacattattttagtaaaaatgttttaatacaaggtaataaacttgtaggtttatcgaggcaaggaatttgtctcttctttgtatctggcacagcttgacacagtggctcatcaataaatgagtatttttaatgatttccagaggcactaaagcaaatgattggtgtcttttgtttgtatgtttgttttgcaccatgttacctgctaggaaatcaaatgttggaygaaggatttgtggaagatttttcagagcaaatggaaattgccatccgagccatcctctgtgccatccagaacttagaagaaagaaagaatgaaaaagcagaggagaacactgaccaagcaagcccacaagaagattatggtatgtctgaaatcaggcagaaattagtttcatgcctgatttaatttttgtatttgatgatttatttctgtggctaaatagttaaggatggatgttagaaacagataactgcatgkatagagataaaaggatttgttttctgttattcatcatgttgttattttctctgaatgaatgaggcagcaggctttgagagactgcaatcaggacatctaacaaaactcttagaggatgacttctgggccgatgtgagcactttgcacgtgcagaaaataatttctgccatctccgagctgttggagaggctgaaatcgtacggtgaggatggcacagcagcaaagcacctggtaactaactgttctttacaaacttcttcctcttcagaatgcactgagcaaaggcagagtgggctttacytccctccacgtagataagtgccagagcaggcctcagtgccaaaatcactaagaacttggtctctttatttatacgtgcaaagtcattgacaagctttgaagagcttagggcttgctagctaattgttagatgcataggtgcagaaatgctaaccattcagaatatccattatattaggattctttcatatcttattcacatactcccaagtatctgatgttactgatagacgatgttatcaactgaggcttagcagccatcctgtgtaaccaccattcccactacaataagcgaacagagtaagcagttgtagtctttacagtaagtccagagaagcaacttactttgcagkacattgtatgttattctgtagcattgcctccggtgctaactttgaatcagcagaatttatttataaacattttatttttcttattttattttgggacacggtctcattctgttgtcgaggctggagagtgtggtggcatgaccatggctcactgtagccttgacctcckgggctcaggtgatcctcacacctcagcctcccagatagctggcagtataggcatgcaccaccatgcccagctaatttttaaagttttgtaaagatgggttctggctatatgttttttttgtttggtattttttgtagaaatggggttttgccatgttgcccaggcaacatgaacttgaactcctgggctcaagcagtctacccactttggcctcccaaagtgctgggattaaaggcgtgagccactgtgcctggccaacattctatttttaaaaaaccaacattgttagccaaaggagacatcggtttgagattgtacttttgtgacgatatatgtaaatgaagaaatctcagtgagctgtgtgtattggggtgggtggaggttacaaacacatacatgtaacttgccattagtactatttagtacattcacaatgttgtgcaattaccaccactmtctagttccagaatggaaacctggtacctgccaagcagtgtgagcaggccttttgttttgttttggtctcagttcttcagccaatcctgttccttgctggtgcgcctggtgccggtcctctccagctactcagacctcgtcctcttcttcctgaccatgtctttagcaactcaccgtagtactgcaaagctgctctctgtgcttgcccaggtctttacagagcttgcccagaaggtaaggactgttcacatggtgcactgtgagcagcagggacccaagtaaatttcatgtcattagtctttggtgtgataggcttttattttggaccaccacaaatagcaggatgtgatttgctctccctgtggattatttagggctttgtctggcatccttttgctaacgctgtttccactaaagtctcagaacctgcagatgatacctcctatccccaacccaccctttcccccaaactgacgagttccctaaactccagcgctgtctaaaagctgctgccgtctgttaacacccttcccttcccatccccaatgtaaatcttcagataactcttgaactagagttgtaggataaacccttaaggctattaagttttcttttaaccatgttggtgtaattatgattaaatgataatgggcctgttattattagagtgtttttcgcctgttgtggtggctcacgcctgtaatcccagcagtttggggaggctgaggcgggtggatcacctgaggtcaggaatttgagaccagcctgaccaatattatgatgaaaccccatctctactaaaaatacaaaaattagctgggcgtggtggcatgtgcctgtaatcccagctactcaagaggctgagacaggagaattgtttgaacccggggaggcggaggttgcagtgagccaaaatcatgccattgcactccagcctgggcaacaagagcaaaactgcatctcaaaaaaaaaaaaaaaawawawatatatatatatatatatatatatatatatgtttttttggagacagagtctccaaaattgtaattgtaattgtaatctccacgtgattacaggcacgtgccaccacgcctggctaatttttgtattttyagtagagacagggtttcaccacattggccaggacggtctcgatctcctgaccttgtgatctgtccacctcggcctcccaaagtgctgggattacatgtgtaagccactgcgcccagccagtttttttctttagcagggaagtcatttgttcattcagccatgtacccggtattgtgaaaagcactgaggttgtagagattgtagaccctccccttgaaactcaggggcagtagacagtgaaatctaacagcaacatggtgtgggtaggtctagtcatagagatatccagctctcggtctctcttaacctcaccaagcctcagtttcctcatttgtaaaatgagatctgcctatactaatatgcatttttgtgagaaccacctgcatttgagtatataagttttgtttttgttcttagcaytctaagattttctccaagcttaatacagatgagatgtacttgaggaagatatgaatttacaaactgaagatggggtctagatttcttataaacaattaagagttcttagttccgagtctctgaaatactggaaagaggtaaaaagtggaagccaagcctaatgccttgtatcaagaggataaatatgtttatctgtagtaatgataagtaacagtaataataataataataaaaagtaataataagtaaaagaatgagtctcaggtttctccgcctctggtgggcaccaggccagccttaacattccattgcttcttggagaaaacactgtatactaaagatagtggcaggaaaatgtgtggttcgggtgccttgagatttggctcagctggatttgtccatttktaccrtagcttttgtctgacaggctgtagaatgactttggcctttcaaacctttgtctgttgcgggtaggaatggttctgatatgtgcagaatgttgggagccctgtggctatcccagacgtagcarctgcaatgatatactctggtaagggcatctgaaactccctcctatgtggtcgtattctttgtctatttctgwatgtctctcatttaaataatgtagttcaatgggaaaattaagcaagtaagccaaactgtattttcctatcaacattctgagaatatatgtcctaaaagtgggtttggcttgttaaaaatttttctaagtgtccaaattgtattcatatcttttctgagtagttcaagggaacttgagagtaggttagacagtgctaagataatagatctaggctgtaattaaagctcttgatccgcaggaagctgtttctgtgtaaccaagtcataattagtgtttactggtttgggatcttaattccttgctaattagcagcttatttttttgtgcattcccatcctcagatatatcttcatagtatatattttctcttacaaaattaaactttctgattgagagtcactactactttttctttttacttctgctcagcaggctagtattcttctcaggttattttcctgtataaaatagtttttttcaacatttcacagttattactatgtctgactgtgttctctccagagcctgttctgcccttactcaaggactttttccaaaatactgtccttctagtatacttcatttaggtttttgtcttggcaaagtgacaaatgaccacatgccagaggcttctacaaagtcaagtcatatgttaaatctratgtcaagctgtgaaactgcataactattagcaccaaagaggagaagaatgtcagaagtctcctgtacttccagcggatttaagataatgagctagaaaaagaattcagtatgtgtttaaattgttttcctgtggcaagaatgaaatctccttttaaaattgcttttgtgcctaattgttcacttcctttttcttttttctaagggattttgcttgcccaaagaatttayggaagattcagctggagagggagcaactgagttccatgactatgagggaggtggaattggagaaggcgagggcatgaaggatgtgagtgaccagatcggaaatgaagaacaggtacgttttcacataggtatacagttgacagaagatcactctctttcttttcaacatgtaagttacacataaaaatggtttttactaggttaataatttttaatctgtgatctacagagccctagatatattggtgcttcggcagtgggtgtaaataaaaagcctaaaatccacaggaaggaacctggcaactccatcattggttttggctataattatggaggaaatgatttttactttttttttttaaatgggcagatatttactgatgattttctagagtatttttgatagtatttttaagcataaaaggcctggctatcttaagtgataattgcattaaacartaatgccaaaatttgctgttaataggttttactgttgtatatctttaaggcatagagtgttttaaaaaatctgtatccttttttggttggaatcaagcaaccttctgaactattcagatgctgtgaactaagattgttacattgcwtggattttttaaatgcctgtctcatttgtgagtgatttatgtgtattgggtgtatcacttatattctaagttaaatcagatcakaaacttgtatttaaggtaattttatagttattaaaaataaaggagaaaaccaattcaaattccctcccttccttggcagagaaaactggaaagcaattaaaagccaaaagaataatgctagtatttatgttatggagctctaattttttttttttggacctatattgtccttagataattgctttgttattttggccttctgtatttctcaaatctaaatcagtgtatactacttttctagtagaaaaaaaaagtcaaaagmaaaagcaaatctaatagaaaagttcacacaaaaaacattacatggaataaaaagcttccagaacaatttggtagtgtctgctgaattttaaattatgtgtattcattgacccccaaattccatgttttcttatagaaatgctagtgtcaaagataaataggtatatgagtgtgtatatatgtctacacatggatatttactacagcattatttatatggtgaaaattgtgaaacaatccaaatattcatcagaagagaattaaattatggcaccatccatgcagaacaatggtaaaactattaatgaagtagaatgagatggttttgtatgtatcaacatggaaataacctaagatcctatttttaagagatgaggtcttgctctcttgcccaggctagagtgcagttctataatcatagctcactgcagccatgacttggactcaaggagtcctcctgcattagcctcttgagtagttgggattacaggtgtgagccaccacacctggctgagatgtttttaagaagagatgtgttttacaggctgggtgtggtggctaacgcctggattcctagcactttgggagaccaaggcaggaggattgcttgaggccagaagtttgagaccagccggggcaacatagggagacactgtctctataaaattaaaacaaaacaaaacaaaaaacaaaacccagcctggccaacatggtaaaactccatctctactaaaaatacaaaaattagctgggtgtggtggcatgcatctgtaatcccagctactcggaagctgacgcaggagaatcacctgaacctgggaggcagaggttgcagtgggccaagatcgtgccattgcactacagcctggacaagagagcaagaccttgtttcagaaaaataaaaatgaaaaaagcagattgcataagtctgtaaagcatgatctcttttttgtttaaaaagatgttgggaggcaggtattggtaactatcacctgtatcacttaagtatatgttggtgtattcatagaaaaaagtcaaaggttcaccagaatgttgttggtagtcattctttgagaggcttcgaggatggaggtgttatggggaaacttgtttttgtttgtttttttgtattttggagacagagtcttgctctctccccaaggctggagtgcagtggcatagtcttggctcaactgcaacctccagctcccgggttcaagagattttcatgcctcagtctcccaggtagctgggattacaggcgcacgccacaatgccagggtaatttttgtatttttagtagagacagggttttgccatgttggccaagctgttcttgaactcctgacctcaagtgatctgcccgcctcagcctcccaaagtgctgggattataggcgtgaaccaccatgcctggctattacttttgtattttaaaaaggacttcttttttttttttttgaaacggagtcttgctctgtcacccaggctagagcgcagtagtatgatctcagcttgccacaacctccacctcccggattcaagcagttatcccgcctcagcctcccgagtagctgggattacaggcccccaccaccacgcctggctaatttttgtatatgtagtagagacggtgtttcaccatcttggccaggctggtctcaaactcctgactgygtgatccacccgcctcagcctcccaaagtgctgggattacaggcatgagctaccgtgcctggccttaaaaaggactttcaaaaatcaaccataatgaaagaggtaacaatcacaaaactttttgccccaaatagcacatcaattatatagaaacatataaattaggctgggctcagtcgctcacacctgtaatcccgccactttgggaggccgaggcaggagaattgcttgtgcccaggagttgagaccagcctgggcaacattgcaaggccacgtctctagcaaaaaataaaaaattagccaggtgtggttgtatgtgcttgtggtgccagctactggggaggctgaggcagaggattgcttgatcccaggaggttgaggctgcagtaagccatgattgtgccactgtactccaggctgggcaacatagtgagacactgtctaacaacataaaaaataattttttatagaagaaatatagaaaccaaggaagaatgaccaagattctcttgggccactgtctttcagcgataatagtgacaaaaatagtattaaagaattggataataaaagattgatgaattttttatcctacaaagaatatatattcttgcaaatgtctctgggactatttttacaattcccaataagaaaacctgaacaaaattctatactctgattaaaacaagtggaaactaactccagaaattttacaaattccatgtggctgtctctgttgtttctcttttttttycctctcccagatatatttttacaccattaaccttggcatttatatctcacagctgaagcaaacattggtaaagtttcatttatttatgtttaatacttctttatgtaggtggaagatacatttcagaagggtcaagaaaaagacaaagaggatcctgattcaaaatctgataytaagggcgaggataatgccattgagatgtcggaagattttgatgggaaaatgcatgatggggagcttgaagaacaaggtttcagattatctgtcacttcattcttgtttttgaaagcataaatattttatccaggaaattacatgttcctaataaggaacccaatrtaatcttttgaaacaagttggttactgtgcttaagtgcaaatgaaaacctcagcagctgcatgtgctatcaccacctccactgaggcagaagtccctggtgtctcatagattcttctcacattgatgttttagctgcctcgtgtgctagatgcagtggctcagtagtgcccttcagggaagcytgaaaggagatgatccctaatggaaaagggctttcaacaaaaggcaaattgttctgtagtgtttaaaataccttttattcctaattagaaaaatagtaggtgtttgttgtagatgatttggaacaaacatgtagaaaagaaatagatcccccctcaggcctaccagccatagcacttaataaatagtggtatatttctttccatttattgcatgtatacccacacagaaaccatataccgttctgtagtctgcttttttctttctttctttttttttttttttaagacggagtctcgctctgtcccccagactagagtacagtggtgcaatctcggctgactgcaagctccacctctcgggttcacgccattctcctgcctcagcatcctgagtagctgggactacaggcgcctgccaccacatccagctgattctttttttttttgtatttttagtagagacggggtttcaccatgttagccaggatggtctcgatctcctgacatcatgatccgcccacctcagcctcccaaagtgctgggattacaggcgtgagccaccgcactgggcctgcttttttcatttaacatcttatgaacattctccctgtcattaaaaattatttgagaatttgattttttaaagtacatcatcatctgtcatatgtttgtaccataattcagcccttgccccaaatttctgtccaattggagataactgtatcttactctaaaatgaatatcttgcagaaatgaaagttgaccttagtggcagttggcctaaggcacataggatatgaccttttgcaaagtataccctgtgcaaagacaaatgaagacaattctgattgagacctgattttaggtgttggaaaaaatcatagcagtatattgaagatggggaggacccatggaaaccacctagtccaaccccatcatttcagacataaaactcaggttgctgagtcccataatggccattcccccagcaccaaaaccagacatcctcataggtatttccttactctttttaccatctgttcacacattatagacttccttgtacctctactttgcaaaacacagtaagactatgtcagtagatctaaaggcatctgcccgtagggtgtgttctgtagaaaaaggcaataaatctcaggtggggcccttgctagggaagcgggtccacacctctcttaaatacacaggactgggtcagtttggagatctgcctaagctcagtgccttccctttcagaagaggatgatgagaaatcagatagtgagggcggagacctggataaacacatgggcgatctcaatggtgaggaagctgacaaactagatgagaggctttggggtgatgatgakgaggaggaagatgaggaggaagaagacaataaaactgaagaaacaggaccaggaatggatgaggtaattcaaagatttctcccctcccaaacaagctgagaggaggtaatctgcccacaacctaccattctctgtcatttacttctcttcttyttctgtatttgttttgttctcttttttctattcctctttttcttttttctatcctatcttattgattacattcagagctaagagtagcttgacctgagtcatcccatgtgttatgaaggaggatgaacaagaccctgtgcagatgttctaagctgattctcctataggccactgattttttccagctcccagcttgggagaactccagggctgagtgtaacactgcaacagcccagggtgaagcaatgaattatcaaactcaccccaccattcacacacttaataatattgcygctgtcatggagacctgcactgttttctctaggtcacggatggcactttatcagccatccatgggataggtccaataggcagaaattatgcatgtctaaaagtcaacccatgcagaagcagtttcttggattgagtgtgatrattgttttttcttcctctgacatttaggaagattctgaacttgttgctaaagatgacaacttggatagtggcaattcaaacaaagataaaagccagcaagataagaaggaagaaaaggaagaagcagaagctgatgatggtggacaaggtgaagacaaaattaatgaacaaatagatgaggtaatgaagatttgaaactgatccgctctcttgactcaaggccagagctsttgagctgtatagttctcaaggtgtctcaagatattttttcccctgttcgtygactgctctcccattacctcataaaagaatatgcaacagaggctcttaacaggacataaaatatataactgttggttcctgacagggtagtccacatgttgtctgggctcatgctatagatcagaagctaaaacctgtgatcccttgtttatttcttcttgtaagtttcttcgagattaagtaacatagcaccatttgtccttggataacctgcacagaaagtgaaatctgagattccaacatgaaaggtctaaaaataaaatactaatgtgtgcagataattttagggaatagatattgtgttctctcacagtgtaaatacttagagctgattttatgggaattctactttttaaaaaaatatttgtatttttattttatccctgttgtctccattgtcccaaagagggactatgatgaaaatgaggtggacccttaccatggcaatcaggaaaaggtgccagaacccgaggctttggaccttccagatgacttgaacctygacagtgaagacaagaatggtggtgaggacaccgacaatgaagaaggagaaggtgcgtctttcagaaacaaagagaccggttagaactcacattagtgaacagtaattgatttctcttttgaaagctagctcagtgtcatggccaggtgataaatcaygtttggtaggctcaatcccagtctgagaaaatggtttgcctttcctttgtagtatttctcatgtgattatccctacagctcatcaaccagcaggtatttctcaaactactgtcatgtcctattctcgcttttggcactgctatgccctggtggtgcttcacacacagcactgtctcttcacagccattactgtgtatcccatctcatgggatggtgtaaacgctgtgcagtctgggtataccaagctgtcgtggagtccagttatagcttttttagggaaatgatggtttcagttattgattgtcatgtgtagtgaggaatgagactaaataatcccaagagaaatcgcatggcatatgacagtatttcgtgcctttgttgtccatttttcaaccctagtgaatcctttagggagtgttatctggtattagttgaaagcattgtgttggaggtgcccctgtaacagagggccccattcctgctgctgcttaatcagacagaaagatgtgagctggcctcgctgataaatgagtcagttacatagttataaaatctattttaaaaaatgtatatgtatatttttataatgctgtattagaacaaaaatagcaagttacaaaggaataaataagaggtgccatttatgtaaaaattaattttggaatctagttgcaaagtcaattaccaagaaagcataaaattaagaaaattaaaatccactgagaatgtaatatgctgtctgcttttaaatagccagactcgttttgtaactaaggaacaattatttaaaattgtttgctaattaaataatagataatgggaaaaaaaaamccagtaggctggttgcagaggcttgtgtctgtaatcccaacactttggaaagccaaggtgggagaatcacttgagctcagagtttgagaccagcctgaacaacatagtgagaccctgtctctaccaaagaaaaaaaaattagttgggcrttatggcacacacctgtagtcccagctcctcaggagctgaggcgagagacttgcttgagctcaggaggttgaggctgcagtaggccatgatctcgccactgcactccagcttgggtgacmgaacgagactctgtctctaaaaaattaaaaaattagccaggcgcggtggttcatgtctataatcccagcactttgggaggctgaggcgggcggatcacctgaggttgggagttcaagactagcctgaccaacatggagaaaccccgtctctactaaaaatacaaaattagctgggtgtggtggcatatgcctgtaatcctggctacttgggaggctgaagcaggagaatcgcttgaacccgggaggcagaggttgcagtgagccaagatggcaccgctgcatgccagcctgggcaacaagagcgagactccatctcaaaaaaataaaaaaataaataataagagttattttaagaatttgctaataactgatttttgaagtgtccaaagtatagaaaatctcttttgataaaactttttcaaaataagagtgtttctatttcagtgtgagttgtattttctgtatatgatcatgacatccaccagttattcacaatgataattgagcattaagctgccatttccattggcctaaaattttcctattgtgtttttttgtttgtttgtttgtttatgggggtttttttgggtggattagctattattttttaatgaaatatgccattaaaacaactgtatgtatgagtatggtttaaaacaagggtgggaaaacattttctataaagtgtcagatattaaatatttttggctttgcagaccataagctctcgattgcaaacactcagttctgctgttgcagagtgaaagcagccataggcagtacaaaacggatggggtaaacacagaatatatgttgctgtgttccagtaaaaactttacttgtttttggagacagggtcttgccctctcacccagactggagtactggggcatgatcatagttcactgtagccttgacctcctgggctcaagtgatcctcctgcctcrgcctgctgagtagccgagaccataggtgtatgccgccttgcatggctaattttttattttttgtaaaagatggggtctcactatgatgcatgcccaggctggtcttgaactcaagtgatccttctgtctcagcctcccaaagtgttgggatgataggcatgtgccacagtgcccagccagtagaactttcttcatagaaacatgtagaggccagatttggcctgtgggtcacaatttgccactcgctggtttagagaattgtaataagacaaaacttgcataagtagctcccagcttaagaaatcatgtacgtttcaaaaattctgcactcctcctttttgttgtatctatacagaagagaatcctttggagataaaagaaaaaccagaagaagcaggtcatgaagctgaggaaagaggagagaccgagaccgaccagaacgaaagtcagagtccacaggagcctgaggaaggccccagtgaagatgacaaggcagaaggggaagaggaaatggacacaggagctgatgaccaagatggagatgctgctcagcatcctgaagaacactctgaggagcagcagcagtctgtggaggaaaaagacaaggaagcygatgaagaaggtggagagaatggccctgctgaccaaggtttccagccccaggtatcatgagatgtctggctttttatgttaaaaataatgaggaagagragaagtcaccttattcccattagaatcccttttaggatactcctccatcaacatgtggcacttccgaggagttctaggtttctgttttaagacccttagtgaggagtggggaagcctgcttgttgcaaggtctcccaccttatgctgttcccccagagcatttaatgctgtgtttgatttctctgccgaaggaggaagaagaacgggaggactctgatacagaggagcaggtgccagaggctttggagaggaaggagcatgcctcctgtgggcagactggtgtggagaacatgcagaacacacaggccatggagctggctggggccgcacctgagaaggagcaggggaaagaggtgatcagtggtttcactgcagccgccagctgcctcttagtagggtctcttctccctgtccgacatcacattctgtgtagcattagttggtttatgtttggttattttgttgtttgttttgttgttgacatctaacagaccacatctcattctttaagcaacgcgtgactgaacagttattttttaaagacagggatacattctgaaaaatgcctcattcagcaatttcgtcattgtgcgaacaccatagcgtgtacttacacaaacctcaatggtagagccaattgcccttaggctgcaaacctgtacagtatgttactgtactgaatactgcaggcagttgtaacacaatgtaagtatttgtgaatctaaacatggaaaagatatartaaaaacgtgttattatcttacaggaccaccagtgcacatgcagtctttccttgactgaaacgttgttgtgtggtacatgactgctacttatttttatatgcctcccaggacaaaccccggaatatcggctgtatttaagtggtgtgcataataagaaaaagttgttagactggtagctctagatgggagaatcaggttcgtgttgtttttcagaaagctctccaggaaggaaacatggaatttagacttcaggcaatgtatacctttaacggtgttttgcttttccttgctcatcatcaggtttctaaacgtctaatttaaaaagcagataactttttcattctttgatctggtggtgatgtgttctgatatggccacaattcaggttgctgggtgctatggaaagaacatgggatgtcaacgcaggacctgctggttacagtggtgattctggacaactttagtctctttgagtcctagttcttactgacaataacaaccatttatattgcttataccgtatgactaccaccaccacaaatattcattgagcacccattaggtgctaagcattttcagtacttcagaaagtcctctctatgtccccatgagatagatgatattgtactattttcttcattgtatatttgagaaaaataagcctcagtaaagttaaatgacaacctcaagtgtacatagctggttgatgatgaagcctggtttctaattgaggtctgtcctgtctttggagtgagacataatattcctgcaaagaactaagcagccttacaaaggcccctgagaggttaacataaggtctgtacctagacactcctgtttctgcctgtaggccaggccttagttacggtgagttccagggcaggcaggtaggcaggagtgattatatgactgagaataaaggacagcagtgagagaagttgtattcaatgcagcacagtaaccagggacttgtaatagcttctttcacctcattcttttgtggcttggatttcctaggaacacggaagtggagctgcagatgcaaaccaggcagaaggccatgaatcgaatttcattgcccagttggcctcccagaagcacaccaggaaaaacacacaggtttctatcactcctcagctaaacttaggtgaaggcagcatgtagaaaaagatgttccaaacgtagtgctttaaaaaaaaaaaaaaaaagctatactcctggtttttttgtkgttgttgcatcagatatgatagcagccttggtgagcagaccacgaccatggggtttacccagtgggatccygtcacggcttcttccctgcctgtgtctctccccgacccctgattccggccatgaagtcttaagagccaagtgctgtgtgcggctgcccagcacaaaccgtctcactcttttcattgtccataggcttttgcttttttaagagtaagtttttttttaagtagggtataatttatgcacgtgatgcaaaattagtgtaaaaaaccaatcccctaaaagcctacatcctattcctgtccccaagggaccctcctcagagcaaattggtgttaccaattccttctttcagagatattttctgcatatatgacatatatggatgtgtgaaagtgtgtttctttgccttcattttagatataaaagtatatcatagagattgttctatgtaagtatatagagtcccggttctttttaatagctgtattgaattccattcttgtatggctacacctgatttacttatcctgtcccctatagatggatattatgtttactttgagtccttttgtcatgacaggcaaggctctgatgaatttccttgtatttctcagagttttaagaggaaacctgggcaggctgacaatgaacgttccatgggtgatcacaatgagcgtgtgcacaagaggctgaggactgtggatacggacagccatgccgagcaggggccagctcagcagccccaggcccaggtggaggatgcagatgcattcgagcacattaaacaaggcagtgacgcatacgatgcacagacctatggtacggtcctgggaaagctgctgcctttgcccactgagctctctatgagagcttgtgctatgtgacctataataatgatacgtatttgtggggtacagtgtgaggttttgatacatgtatacaatgtttaatgrtcaagtcaagtcagctgtgcctggcagctgattgtatacacttatatcaggggagagaggaaatggctttgtaaacataagaaatgtgcagaaatacagtttgtttttggtacaaaggtatctgtaaccaagtgaagatggttaagatttcttggtttagtataaactctttaaatatccttaaatataatagttaaaaataagttgttcacatccaaaccccgatatcagggtttcttagtactggacatttctttcttcttagtcacctctggataggtccctgcactgacaggtgctatgaatttgaaatatgtgttttctccataagtgcaaaagggaggaaaaatgtctcagcatgaggtcattggtcagtctccccttctggttctcttggtgacttcagtttcattcctaatatgtaaacttatattgagaataatctaccatttaggatggtacgaaaatgactgctctacattggattacatttttctctccttgatcccacttaaaaaaaaaaatagagcagtagctaccatgtattgagcttttgctttgtgccaaaaaacttttctgagcctttgctgcgtgatcataaacttcctcaactaatcctatgagctagagtctctctgttgtatagttaagtacactgaggccaggtggtttaagaactcactcacgcaagatcacaatgctgggattcctattsgtctttctgtgccttgttttctactactttttattatttttaattgacctataataatgatatgtatttgtrgggtacagtgtgaggttttgatacatgtatmcaatgtttaatgatcaagtcaagataattagcttatctaccacctcaaacatttatcatttctttgtgttgggaacattcaaatctgctcttctagtcatttgaaaatatataataaattattgttagagtcaccctatagcccagttaaacaccctattttgtcaaatgctcaggagcatttgacggtgtactttgagttcatactgtagggcggaaggcagccagtgtcacatgtatagttacattatatcctcataatttctgtagggggtagggaacaggcakttcattatgtcaataggtcaataggaaatcttgtgcacagacaagtctccaagccacatagctggtcagtggcacaacttgcatcactagcattttggaagctagaatgacagaaaccatacccacttattattattttgttctgcaaagacctaggatttttatgtgtgggtgcgtgctttgttgacagatgtggccagcaaagaacagcaacagtctgcaaaagactctggcaaagatcaggaagaggaggagatagaggacacccttatggacacagaggagcaggaggagttcaaagcagcagacgtggagcagctgaagccagaggaaatcaagtcgggcaccacagcacccttgggtgagtcctgctagtgaacaaacccttcccaggygctctgacttgaagtagtcagttctctctcactataatctagtctggtgttcagttccatgtcctaatccatggcttagatgaatgaattgcctataataatttcactatattttgtttgggaccagaaaacaaaaatatggacagcggtgggtgttgcaggacaccatcctttaaggagtcccctgaaacttgaatttctggcaaaatctcatcagtttttaaaaaatatgtagaagaaaccagaatagtacacttactacagctatgatgaaaaggtatagtattagagaaatgatattttcaattatataaaagtatatgctattagcataaaatgcagtaaaatattaaaagaaatagaatgaggagtttccctttcatagctaaccaagttctattaattacttggcaaaaaaaatagcttcatcagcaatggaataaatgcaaattcaaaagaacttgccaaattcagaggctttttcttctgcttagttcctgtcctctcaggagcgttagaactgttagaacggttgactatcctatgtgacaagccaggctttgcctctcacctcacaagttgaagcaaattattgatcttttctttgcctgtttcctcttctgtaaaatggaattgtggcttttagtttttatttctgtcaaagttttacatgcatatagtttcaagaatcatacagttttacaaggcttcttaggacaacccaaaatttcccctatttccctttccaagaacatctgccttcaacatcaggtgaggaggaggggagtttagagagtaagggttggcaatgagtgtctcagagagaaagaacctctgaaatcaacatgtggaaatgtgttggagagtgaatgaatgaagtttgattaattttcaggattaacaggcaatagcaaaggcttggtcagtcatcaggctaatattrtaagtaaaattatgtccttaaatgaaaataggctttgatgagatggaagtggagatccaaactgttaaaacagaggaagaccaagaccccagaacagacaaagcccataaggagacagaaaakgagaaaccagaaagaagccgagagtctaccattcatacagctcatcaattcctcatggacacgatcttccaggtagtaaaactcacaaattactgcattaatatagtgttaataaattaacaaaataaaattttaaactggttttaaatctttgtctttagaactttatggaacatctggttgttgaggggtttcatgttcttattcaaaatttttaggaatactattggtatgataggtgttcttcaagcacgtgatactgttccagcaattaatcacagggtcacagtgccctgacctgtctgtgatggtgggtctggtccttggcctctgggactcacatcccacttttctaaccatccttgtgtaaggaatcttcaggacaattaggtttgtgatggttaagtaaaaaatctttggcttagtgcctgtatttatgaagagctatttaattaagttcttgagctaagagtttgacttatttgattaatcagataacattttcattattgatgacttaagggtgtttgggttttgttttgctacagtggctttataaatgtttaaagttttctttatccatattgtctctctaagagggaagcagaatgcttgtctggcatcttctcattgtgccactgtatttgctgaattaagttttgaatctcaggagcatttgactatgtactttgmgttcatactgtagggcggaagacacccagtgatactaagttggtgattccaacctgggccacctcttatctatggctttttctttttagccctttttaaaagatgtcaatgagctaagacaggagctggagagacagctggaaatgtggcagccacgtgaatctggaaacccagaggaggtaagtcactgctcactgtttttttcataaaatatctcgactttttttttgtttgttcaacatatagcaaacttaataggttcttagcaattaccttaayaaaaaggaccaggcatatggagaatataattacaatcctaaagcctacagatctgtccatcagtttctggctgctttgctgttagatctatagcttaattaaaacagaaattggtgtgcttaattcctttaatttctgttgctggctctgtaatggatgtaatagttgtgacagtggttgaaaaacygggcaagagtctatgctgtgccatcctaagaagaggccagctagatcactgctggctgacttaacgtggtagtgtggattaaccagcagtyttatttttaatgactttgcatctgaaatttactgtattatatacacatttcacttttatatctattgtcataatcactcccaccacatatatgtattcagtgctctgccatagttggcagaaaaatcatggggctttgtgttgagtgtgttgctggagggatttgcccttagcatttttactttttttcatttttttgagatggagtcttgctctcttgccccggctggagtgcagtggygcaatctcggctcactgcaagctctgcctcccgggttcaagtgattctcgtgcctcagcctcccaagtagctgggattacaggcacttgccaccacgcccgactaatttttttgtattttagtagagacggggtttcaccatgttggccaggctggtctcaaacttcaggtgatccacccgccttggcctcccaaagtgctgattacgggccaacttttttctttttctttttttttttttttttgagacggaatctcgctctgtcacccaggctggagtgctgtggcgcgatcttgacccactgcaacctccrcctcctgggttcaagcgattctcctgcctcagcctcctgagtagctgggattacaggtgcctgcccccatgcccagctaattttctgtattttttttttttttgtagagacagggtttcaccatgtcggccaggctggtctcgaactcctggtctcaagtgatccacccgcctcggcctcccaaagtgctgggattaccaggcattagccaccacccycagctggaaggagagacatttttaatcaagtaaattacatggtagcttgctgggagaagatttaaagtgcttctgttgagaaagttcatgcaggtcattttctaccactttgcttaaagcctgcatcttgctagaagacttggttggctctgacattctgagggtaacttacattttgttgttgtcacaggagaaggttgcagctgaratgtggcagagttacctgatcttaacagcgcctctttcacaacggttatgtgaagagcttcgtctcatattagagcctacccaggcagccaagctgaagtaagtcttcccctctggaaggcctcacagtgccctgagaagacrgcagcttcattgattctgttgaacgcggcacctaaccatttatagtgccagcttctaggytgccgcttgtgccgtacaggcaccagtatgctgttccttaccctgttttcctattattgtctctgcacaaaagtttctgggtgtctgtattgatcaccttgttacatgttgagctattcacttgctataggtgttactcacctagatcttttcaaagatgtccaaaatcattcctatttagtgcattttttcstaatttttaaaaatgtgtctggaaggacctaattattattgccacatacvtgtccagtttttctggctagaggtcaagaagatccttagtcgtcaattgacagaaacacttcattgtgccaggttcctagttacttgctattggttttaaggtattattgtgatttttgtccttaataaaaattctcaggaattaaaagttgttaactaatttttgcccccatttgaataaatagaggagactatcgaactgggaaacgactaaacatacggaaagtcattccatacattgctagtcaatttcggaaagacaagatttggcttcgaaggaccaagcccagtaaacgccagtatcagatttgtttggctatcgatgactcttctagtatggtagacaatcataccaagcaggtaaggaagagaaatgcagtggcagtttgataggaaattaacatcaagctatgttccatgggccaccaaaatgctttaaatatgatatggctaatgctttaaatatgatatggctaaaacattttgaaatacctgttaggcctgttttgagaatgtgataaccatctttgataagacctaagatttaaagagttcaaaagggcaattttaggatgtctcagatgtgttagtttcttactgttgtaggtcttttacattgttttgtttcttgaccttgctgtttgttcttaactgtctagttgcagaataagtaaatctgatagtgcttgttttgcagaaaatgcaacagtgtactsttaaaaaaaaaatcaaagttttcagatattactgcatagtcttagatagtttaggtaggtatctaggatacatttcttttatatctgaaattatccagagttattgttctatcagtgctaatattaagtttaggagccttaatagaattacttataccaccattacagatgccaaagagtgtttgttttgggcagtgatgctgttatacagcatgggctaataagcaacctaaaatttgtatgttctgctggaaaaagttagtgtagcctctgaacctgggttcatatcccagctccatttattaacacatgactttgggcaacttatttcttagttatcagtttcaccttctgaaaagtgaggaatatatatatttacaagcacacatagaatagtaataacctcatacttgcagaattgttatgaagattaaatgaaataatagatgtagaacactcagtttgctgctgcttttgtcatattgcaaatggtaatgaaattttctgatatagttctacagtctgatctgactacatatatatgaatggattttaaattggtttttaaaattttttacctacaagaggttactcttcatgtaggtccaaaaaagaagaaagaaaaattcatggaccatatttctcaaggtcactttctttctttttttttttttttttaaagacagggtcttgctctgttgcttaggctggagtgcagtggcatgatcatagctcactgtggcctcaaccttctgggcttaagcagtacagtcctcccacttcagcctcctgagtagctgggaccataggtgtgtgtcaccatgcccggctaaattgttttttttttttttttttgaagacagggttacagggtttcactctgttgcccaggtggctcactgtagcctcaactttcctgggctcaggtgatcctcctacctcagcctcccaagtagctgggaccacagatgtggggtcttgctgtgttgcctgggctactcttgaattcctggactcaagtgatcctccctccttggcctcccaaagtgctgggattacaggtgtgagctaccacgcctggccctcaaggtcactttttattcgatgtctacagyagaccattcctatcagtgtaatggattctaggtttcaacatttgtggtaccaggccaccaaagcctttgggtttgttgtgactatagtagccttactgatgttattcctctacttgccaaacaaaaaaatgttttctttgggaatcttgatgcaaaaaatagttgagaggctctggtttagaggatattctgattcctaaaatcattaactttctaattcacagcttgcatttgaatctttggctgtgattggaaatgctctaaccctcctggaagtgggtcagattgcagtgtgtaggtaaggttgctttgtaattcctttatgaaaacttttcacaacctgtttggttattttgatcacacagccaaaaaataactcctgttgtatttggttttcctcccccaagttttggagaatctgtaaagctgttacacccatttcatgagcagttcagtgattaytctgggtcccagattctacgtctctgcaaattccaacaaaagaaaaccaagattgctcaggtaagaggatgaaataaaatgtcttctgcacagttatttttaaactggtgtaggttggagggagaacatttttatttttgagacaggaccttgttctgtcacccaggctagagtacaatggcgccatcatagctcactatagcttcgaactcccgggctcaagcagtcctcctgcctcagcctccctagtagctaggactacaggcgcatgctaccatrtctggctaatttttattttttgtagggacagggtctcactttgttgcccaggctggtctaaaattcctgggttcaagtgatcctcccttcttggcctcccgaagtgttgggattaccaccatgctgggctgagaaccaccctccaccgcatacagtattaggacagggatagtcccaaacctcagcctgtgtaccactggaatagaagcttccttagcatccattataaaacaaggtgtgacttctttttctcagttcctcaaggatcacttgactttgcatcattggttttctagctccctacttttttttcygagtagtttggaacattctgcaaaaacaaacccatctcccatacccttatcagctgggccaagacctatttttctccctcattaagcttagagaagaaatgatatgaagtaaagccagtgacttacttaagagaacaaaagttcaaaacagcatgggatcatatttctcctgggtcctgctctgattcagtttgctttttctaggctgccctggacattttgtattttcttgccttctcttttgctcagttgttttctgttcttgaaagaagacagctgtttggtttatttgagggagtattgatttcttatgccccagggaagcacttcttttcctttggggtatcttccagaactctagtgggttatatgttagagaaacgtctcacctgtgcttgagaatgcctgtatcatctaggcatggtggctcacacttgtaatcccagcactttgggaggttgaggtgtgaggaccgcttgaggccaggtgttcaaaaccagccttgtcaacatagtgagacctcatttctacaaaagacaaaaataattatccaggtgtggtggcacatacctgtagtgctagttacttggcggcaggctgaggcagagcccaggaatcgaggctgcagtgagatgagatcgtgccactacactccagcctgggtgacacagtgagaccctctctcaaaaaataataattaaaaaacagaatgtctgtatccaaggatcctccttttttaactacatacggccagaagggacagttagttgatggtctgtaaacctgaggtggttatctgataatcacttcaatgtcagaaatactatcagtctctttgacaatgagaagagcattcacatagttttctaattgtctattcctggttccggtttagtttctagagtctgttgccaacatgtttgcagctgctcagcagctctcgcagaacatcagttcaggtgagctgcatgccttcctcttcattaacaaaatgctttcttgtactctatattcccaagctgcttgcttcagctcagtgtccccgtcactgtgttttaataggtatgctccacaggaaaagacataaattgatggagctgatttttacttatttattcattcattcagaaatttttgttgaacctgtactcatgaggcttataatcaatgggggatctagacactaactagtatatacttacttgagttcagatttataagagaaaggagcaaggtgtgtgtggaattaaatataaaggctacaattaacccttgaataccacaggtttgtctgtacagatcaggtctacttacacatggagtttttccaaccaaaagtggattgaaaattcagcatttgagggatgcaaaacccgagtatatggagggccaacttttcatgtatgcgggttctccagggccatctctggacttgaatatgtgtgtattctggtatactgggggtgagggggtgtgtgtcctgaaaccagccccctgcaagtactgtattctctaatattttaataacagaggaaagtagagaaggacataatataaaaaccagctaatccaaccacatttactttgggggcttgaaacatgccaattatttagttcttttccaaaaatctctcactgttctcagtgtatcatgcagaagcttcagattttgatggaagcaagttattcacacctgtcaacatttgctaaaacagcccaccctcaactcatgtactatataatctttagctggaaacactatgtagcaaaaattttaaaacattttattcagtgttgagtgtttcctttctatttgtttttgtttaaacaagtcaaatttcaagggcaaaaaaatatagaaattaggtacaaggaattaacagaaatctaaagatgattatatgtaacgactgaaatttggaagacacagttccagatttctgatttggccactttcttctaatgcccttctcagtactatcatttttaaagtttatagccataaactagtgttttaattctcatgtacagtatgttgctctacaatttgaagttgagcagaacttaacatttcttgaagcactattgagaaattcttctatactgacagaagcttacttagtatcccttattatgccttgtctctgactcaagcattctaagggatagatctcatcagaggtcccttaggtttgtgcccagaattcatcagctttagaggtctgtttagctttaatagtacagagaaagcctacactaatttgtcctactttgggtagttgtgagttattaaaaatggctgttcattttattcccttgcttcgtcttatatggtctacagaaactgcacaactcctcctggtagtctctgatgggcgaggccttttccttgagggcaaagaaagagtcctggcagcagttcaggctgyccggaatgcaaatatctttgtcatctttgttgtattggacaatcccagttcacgggtgagtgactactaaaagccaccttttctggaggtaaagtggggattcccttcaacctgttcaatctgaaatatggcctggatcactcagtcatactgagaactcccagcattcatagtattctgtcaagtaccattgtaggcacttgtaagtattttctctattaatctttgcaataagccagtgaggtagggatcattattcccactttacactgaaggaactgaaacacatagaggttataggtaatgagtgggagagccaagattcagaatgaccatcctctgtgggtcatcatttccctctatgcaaagtcagtgcaggtattgcagccttgataatgggtactgaccactttgaaatggagattaggtgttgccacacttaacttatgtctcagtagctcctcacagcaagaagcatcaatcatcttagtgaaatatgcctatagggcagttctgttccagggaagcattgtctctgtgggtcacattaaggccttgataggaaggtaaagatttagtgtgaatgattccaagtggatgatggggagacaccactgtagggaaagcagattttcctgtctatcccttttcctttttttcagtgtccatcctcctggaaggggcactcagaaagacatctacctccttcttagtagagttctgaaaattctcttttacttagtaataaaaggtaggttcatatgcaggaataagacacaggagatgtaaaagttagcaaaagagatcacagaagagctagctaaggatgctggtttaatcgctgcctccccatttcaaaatgtcttttgttgacaggattctatcttggacattaaagtaccgatatttaaaggacctggagagatgcctgaaatccgatcctacatggaagagttcccattcccatactatatcattcttcgagatgtaaacgcacttcctgagacactcagcgatgccctcagacagtggtttgagttggtgacagcctctgaccacccatagaacagaaagaagagtccaaagtgagacttaactgtggtcagaaggtcacattgcttacccaggtgctcccttttggacaactacaaaaaattttattgtaatatttttattttacaacgtgatcttacagcctacagaatgctctctggctcccggctttgcctgggctgaggtttttataccaaacctggaagcagcagcaggtgcctgaactcgtaactagagaagagttatccttcttccctgccttggaagccctggcctgggaggaggtcataccccaccgttggagcccagctgcctgttttcttttgcaggggatctgggcacctgtgccttgaggagatgctgccaggagcatgggactctgacagtcctttgtataaaggactaaagggagctgcccttttgaccctgttctaagctctgccttgccaagcccatagtgtgtgcccaaaagctgtcaagtggccaagacagctcgtttctggagagtatgagggtgtgttttcttattgtgaaaggaactaccttctcttagagggtaggaagaatgtggtgtgtgtgtgttctcataaagcaactggacattataggtgcccaggtcatctataaaaacgatccttgggctgtgtaaaaatgaagtggcttttcagtatcctctttcacacttgctgcttcgggagactatgcaatgatgggaaggtgattgcccctttatttcattcagtgccatggtccctgttgttgtagtaatttatttgtttagttcatttttttttttcttaacagtcaaggggaagagtgattcctcacactgctttcaagctggactgagccagtctcattctgggaaagaaaygctgtgtccagaactcagcagctccatctatttwttccagtcgaaagaaactgatctttaggcagtttttacttggccagaaagcagtgctgaatacttgaaactgtgtgctctgttctacttaatgttctgtcagaatgttcttttgtaggcagtatgtcatgatgtaatcatctatctccttgtctgtttccaagttacactgtgaagtctgcgacccttttgaggtggtcatcaaagacacagattccttgtttaaccaagtgtcccaaagcatgtacctgaagttatatcattttttattctaaaaagctatgcagcttatattctgaaaactattaaaacatataccactgttgttgatgtaatttgtgactcttcttaatggaagatgacaggattgtaaaaggtatgctaggggactgatcttctctgctggatcagtcagtcagctgttactagttgatgctgtgctaacatgatcccctcctacttccatgttgctcttactacaaaggttatcatttgcatttatgtccatggtaggctgagctataatatgctggctttgcagcagaatgaaaaggatgagttggtgtagccttataaggaggcttataaaaatwaattatcctccataaatgatgatgttgcatcccactcacatttcattggctaaagccctctatggggcagggagtttaatcttccagtagggttgagtctgggagggaaagacaccaatattatgacaatgctgcagtctattacatctgcctttggaagctccatctttcttagacctcaaactggtgtgcccagagtgattcccttggccctgggttagctcatgagatcatggacagtaggaattccaggaagcaggaacccaagagtgccattttcaacttgtgctgccaacaggggcttgcaggagtagtgatcaattaatctgccatgttgatagttgacatttgtgctatcctgcccacccccccctcccccaaccccccaggccttggccaaataggtaagtaagtaagttctgatatttaaggaatggacagcagaacacaaaagtcctccatgctgtcttaaaaatctcactttggggctgggtgcagtggctcacgcctataatcccagcactttgggaggccaaggtgggtggatcacttaaggttaggagttagtttgagaccaggctggcccatatggtgaaaccccatctctactaaaaatacagaaaattagctgggtgtggtgacgcgcacctgtaatcccaagctacttgggaggctgaggcaggagaactgcttgaaccaggaggtggaggttgcagtgaactgagattgtgccactgcactccagcctgggcaacagagcaagactctatctcaacaacaacaataaaatctcactttggataacttcttcaccactcccgtggcctccaccatcactgaagcaaaaggactgtaaaattctccatccaggggtccaggaaatctactctttggtattcttaattatattcagacatctgctggatgtcactgtgttctaattcccctattccaaacccattccttcaacattccccatctgggatgaccactccaacagccaccctgtttacaaacttgggacttaacctatacatctgctttacttccttctccatctctatccataccccaatcaaattaattaatcatcttgtccagtcaggcttctggatatcctgtcccatccctccccctccccctactscactgtgactgggactcttttaatctctagcagggactacttcaatggtatcctggccagtaacttctctttgcttgcttcacttcatcctattcacaacatccaagatctttctaaaagttctgtagctgaaaatcccttcaaagctctcccttgtgaagagggtaatattcaagcttcttcatgtgacctgtgaggctcttgcttgactctcctgtccctcctctcccagcattcctgccagtgtttccatgtgttgtctggaatcctcttagtgattctgcgtttctgacaaatacctagctcagacaagccctccaggaagaataatttcccacagtatgaactgcagcattctttgttagcactatattgaacttagaggttttcctgcccaaagcatgagtctttgagcaaggagcatatgtgactcacgacagcattaccagtgtctagcaagagtgagccctttttttttttttttttttttttaaatagagctttgctcttgttgcccaggctggagtgcaatggcgcaatctcggctcactgcaacctccgtctcccaggttcaagcgattctcctgcctgagcctcccaagtagctgggaccacaggcgtgcgccaccaggcccggctaattttttgtattttagtagagacgaggtttcaccatgttggccaggctggtctcgaactcctgacctcaggtgatccacctcggtatcccaaagtgttgggattataggcatgagccaccgcacctggcctgagtgtttcttgatgggaagaagaaataatgtaaaaatgtctttctcacatattaatgtatagattcaacactacttcaaaattccaacsaagatcacaagatgatttggagggaaatgatacaaaacatttctaaagattatagagaacagtactaatggattttttacaagaaactagagtcctgccagataataaaaacatataaaacaaaaagtaaaaacttaaccctaaatgaaacaattctggacagattactcagaccctaaaagaatttatcatacagtcaaaaaggcatccatcataaagccccgaaaaaggaatgagttatgtaatcaatggtattgatacagcttaacatctagaaaagaacttagatccacgtgatgctgtaaaccaaagtaaattctagatggagtaaatattttaaaaattaaagtttttaaaaaacgaattacaaaggcctgaatgggaaatgaaaagcctcaaaaggcacaaaaatacatgattgtataaagtttctgtatgtataaagaaatgacaaaaaatatagagcccatataaatgtcctcatcataaacggacccaagtcatgaacaattcacaaaaacagtataactaaaaatggcgaggggtatttaacttcactccttttaaaaagttagcaattaactattacagctaatgtattagacaaaatttggcatatattattgataatatgatcatgcagttagcatcattcatacaatgcctggtaaagttcaaaagagctaatgattagagttcttacatgtgccaggacctgttctcagtacattagagatacacaactgaggtagatgctatatttcactttacaggggaggtaataggccaggagaggggaaatagccagaacacagctaggaatagggagccccaggatgctaacaggcgaggcaagcaagtccccagtaaactagtaattgaacatttttcgttctattttaattcgatacaacaccacttggaaaattaatatggcaaagattcgctaactccacttctagtgatttaacccaaaggcatgtgtattgtgggaaagataaaacaactataaggamataaaagcaaaagcctgaggcttagggatgttaggctcctcgttattagtgatgaaaagtgcttaagactgaagtgggtgagccattcaaagctttgtttcaaatgatcatgaaggccaccgctcccggaaaacctttgcgctacaaaagaacaggacaaaaacgagaaagagaaaaaaccaacacaaactgtaaaagaaattaacactttcaattttagtattttcaactatacacatttttaaaggctcgaaagaacatttaaatacgttttcacctctttcccccaaaaaaaccttaacttttttttcgagacagggtctcgctctgtcgcccaggatggagtgcagtggtgcgatctcggatcactgcaaccttcacttctcgggttcaagcgattctcctgcctcagcatcccgaggagctgggattacaggcaccttacaggcctcccagagtgcttgggactgcaggtgagagccaccrcgcccggcctccttcactttcatttgaactctctttaccaggaactgtgttaagtgccctacctttcttctttatcaaaacgaccctatggtgcactgttatcctattttaccgacgagaaaacttcggccagcgcagcagctagggctcagtcccgaagcctcgcgctctcagtccgagagcaacccgcgggccgtctcytaggaaaccgggctcgccacaccccttggtcgaaccccacttccgctcctgcgcgctgaggctccggcggacctctggtggayatggctgcttcccgcttacccccagcgacgctaacgttaaagcaggtaccggcggttctctgccttccaaagcagcttacctgggtctgagctggattctccatctgtccctatccccaacggggcgggttccggggtcctgatgcggcgtgcgcgccctctgagattggcccgatgcctgcggggcggtgcttcgctccgcggggcctgacgggaggcactggctgcttccttggtttggtgcgatcgcgtgagacagcgtcaggcgcttgatttccctgagtcccggtgcctcagctgcccagtgcccacggtaaaagtctattgcactgagctgtggcaaacagcaaatgagattaccaaagatttgaacaactgttaatttagaaaaagtgctgtcgttgtaataacaacttctaggagaccggcagcccttttcagcccggtaggcagctcctgattttttaatggttcttaggtttgacagagcagtaagcaaaaagatcagatgaacctcgtgatgctttctttaaaacatctttttgagacagggcctcactctcgcccaggctgagtgcagtagcgcaatgaaggcttacctcagcttagacctcctgggctcaagtgatcctcccatcttggcctcccaaagtgctgggattacaggcctgagccactgcatctggccaaaaaaagaaaaaaaaaagtttttctttgcctttttcaaaattgaccaacgagaagtactctggttacagcttggtttgctgaagtagaactttccaggctggcgattgtgcagtagtaattgctatttactcctcccttttacagttcgtaagaaggcaacaagttcttctcctctacagaaggattttgcaaacaattcggcaagttccaaatgattctgatcgcaaatacctgraagattgggcaagagaagaattcagaagaaacaaaagtgccmccgaagaggtgagaacaaaatcatggtgaggacagatcctaaccctttttattgatcagtgaatttttttttttaagtttagcagacatcttggaatatagtgccactgagctggtatatcttgaycattgcttgtaatgttaccgattttaaattattattttaaaatktagtattttaaaatatgtagataaaagagtatctacactcttcagcatcatcacttgacttttatgttgtacattttatatgtatgtatgtggaactcttttagcttttctaaaaggcagcagttccaataggtagtattggttcttgattttaacagataaaatggtatagctataccttgtttaaccaggtaaaactataaccagatttcactttattctacaggatacaatccggatgatgattactcaaggcaatatgcagctcaaggagttagaaaaaacacttgctttagcaaaatcttaactatagcattattctgaagrattttcaaagtctccatgtgttttgttgcatttaggattaacaatggacaacacaaagcccagtcttactatttatatgtacagtatttggtgatagagagcaaaggaaaaacacatcagaacagttgccttaacactgaaaaacataccctgcattttgaaaatgtttatggatgtctcagcagttcttaaaagaagaaaaaaaccactaacaaatggccagtagatgctggacacaatcattagggaagtgtaaatcaaaactactatgaggtcgggtgtagtggctcatgcttgtaatcccagtactttaggaggctgtggtaggtggatcacttgaggtcaggagttcaagaccagcctggccarcatggtgaaacctcatctctactaaaaatacaaaaattagcttggtgtggtggtgcattgcctgtagtcccagctacttgggaggctgaggcaggagaatcacttgaacccaggaagtggaggttgcagtgagctgaggtcgtgccactgcacttcagcctgggtgacagagtgagacagtctctaaaaaaaaaaaaaaaaaacaaccctgagattcacattcactagaatggctgtaattaaaaagagaaataataataagtcttggtgaagatgtacagaaattacagaaccctcatacattgctggtgggaatgtaaaatggtgtagccacttcagaaaacagacggtcagttcctcaaaagatgaaacagctgctgtatgagttagc

SEQ ID NO: 9943 - DNA, 38414 bp, Homo sapiens
ctaacctcagatgatccacacgcctcagcctcccaaagtgctgggattacacgcatgatccaccacgcctggccgattgacttaattttttatgctgtgtacaaaaggacccaggacctgccactctgcttttggttctagagggctatttgttggaagtgggtgctgcctcataatgctggtcacgtaatgtgtaagtttcaataataaggagcctccaaactccattaataagtcctttcttccttctctaagcaccctctcttttaattgctgagtaccccatagccctaaattcttcccgaagcgctcagtgcatctaactgtaggacccagagacttgccttctaaggacaacagtccatcctctaaactaataataacaattcctcacacatatattttagtttgcaaagaactttcatacatgtttctgattttgagcttcatatcaatcaacactaaattagaacaggtatcagactcaattttcagattgggaaactacagattttaaattatttgcccaaggtaacatgactgggaagtgcacaatttggccttacacctgtcccgtgactccaaggcagacaaagacaagccagaacaagcctcttttgatcagacctagtaatattttgttctgtccccattccttttcaaaacagacctatcatgtgttcccttccttcttaataagccatcatatcagataataactattccttaagttttttttttttttttttttttttgagatgaagtttcgctcttgtcgtccaggctggagtccagtggcgcgatcttggctcactgcaacctccgcctcccagcttcaagcgattctgcctcagcctcctgagtagctgggattacggatgcccaccaccacacccgctaattttttgtatttttagtagagatggggcttcgccatgttggccagactgatttcaaactcctgacctcaggtgatctgcccacctcagcctcccaaagtgttgggattacaggcatgagccaccgcgcatagcctccttaagaatttctaataattgataatggtaatatggtattctttctgggatgtttgcattgtaactaaagattctttacgtcacaggctaaagggcatttatctggggacatcctaaatcactcctttttttttttttttttttttttgagatggagttttgcccctgttacccaggctggagtacggtggcaacctctgcctgtcaggttcaaggaactctcctgcctcagcctcccaagtagctgggattacaggcacctgccaccatgactggctaattttttgtatttgtagtagagatggggtttcgccatgttggccgggctggtctcgaacccctgatctcaggtgatccacctgccttggcctcccaaagtgctaggattacaggcatgagccatcctgcctggccctgactgtgtattttcatataacctgtcttcaagctcaccaattctttcttctgcttgaccaattctgctgttgagagactccaatgcattttttagtcaacttaatttttcagctctagaagtgatgcttgatttttttttcttttgcgaagtgaaagcaagtttattagagaagtaaagaaacaaaagaatggctactccataggcagagcagcctttctgcttgatttttgttatttcaatctctttttgaaatttctgatagaattctgaatttcttctcggtgttatctcgaagtttgagcttcttcaagactactattttgaattccctgtctggaaaggtcacatatctctgtcactcctggattggtcactggtgccttatttagtccatttggtgaaataatgttttcctggatgttcttgatgcttgtggatggtcatcaatgtctggacattgaagagttaggtatttattccaagtctttacagtctggacttatttgtacccatcctccttgagaaggctttctatatattcaaaggggattaagtgctgtgacttaagcctacggtctctgcagctgatgtataccagggggtgccctaagcctatgacccctgcaactgttgccaactcctggatactcctgtatctttggtggccttgggtaagataagggaaaattccccggttacccaggcaacatctctcactttgtctcttctctttcccccagtcaggaatctctctccccactgggctgtctggagttggggggaagggtgacatgagcactcccatggccaccacagatggcagtgcactgggtcacacctgaagctttgcagaccagtacagtattggatcctgcccaaggcctgtggccagaactgcttagctaccactgatatttactcaaagcccaagggcactttagtcagcaggtggggaatcctgccaggataaatctgacccatcagagcagtggattcccttctggcgcagggtaggtctggaaatgtagcttaggagcaaaggcctggaatcaggagcctcaggattctgcctggtgctttattttcctgtggctgagctgctactcaaagtcttctggactttgtcttgcaacttgagtactcttccctctcctttccccaagtaggagtctctccctgagctgccctgtctggagttgggggaggaatgatgcaggcactcccttgttcaccacagttggtgtcacacgcggtcacacacacccaaagtccactgcctccatgaccagtgcatctccagggtttgcctaaggaatatagtccttgtgacctgactgtcactcatatgtattcagggccccaggccactttggtcagctggtggcagaaccagctgggactcaggtctgtcccactctacctgaggattctcctctggcccagagctgatctaaatgtgtcctctgtgggtgccagcagaattctgctcagtgtagtgctgtgctgtgacagggcagcagtgagttccaatgcaaaatcccacactcctctcgctccaccacatgcacagattctctctccaagctgttgtgccagaggtgagggaggggggcataggcgatgcaggaccgtctttcccaccctcttcagtgcctcttcttgatacgatgtgaaaaccaggtactgtgatcactcacctgattttttgtttcttatgaagatgctttttttttttttaaataaggagtctcactctgtcacccaggctggagcgcagtggcaccatttcgtctcactgcaacctctgcttcccaggttcaagcaattcttctgcctcagcctcccaagtagctgggattataggcccccaccaccacgcccagctaatttttgtatttttagtagagatggggtttctccatgttggccaggccagtcttgaactcttgacttcaagtgatttgcccaatttagcctcccaaagttctgggattactgacgtgagccaccgcatccggcctaaaggtgctttccttgtggggacagttgttcagtttggtgttcctgcatggagacaatcgctggaggggtctgtttggccgtcttgctctagcctttctattttcagccagtgggagtagccactgtttcaggagaaaacatcatcttgtgaccaccctctttctcttaacttgccttcatgaagacgttgccttcatggttgtgaagagatgaagcaattacatttagccttatgtgcaaaaagtcctggagtgatagcatattaatcatgtgtcacgtaatttgagggaggttattgattctggcctaatggcatctagatgaaagttgagcctttgctgagtgctgtagctcacacctgtaatcccaacgctttgagaagccaaggcaggcagattgttgaccccaggagtttgagaccagcctgggcaacatagtgagaccccatctctattaaaaataaaaaacagatagctgggtgtggtggcgcatgcacctgtagtcccagctacttgggaggctgaagtaggaggattacttgggcccaggaggttgaggctgcagtgagctatgatcgtgccagtgctgcactccagcctgggcgacagaacaagaccctgtctcaaaaaaacaaaacaaaagaaaaaaaacacacaaaaaagaacttgcccttaacagaaagaaatacaatacggtcacttttacacatggaagacagtaagagaaatcatgccctagggagagaggctatgtgctgggtgttaaggagtaaagagaaacaagtcagatctggtctgcatgggcaccttggacaccgggcaggagttgacactagcaggatagaaacatatggaataatggtctctccttcatccttacacataaggaggcctacctgttccttggagaggcaaggccaacaaagtgagtggtagggagtggtgcttgggccaaggccagtgtggcacggaggttaagtgctccagagttgtgatctagtaggctagatttgaaacctgactcctctgcttacgggctatgtgatctgaagcaatttacctacctctctgaacctcagcttcttaaaataggaaaggaagatcataatatcttccctacgtaaaatcctcagcaaggttattccaaaactatcattattaggccaagggaatgcttcaaaaggaaaacaaaacaaaactaaactaacattaaatctaagcatttgttatctacagtgtttgccatgctagctaaaatctggaaacaacccatccaataattcatgaagagtcaaaaccatttacctatttgataaaatacgttacagctataatatatatatatatatatatatatatatttttttttttttttttttttttgagacggagttttgctcttgttgcccaggctggtgtgcaatggcatgatcttggctcactgcaatctcccccaccctgggttcaagcaattctcctgcctcaatctcccaagtagctgggattacaggcacatgccaccgcgcctggctaattttttgtatttttagtagagatgggatttcaccatgttggccaggctggtctcaaactccagacctcaggtgacccacccacctcggcctcccaaagtgctgggattacaggcgtgagccactgcgcccggcctacagctattaaatattttaacaataaaaactatgtagcaataggtgtgctggatgactctgaaagacagaagaaatgggagacatggtcactgggcaatggaattagagtctcaaatatttaacaatgcgaggtatcataggattaacagttaaagtaagtggtacagaccaggaggaatttataaacttgggtatgacctggtggcctggataggtcaagaaagagttatggagcagcacaaattgagctgggcctggaaattggatagaatttgtgtcaagtacgaaaggccatttcatgtagaggacacagaaggaagcttcattatgtggagagaggatactcagagaacagccaggagactggactggctcaagcagaggttacatgccaggacaaagtcataaactgaggccaaactcatggagaaccctgaatgccatgctgaatagtctgaactttacactataagccttttgaatgaaagaaagcaacatttaaagacaaactggaagcatgggatactgctgaaaagcagtcatccctcacgcggagatgagggtctgagctttgggaacaagtataagaaccagaaacacgggtctgatacatgaaatatttaggatgttgcaccattttcttcttttgttcttctaactcacatggctcttccccaccccctttccatctgtttttcaagttattctctttctgaactgctatgggctaccaatttctgctgctctagagttctcatcagttcctcccattcccttaacaggtgccaggtctcatctccaggcctttcctctaggccaggcagtgtggaaggaagcatttgctgggacgcagtatgaccaggacccagaagggaaagacctttctcccccattgcttctatcagtcactgcccccacgactgggatggggcatgattttaaactactcaaaattgaaaggcaaggaggagtgtgcctctgtctccagtgtgcctatggtcttcttcagctcacagtaccgtctacaccgcaagagccaatatttgaaaatggctgctgcaaaccttaccttctctcaggaggtggtgtggcagcgaggcctgcccagcattccttatagccagtacagctttgaccacctctacaataccaatgacatcatccatactccccagatcaggaaggcccggcctcagaaacctgttagcttcaagttcctgggttcctcaagtcccttaacaggagacacctccctggctgtgaagacagaaagctctgccaatcccgaaaagaagctgaagaaatcaaagccagccagcaccgtccgggaagcaccccgccctctcatccatcatccctgcatgcatccagatatgctgggtcggccaccttctctagatgtgaacctggaggaaagagaagcctggcttctgcctcctgagaaggaggccagagcgtgggaggccactgtgctggaaaagctgaacgagcgcacagcccgatggatccagagcaagcgtcctcgaaggcctggggcatcccccaacaagtggcagagcttcctgcgccagcagtacgactggagtcacattcgggatgagcttacctctgccagtgacctggagctcctgaaacagctggaggcagaagagacagcagagtttgaggatcaaagtgtcatcctgcccccacaggaaaagaagaagccagaactgctgcttcccgtttactacaggtatactggccagggcctcaagtgcacctttgataatccctgactcccctttagggactcccaggtggactcacactcccgatttcagaatgcactctcccatcaacttcatgttctccaccaccggcctgctctctgagagctctgcaaagtaaggtttctcaatttgcactgctgacattctgggttggataatttttgttgtgggagctgccctgttcattatgggatgcaagcagcatccctggctcatacccaccagagcacaaactcctagctgtgaaaaccaaagatgtctcagacactgccagatgtctccaagaggaacaaagtcattcccagctgggaaccactgctcttaaagggattggttctcaaccttctccagcagactttgccatcagactgctggtgtagttaccaaccaggtgctcccagaaatgtatccttggtggagtgaggaaggcaggaacctcatagcaccgaggtttggtcctgccttactctgaataaggaaccagtgtgtcactgactcaaaaactgactagctgcaggacagagaaccagacaacctgagagaagaagatgactacatgtttcttagattgcttctatctcatttatagctagagggaagactggagctattacactatccctgatttccaagagtgaactaaaaatcagtggaaatccatttatttattcatttattggacaaatataaattatgttcttgctactttccaggcactctgyaaagtgctgggaatacaatgtaaaagcaacagacacagatatgtacctttaaggagcttacagcctgtccaccaccaggtggatggacattaaataaccacacacagaatagacagagtgagatgacgaaggaggtgggatcccttccccaaggccatgccgcctctaagagtacgaatgttaaaaaagggttatgctggagcaccgccactctgccctgctgcttggtggctgcagaaggcatggatcctttagtagccaggcaggacagctgtagacaggcccttctggcagctccacattcaactggcaccatggggacaaggctaaaagttaaacattggtgttctgcaatgctcacgtgtataggagctgagcttaaagaggaaagggaacgagctgtggatttaatggaaagggggatccacctcctactctttcccccttttccctcctttctcacccctgccaagattgcccagttacttccaacaagcagagacagttgagatcatgcctggcaacaagagcactgaggatatccatgaaaagacgagcctctcccagccccaaacccagagctactttcgccaggtgactccccgagctggaaagtttgcctactccacagacaacacctttgaacaggagatttactttggtaatagagctgggcccctgtggtaggggcacacggggacatgggccaggaaggtggaagattgctgggggctggaaacagttgtgggtatggacaagaggccctggatgacccaggttttcatgttcatgacccagcacccacactagcacaggagttgggtcggggagtgataactaatagggagggaactgctctctctccccgctttctctatccctctatcttactaaagaggcaatgaagggtggaactgtaaagttggcaagactttgggaacaatccatctcttctctatctacccttctcccttctctcacttcgagatattctcccacttcgagatattctcccaccaaggtgctatgttggaaaaaatcagggctttggagtcaggcacatttgggtttaaatcctggctcagtatttttttagtaaccttcagtaaattatataattcctctgagccacaagtaccttatttgtgaagtgatgttaacaaaaatgcactttgagtagagtagatgagaaagcatctgtaatgcttcttgctcaatgtctgtttaaggtgttcagtaaatgtttgccaccttccctgtccctactgctgtcccttagatgcctgggcttccaggatactcratctaggtcttcgtgttccaagctgtttcttcttcccaagccccatcttgttcctaaactgctgcagctgaaagtcttctcaaagtgtttaacaaaattactctaagtattcatgactgatgagattaattaggtgcctcttttttagtatctagctttttataagggataaggcctctaagtggttacataggttcttttcttttgttttcttttctattgagacggagtcttgctctgtcgccaggctggagtgcagtgacacaatcttggctcactgcaacctctgcctccacctcccaaatagctgggattataggcgcgcatcaccacgcccagctaatttttgtatttctagtagagacagggtttcaccatgttggccaggatggtcacaatctcttgaccttgtgatccgccctccttagcctcccaaagtgctgggattacaggcgtgagccatggtgcccagccggttcttttcttatttttgaaatggtttcactcccattgcctaggctggagtgcagtggtgctatcttcactgcaacctccacctcccaggctcaactgattctcctgcctcagcctcccgagtagctgtacccagctaatttttgtattttttgtagagacgggggtcttacagtgttgcccaggctggtctcgaactcctgatgatgtgatccacccacctcggcctcccaaagtgctgagattacaggtgtgagccaccacacccggccataggttctgccttaggaaggaaatcaccatccttggctcccaggcctctaatgaggtgactagctatgacatttcctttttcttttttttttyccccacagacactatagtgrtttatcactgtgatatttctaagcaatggtcaccttcaagggatgccccagagtatggcagtcatggatcctaggggcttagattagggcaaaaggaagttgggtctgatcctggtgattaggaacccagggagaaaggaaatagggaggttayaggggactcattgtttctttgtctgttcacagatgaagtccagatcatccaccagattggtgcaaagagagaccagattgtcctggaaaacctaaatcggtacaacaagcagctatctaaggtcttccctgaaactccagaaaagtggagtgcccaggcaattcctgaagcatgtaagcaggaagctaacagggaaggcaggggttaataacgggaatgtggctacttcccatcattacccactattcatgtgctagagctcccagttcatgggctgaagcaccattagcatctaggcaatcccctttctacgtactaaaaataatctcacaaaattataaaatactaactataactaggaagagcctcacaggaacatacaatcacttgagatctgatataacttaggtataaccaagtggtttagggccactagttaccaataaggcagctcctatctcaatgctaacagggaaagtgcacctaacagggaaagtgcatcaaactcctgacccagcattctgcccttttcccttgggctggctctaccctcccactccacactcagcccacccatacctgaactttcacaagttcatcattcttcactctgtaagacaaagagggaaagaaggtgaccaagaaattagcttatgaaacaaaatgtgcacatcttccacaagactctatttcccatgactctttgtaggattactgttcagatgggcccagtggtgtgcagaaactaacagcagttgtcacccattccttttttttttttttctttttttggagacagagtcttgctctgtcacccaggctggagtgcagtggcgtgatctctgctcactgcaacctccatcttcctggttcaagcaattcccctgcctcagcctccagggtagctggaatcacaggtgcatgcctccacacctggctgacagggttgcctggcctgctagttgtgcctttgcatccacttggcaagaagtccttccctgggctcagtctatccttggaggcacaggcacattctgtgcctgctgtggaggcacccgccagacagctgtggacagccacaggatttccacacaacctggctttgtttttgagataaagtctcgctctgtcgcccaggctggagtgcggtggcgtgatctcggctcactgcarcctccgcctcctgggttcaagtgattctcctgcctctgcctcacgagtagctgggactacaggtgcgcgccaccacacccagctaatttttgtatttttagtagagacggggttcaccatgttggccaggatggtcttgatctcttgacctcgtgatctgtccacctcggcctcccaaagtgctgggattacaggcgtgagccaccgtgtccagcctctttttcttttctccttcctcccttcctttttttccttcctttccttctccctttccttccttcatgtctccctttcctctcttcccccttcccctccccttccctctctctcttttcttcttcttttttttttttttttgacagggtctcactctgtttcccaggctgagcacagtggtacaatcatggctcactgcagcctttaccttcctgagctcaagcaatccttccacctcactctcccgagtagctggaactacaggtgcacaccactatacccagctaatttttgtaaagacaaggtcttgctgtgttgcccaggctggtctcaaacttctgggctcaagtgatgcaccctcttcagactcccaaagtgttggaactacaggcatgagccactctcccagccagaggattctttttcaataacagctttattgagcttgaatttacatactataaaattaatcctgttaaaccatacaatttgatgaggcaggcagatcgcttgagcctagcagtttcagactagtctaggcaacaaggtgagaccccgtctctacaaaaaaatacaaaacttagttgggcatggtggcacgcacctggagtcccagccactcgcgaggctgatgcaggaggatcagggccacaggtgtgcaccctacactcagctaatttttaacttttttagagatagggtctcactatgttgcccagactggtctcgaactcctggccacaaggggtcctcccaccttagcctsccaaacaaagtgctgggattataggcatgagccactgtaccctgccaagagtcattactttgtgtgctccctttagatcggcagtcctcaacctttttggcaccagggaccggtttcgtggaagataatttttccacagaccagcggggtggggatggtttgaggatgaaatggttccacctcagatcatcaggcattagattatcataaagggtgcgcagcctagacccctcacatgtgcrgttcacagtaaggttcatgctacgtgactctaatgccactgctgatctgacaggaggcagagctcactggtaatgcttgcycacccaccactcacatcctgttgtggtggcccggttcctaacaggccatgaactggtacaggcccatggcctgggggttagggaccccagctttagatgactgttgatgtggaagatggctagtggatgtgtttctatccagctataacccaaaggactggaaccaaagtaaaagttggcagttgtattttttattcctatgaggttaaatatcagagatctaagacttgctcaccgcaaatccattttaactccttgagcagagggatataggagaaatggggttaattcagctacttctcatctcttcaggagggatttcaaatcgcctgagagaagtcggggagygtcacatggcaaagtgtgagctggcctgtcagaggtggttccacagctcctagttgcacacaccctaccccagaaaggagggaggcctcagcagagtggctgagtcccccagcacgtccaagctggtggggaccatttggaggagatgcattgtatgggcatctttgctaaactgccctggagtctcacaggactctttttttttttttttttttttttttttgagatggagtctcgctttgtcacccaggttggagcgcgatctcagctcactacaacctccgcctccccagttcaagtgattcttctgcttcagcatcccgagtagctgggattacaggcgcccaccaccacgcctagcaaatttttgtatttttagtagagacagggtttcaccatgttggtcaggctggtctcgaacttgtgacctcaagtgatccacccgctttggcctcccaaagtgctgggattacaggcatgagccactgcaccccgcctcacaggactctttttacattagaagaaagaaatgttatgtcttccttgctcaaaggaaagaattgattcagagcaaatctaaaggtgttaagagtcagaatgaaatcttggaaaaaaacagaaatggctgatagtgactgattagaacatgagactaataggcagtgtgaataatgaatttagtacatctggaaatgtttttatcatttttcccttccccttctccatagagctttttttctgagaaagaggctttctaaatttgacaccatgaaaaacattaagttcagaaaatataactatagttttttttttgttttttttttttgagaacggagtctcactctgtcgtccaggctggaatgcagtggtgcaatctcagctcactgcaacctccgcctctcaggttcaagtgattctcctgcctcagcctctcaagtagctgagactacaagcacatgccaccatgcccggccaattttttgtattttagtagagacggggttttcaccgtgttagccaggatggtctcgatctcctgacctcgtgatctgctcgcctcggcctcccaaagtactgggattacaggcaaaagccaccgtacccggccaactatagcttttctaactatatctaatatttacggcttcttctgttctcaaatttctgttgtcttgaggaaaaactcagagatgttaaaatctttaaaatttcacagcttatagcactattattctccccaaattaaaaacattaaaaggaaaacttaatactttagaaataatggccaatgacactaaattgcaacgtatcaaatattatgagcaaatctcgttacatataaacatatttatgttcctaaagatttaggttcctaaagataacctttaaacttatagaaaggtttgtagatatctcaatttccccccacaaatctctcacccccatcatcatcatggcttaccatgtctagtcaggactttccataattccctgtgtacatgtactcagttccccatataatcatggggaaattcactcttgagggttttgttttgctttggtattagtcaggaataggaatgggatgcaagctggggccactgtgtggcagggcctaaggcagtggggtgaaaagacctcacactgccacgttgcacagcttacagacctgtgcaaggagccctgcgctggactgctttgcccacccccgccaaggatatgctgctgcaggtgggtgagaaggatgtgcctattaagaccaggagattgaagaagcaggcaaaatcactgcaggaggatgtgacctgggaactggtggtcctgcggaggatgctgaaggaatggaagactgcctgggctctgagtgagtgaagggaggtcctgtgatactgtacgtttgtgagaagtggttctcatctgggactaggctttctcagtctttgaaaaatccatccctcctttgtgaaatgtaaaaatctggttgcctcattaaggctagacaagagcctttcacacattgggtgttagatgaacttcagttaacatatatctgggtgctttttgcatggatgggtattacttcagtaatttgtggaaactcattattacactgcagactcttcagaggcagagaccatttttttttttttttttttttttttttttggagacgtagtttcgctcttgttgccttggctggagtgcaacggtgggatctcagcttactgcaacctctgcttcctggtttcaagtaattctcctgcctcagcctcctgagtagctaggattacaggcacccgccaccacacttggttaactttttgtatctttggtagagatggggtttcaccatgttggccagagtggtctcaaactcctgacctcaggtgatctgcccgccttggccaccgcgccagcccttttttytttttctgagatggaatttcactctgttgcccaggccggagtgccatggcacttgatttgggctcactgcaacctctacctcccaggttcaagcgattctcctgcctcagcctcccaagtagctgggactataggcatgtgccatgatgtctggctaatttttgtgtttttagtagagacacggtttcaccatgttggccaggctggtctcgaactcctgacttcaggtgatctccccgccttggcctcccaaagtgctgggattacaagcataagccactgcacccaggcgaccctatcttattgttttccaaactttatgctcagcaaatgatgtatgaagggaagaacaaaatatgctgtccaaccattgtccatgtcatagttgactatggtatcagcaacccctctccaaaattcattcgtagagttggggctatcctatacctactttgccttcaaagataggagagtagaagtctgagtgcctgggacaaagtaatggcctggcaaggactgttgaaagctatggtatttgagaactcaatagctgctggctttcagaacatgatagacaagcttagttagtgcaggaaaaagagaggcaatccattaggtaaactggatcagataaacaataacaaaaaagactgaaggaaacacctacagataataggagctttgaaataaaagtctgatacctgccaaaagagtatttagcaactaaaatgaggaagatgttgaaagccaaatggaagtgccctcaaagacaaagaacctaatgaaaaccacaatagttaacatttattgaaccttcattatcttgccaggcattttgctaaacactttgtctagttaactcatttaacagtaagaataactcaatatgtgggttctagtattatgcctgtattacaaataagaaatctcaggctcagggttaagtaacttatccacagtcacacagctaataactgtgatcccaaaccaggtatgtctgaaaacaaagtactcttaactactttgytttattgtcacttttatttcccagatggttacaacgaaaagtgatttaaagaaagagagatagatacgatggggttgggagaagttttgtctgggaacttacttgtgagggtacatggatcatcagagaaataactccctaaagaccccatctctgggccctttattcttctgagctaatgttttgcttgaattattctgggtgaagggcagacttcttgtcacctgcctgcagcacaatatctaaccctaaccaggtggttctcttttcatttccctcactgcggctcagtcatagagtggcaccatgagacagtagagaacctgcttcagagcttgggagacctgcatgatgacgttcggatcaaagctatcaccacatgtgccacagctgctttggaacggccccggattgccaccagccagagagactcaggtgagagccaaagctgaactgcttgagaacataagcaactcataaagccatggaacatctgaactggtagggacccagggcttatctgagatcattttacaaatgtggaaaccaagacttagagactggcctatatatacatgcttatcagcaatagagacgagattaaaattccagacttctagtccagtaatttttgaactacatttcatcaccttttgtttgctcagtggcctgcagagaagttaacatttcccaccttgaagatcccattcttttttgtttttgtttttggtagagactgtgtcttgctatgttgaccaggctagtcttgaactcctggcctcaagtaatcctcccaccttaacctcccaaactgctgggattacaggcgtgagccactgtgcccagccaagagcccattcttttttattttattttatttatttatttatttatttatttatttatttatttttgagacagagtcttgctctgtcacccaggctggagtgcagtggcgcgatctctgctcactgcaacctccacctcccaggttcaagcaattctcctgccctagtctcccgagtagctgggactacatacaggcgtgtgccaccatgcccagctcatttttttgtatttttagtagagatggggtttcaccatgttggccaggctggtcttgaactcctgacctcaagtgatccacccacctcagcctcccaaagtgctgggattacaggcatgagccaccgcacctgacaaaatcttaaaatatgattcacgggcttagctgtgccactccttgggcagtcagctaacctctctgagcttcaaattacctatctataaaatgagactagtggtagacaaagggataacaaacctttccccttcctacttgagaatttgaacttcagttaaatgcccacctgttcccctaaacacctgataagaactatctttataggcaacattggttatgatataaatcctgtttgataaattacattgggactgagaagagctataagtgaaatataaatacttgatagggacaccatagtttgggcctccctggatactgtaacttataacaggcaggccctttgtggaccctagaattgtgtctatggagtttttataagagatattagttcctgtaaagcataaattcacccagtgaataaacaacatgctcctgtgctgtccccaagactctgtggaatgctcaagacagcctcaagaactgcagccaaagccaggtgtggtggctcacacttgtaattccagcactttggaaggccaaggcaggtggatcacctgaagtcaagggttcaagaccagcctggccaacatggtgaaacctcatctctaccaaaaatacaaaaattagccaggcgtggtgacaggtgcctgtagtcccagatactcggaaggctgaggcagaagaatcgcctgaacccaggaagcagaagttgcagtgagccaagattgtgccattgtactccagcctgggcaacagagcaaaaactctatctcaaaaaaaaaacaaaaacaaaaacaaaaaaactccagccaacagggatgcctgatgctgctgccctgttgacaaactatgctcctgtcccatattcttctggtgccatgcatggcccatgacagtcttatgaaccttactgtttagttgaaccaaaaaagactccctagtgagctctacaatgatacctaccttgcctaattcaaccaaggttgaaagataacragataatgtaaaaacactatattataaagcactmcctaaatataattgttcttacaaatataaaggctcagctgggggcggtggcacacgtctgtaatcccagcactttgggaggctgaggcaggtggatcacaaggtcaggagatcgagaccatcctggctaacacggtgaaatcccatctctactaagaatactaaaaattagctgggtgcctgtagtcccagctactcgggaggctgaggcaggagaatggtgtgaacccaggaggcggagcttgcagtgagctgagatcacaccactgcactccagcccaggtgacagaacaagactccgtctcaaaaaatatataaaataaataaatatatatatatatatatatatatawatatatatatatatatatatatatatataggctcatggggcaaattggttgcttttaatcactaaaactaatggtgtagttcactgtagcctagctggaaacattcttcttcggcttaaatatagctgtttagaggccagatgataaaggattgggaattggcataccagcacacaggtgagctttaacaccttgagcagaaaatcctgcccatctgaagggctcagctaaactgtaattatattacatagcactaagcaactgcagctgggactgaggttggccaccacatggctgtaggaaggaagctgtgtgtgagaaaagcaaaggggctagtactctcttacctggctcttttgatcacagacaagaccatccaggacttgccggaggttctactgcctgccctagaggctgctctttgtgacaagaatgcccatgtgcggatggcagcagcaatatgccaatatgccatacagtcacataatccccttgcccggaacatcatgcagactgcccttctgaagggtgagtaactccctgttacttctgacctggaaatatgggatagacatctcactatcagctttcccagtcctttcctctccactgtgatgctctgcaatgtctgctgtattgggtttagatttatgttagaccatttgaaaattaggaccagacactgtcgctcacacctgtaatcccagcactttgggaggccaaggcgacaggatcacctgagcataggagttctaaaccagcctgggcaacataacaagaccccatctctataaaaaattttaaaattagccaggtgcggtggtgtgctcctgtagacccagctacctaggaggctgaggcagacctatatatacatgcttatcagagtcagcttgagcccagggggttgaagctgcaataagccacaatggtgccactgtactccaacctgggtgacagagcaagaccctgtctctaaaaaaaaggaaaaaaagaaaatttgctctttctaggtactttaacaaaacaggtacactgccaccaagtggtagctggactaaattttttttttttttttttttttttttgagacagagtttcactctcgttgcccaggctggagtgcaatggtgggatctcagctcacactgcaacctccgcctcctgggttcaagcaattctcctgcctcggcttcccaagtagctgggattacaggcgcatgccaccacgcctggctgatttttgtatttttagtagagatggggttttaccatgttggccaggctggtcttgaactcctgaccttaggtgatccgcccaccttggcctcccaaaatgtgaggactacaggtgttagccaccgygcccagccaatatgattcttctcaatatggtttaaataagaaattgtatttctagactgagtggggcacaaggaagtgagatatcaggtggggtagcagccttgggtatcaatccaaaggctgttctctagggggaaaacacatcaccattctgaactctttttcacccaactgtggcaggtaacagtgtggatagctgggctgcagctcagtgcttggctctggaaggtactgctacttaccctgtgattaagaggatcctccaccagctgtttacaaagaagaatgaggacactgaggaacagtcttatatcctcctgagctatctgagtgagaagacagtatgtgtccattaccgggtcagacacagttttggggagcaattaggtctttgaggtcagtgaatgtaagcaatctgaaatgcagctggggccggggcagtggcttatgcctgtaatcccaacacttcgggaggccgaggcaggtggatcacttgaggtcaggagttcgagaccagactrgccaacatgggtgaaacctcatctctactaaaaataaaaaaattagacaggtgcagtggtaccacactgagtagtcccagctactcgggaggctgaggcatgaaaatcacttcagcctgggaggtgraggttgcagtgagctgagatcacgccactacactccagcytaggtgacagagcaagactctgtctcaaacaaataaaataaaatgcagctgggctgggcatggtcgctcacgcctgtaatcccagcactttgggaggctgaggtgggagtatcccttgagtccaggatttcaagaccagcctgggcaatatagtgagaccctgtctctacaaaaaragaaataaaattagtcaggcatggtggtatgtgcctgtaatcctagctactcaagaggctgrggtgggaggatcacttgagcctggcaggttggggctgcagcgagctgagatcacaccactgtactccagcctgagcgacagagcaagaccctgcctcaaaaaattaattacacaattaattaattagataaaatgcagccggttgggttgacaatctcaagcataagtaaacgtagaataagcatgagtaaacctgggtgtagaggtgtatacaaagggaagtcacaatagttagctgagagaaaagtgagaattaggttgcaaatggtctctatttgcatatgcaagaagagttctgacatgtagaatttgcttctgctagaagtttaccattgaaaactgcagaggcctatatttgtgtttagttactttcaatagaaatgtgaaagtcataagcttgaggcatataaaaatcattttaggggtaaaaacagttaaagacagaaggccgggcacggtggctcacgcctgtaatcccagcactttgggaggccgaggcaggcagatcacctgaggtcaggaattcaagaccagcctggcaccaacatggtaaaaccccgcctctactaaaaatacaaaaattaaccgggcgtggtggcaggcgcctgtaatcccagctacttgggaggctgaggcaacagaatcacttgaacccgagaggcggaggttgcagtgagccgagattgtgccactgcactccagcctgggggacaaccttctcagaaaaaaaaaaaaaaaaaaaaacagttaaagtcaggaaaggaaggtcccagttttctgtttaagttattaaatttgtattttgttccccaatttatgatcccagagtcagttggctgtgatggaaacatgccccatctcttgtaagcccactggtgacattaattatgcaggatgccatttcagaatgtaacttcaaggttctagtatctctaaaagtgattgtgaatatccatacaagtcttccatttcctcagaccctgatacacaccatgcwtgctgtggagctgaacagctgtcaakggaagaaccggattgtggcctgccaggctttctcccggatcagtggaaatgyctgcttggtaaacmtctttctttgcctccaggacagaaagcstaasagaggctgagctacagaggccttctactttttgctgctatgtattattccattcttaccaaacagatctctgttcccacatcactacttcttacttctagcccagaattatcttcaaatgctaatatgtctgtctggaagccaatgcttctcagtgcactggtggtccataaactgttggtaactgatccacaatgaaatagcacaaaaactgacaggagtttagaaacgtttatagtaggccgggtgcggtggctcacatctgtaatcccagcacttggggaggccaaggcaggcggatcacgaggtcaggagttggagaccagcctgaccaacatggtgaaactccatctctactaaaaatacaaaaattagcagagtgtggtggcacgcgcctataatccctgctacttgggaggctgaggcaggagaatcgcttgaacccaggaggcagaggttgcagtgaaccaagatctcaccactgctctctagcctgggtgacagagggagactccatctcaaaaaaaaaaaaaaaaaagaaacgtttatagtaatttgatattgcctcaatatcaacagactttatcagtcaatgacrtatttcccccccgccaaaattggttcttcatcaaagatcattcgagaagcactgacttagactacccaaaaacccatctaaatgagtgtctgtgctgcttctcagagtgttcggcacacacatataaaacatagtcccggccgggcacggtggctcacacctgtaatgccagcactttgggaggccaaggcaggtggatcagagctcaggagtttcagaccagcctggccaacatagtgaaatccyatctgtactaaaatacaaaaattagccaggtgtggtggctggcacctgtaatcctagctacttggaaggctgaggcacaagaattgcttgaacctgggagggagaggttgcagtgagcygagatcgcaccactgcactccagcctgggcgacagtgcgagactctgtctcaaaaaacaaaacaaaaaaaaacaaaacaaaaaaaccattgtcccaactttcacaaaattaacactatggtaggaacaataagactaatatacacaaatgattcaagaacaagcaataaatataaggtacccttttaaaacttttcagagagagagagattagtgtgggttaaatttattggttaaagttctgtgaaggggtccggtacggtggctcatgcctgtaagcccagcaccttgggaggctgaggcgggtggatcacttgagaccaggaggttgaaaccagcctggtcatcatggcaaaaccccatctctaattagctgggcatggtggcacacacctgtcatcccagctacttggaggctgaggcaggagaatcgcttaaacctgggaggcggcggtttcagtgagccaagatcgtgccactgcactccagcctgggcgacagagcgagactccatctaaaaaaaaaaacaaaccaactgtcggtgaagatggtggggctcagctagaactaaagagggaattccaggcaacacttcgtttttgccattatttcccaatcatcttcagctgtccaaatgggagctttcccttcttcctatgtgctacttcatcttttccttataactttggatatctccagaatagcccagaacattgccattcccatgataagtgaacaacctccactctgtaaccctgacattttgatatgggaagcacaaaatctggccactcagtacagtaatcacctgaaaaggttttggacttgggttagttctgtctcaagtgctatagcaccctgctgctaaagtcctggaccagcagcacaggcgtcacctaggagcattattagaaatgcaaaaatcggccgggcacagtggctcgcacctgtaatcccagcactttgggaggccaaggagggcggatcacgaggtcaggagatcgagaccatcctggctaacacggtgaaaccctgtctctactaaaaataaaaaaaattaggcgggtgtggtggcaggcacctgtagtcccagctcctcgggaggctgaggcaggagaatggcgtgatcccaggaggtggaggttgcagtgagttgagatcgcaccactgcgccccagcctgggcaacagagcgaggctccgtctcaaaaaaaaaaaaaaaattagccaggcttggtggcacatgcccataatcccagctactcaggaggctcaggcaggagagtcacttgaacccaggaggcggaggttgcagtgagccgagatcgtgccattgcactccagcctgggcaacaagagtgaaactccgtctcaaaaaaaaaaaaaaaaaagaaatgcaaaaatctcatcttaagccagctcaatcagaatctgcatcttaacaatatcattttaacaacttccaattcatttgtaccttcacctccttggcacttgtcacttagaattgacaactgaaagtaaaaagacatgcagagctagcaggggttgaggtaaagatgatgaggacttcatggcagattgctggagctaagaaaggcagtatgtctatgagtcttttcactcattcagtaagcatgcagtttctgaccacatccgacgcactaggcactatgctacccctgggggtgcagggataagtcttccgttagtaaatgttacaaatagctagaacagaagcagctataaggtgttgtggggatttcctgtgcttacaaggggcaaagaagacttcactaaggagatgtttttattttattttttaaaatttttaataaaagagataggaaggagatgcttttgaggtaaatcctaaaggaagactacaaagacatcaagtaccaggtaggagtagagaagggagatacttctagcaggaagaacagcgtgggcacatttacacatcatcgtgtagtaatctttgcccattcctctctgagagaagtgcacttatagagtgaccaactgttctggtttgtccaggccatgggactttcaggaccaaaaccaggagagtcccaggcaaactgcaatgagctagtcacttcatcaagtatcactttcaaattttaagtctcccaggtacaagttatgttggcactgatactacatagtttaaaggatgagcttgggagagttgggtttgagtcctggttccagcactcaccaggttaaccttggacaagctgatcaaagcctccattctatcatctgtaaatggtagtaatatctgccccactggattctttgggagagtaagcgatgggaaaaaacactcaggacaatcctcattagtacagtgatgagtaaaaaaagaagaaaaaacagcacaacgccaagcacaaaattaacattcattaagtgatgatacctaatgatcatacctatttataggatatgaaacataagttgatccagctgatgtggaatgactggaataaggaagtgaggagagcagctgcacaggcgcttgggcaaatgagcctcgggaaagaggtgcaygacataatcaggtaagacccagtcaacatgaggagacactcttctaaattcttagaagtgtttaggaggcaggctgggcaaggtggctcccaacactttgggaagacggggtgggcggatcacgaggtcaggagatcgagaccatcctggctaacacagtaaaaccctgtctttactaaaaatacaaaaaattagccaggcgtggtggcacatgcctgtcatcccagctactcgggaggctgagacaggagaatcgcttgaacctgggaggcggaggttgcagtgagcagagatcgcgccactgcactccagcctggcaacagagcaagactccgtctcaaaaaaaaaaagtgcttaggaggcctgggatccagccacccagcatttgttgagctcctctgtacggaccctggaccaggtcccactgtaaaaaattaacagtccctacaaactaacaatgtggctagggaaagaagcattgagtgcccagtaggtgtgaggcaatggtttcggtgctggagggtgttcaaaagtatgacgcaattctgatgaccacatgcaaaatatacaaacacctaattaaaaataccaaatcattaaaaactagaacaaatggcrtataccataactgctggagcagaaaaatggaatactcagcgtggctagaggagtaaggccaagtttcacagagggtggataagactgcacaggaggcccagcccagtggcacacgcctgtaatcccaatactttgagactctgaagcaggaggatcaattgagcccaggagttcgagaccagcctgggcaacatagcaagaccttgcctctactaaaaattaaaaaaaaaaaaaaaaaaaattggccgggcgcagtggctcactcctgtaatcccagcactttgggaggccgaggcgggtggatcacaaggtcaggagatcgagaccatcctgactaacatggtgaaaccctgtctctactaaaaatacaaaagggcgtggtggcgggcgcctgtagtcccagctattcgggaggctgaggcaggagaatggcgtgaacctgggagttggagcttgcagtgagcggagatcacgccactgtactccagcctgggcgacagagtgagactccgtctcaaaaataataataataaaataaaataaaaagttagccagtgtggtggtgtatgcctgtagtcccagctacttgggaggctgaggcaagaggactgcctgggtccaggaagtccaaagctgtcatgagccatcatcatgccactgcattccagcctgggcaacagagaaagacccyatctcaaaaaaaaaaaaaaaaaaaaaagagagagagactgcataggagccgcagagtgggtaagtgcctataatcccagctactcaggctgaggcaggagaatcacttgaggtcaggagttcaagaccagcctgggcaacatagcaagaccccatctctaaaaataatttaaggccgggcgcggtggctcatgcctgtaatcccagcactttgggaggccgaggcgggcagatcacgaggtcaggagatcaagaccatcctggctaacatagtgaaaccccatctctactaaaaatacaagaaaaacaaaattagccaggcgtggtggtgggcgcctatagtcccaactactcaggaggctgaggcaggagaatggcgtgaacccaggaggcggcgcttgcagtaagccaagatccagccactgcactccagcctgggcaacagagcgagactccatctcaaaaaaataataaaataaataaaaataatttaaacaaacaaacaaaaagactgcataggcattccaggctggaagccaaatgcagacataatcatggcacacgtgagggcaatggagaagagaacttgactgtgaaaagaggtgcaagttgacattttcctttattcagtcattcagtgtaactgaawgccctgcattacctaattactgaacagctatgtattagggattcaagtaaagaagacaatcgagctctgtacccagtaaaacttatctcatgagcataaggctgaatgggattgacagcctacagaacccggattttatcatgagggcattagtgggggttgggggttaggtactgaaagtttaaggaggtgaaaggaaagcaacttgtgccttacagggtcaagctaggtcaaggaaattcccaggagcgtgtggaagctctctacctgataggtgagctcaagcttatgaccgccaagcttctcccaagcttcctgcactgcttctctgatgacttcacagcagttcggcgggcagcctgtttggcagctggtgccctgcagatccgcgacaagatggtgagtcagggaaacatattctcatcttacctgattgacctgaagagggcattaccttccctggttgtgcacagtatgctcaacattctgtggggacacagaatgagagattggaactgggaagggggtgtataagccacttcaaacaggactgtttcaggggcatccaatcttttggcttccctgggccacaatggaagaattgtcttgggccacatataaagtacactaacactaacgatagttgatgagctaaaaaaaaaaaaaaaaggtccgtgcataattctcatggtttttttgtttgtttgtttgtttgttttgagacggagtctcgctctgtracccaagctggagtgcagtggcgccatctcggctcactgcaagctccgcctcccaggttcacgccattctcctgcctcagcctcctgtgtagctgggactacaggcacctgccaccacacctggctaatttttttgtgtttttagtaaagatggggtttcaccgtgttagccaggatggtctcgatgtcctgacttcgtgatccgcccgcctcggcctcccaaartgctgggattacaggcgtgagccaccgcgcctggcataaatctcatgttttaagaaagtttacaaatttgtgttgggccgcattccaagttgtcctargccacatgttggacaagcttggtttagctcccagccagcccagacttcgattctagagcacacccctgaatcctgttctcacctcagttaactagcttctcattacctgggtgctgatgggctttaggatcaactcccataaatggagttataattccattattagggaaaaatctgtttgaagtgttcaagagaagccatatggccccagatctgtagactgagaaaatcaatagcagataattcagctaatgtactcactatgcatataggttggtactttaggctccagctcatttgtcaccagaattgataggtcatttttcaattatagctccttttagagataagtggtttccctgtttctgattcattcttttgctttgttttgtttttttgcttttttgagatggagactcgctctgtcacccaggctggagtacagtggcacgatctcagctcactacaacctccgcctcycaggtccaagcaattctcctacctcagcctccgagtagctgggattacaggcgtgtgacaccatgcccggctaatttttgtatttttagtagagacagggtttcaccatgttggccaggctggtctcaaactcctgatgtcaagtgatccgcccaccttggcatcccaaaatgctgggattacaggggtgcaccaccgcacccagctgtttctggttcattcttgctctggtcctccccactcaacactgccttttccatcccaggtgcttgaatgcctcctgaacctgatgcagagagatccttactggaaaatcaaggcctttgccattcgaggtattatagaagtagtgccccaaactcttcaaccttaaatacctttgcctatgcaagtagaaatgatcccctgaaactctctaatggggtgaagtgyaggagaggtaatgatcttagcttttcagaagttccttgtctgaaaagagaaagataattttcttcaatttttagtgaaagatcctgagtctaggtatatgtcaracttaagttaaagaaagggctgacaagacagtccctgccaacagaattaaggataagttccaagtaggtatccagtgctggatgcatcttgctttccttggagatctcaactattacgctctgcaaaagtcagatcagtttcaagactgctacagacctaaaaccctgccccttaatctgcctagtttctttttagaatctttggcattgcttctctttttgacatagataaataattgtgcctcctttccccatcaccctgctgggactaggcaggtcttccatgttatttgttctatatttcatcccaaaataggcaaatatcctaacaggcaaggatgggatggaacatccctcttctaggaatcctttggaggtaatgtcccattctgacctatccctaaaattctaatggtgattaccatccaaaagggaaggtattgtttgcaaaactcaatttatttctggatgctagaatatagtaagctcagtcttcagtgacatgctgccctctaatctctgcagctttgggacagattgggcaagtaagtcccgagctgacggatcttctgctctgggctatccactatgaagagtcaccaggtgtacggctggaagcttgccgtagcatcctagccctgaaacttcaaggggaccgggtcagggacaccttcctagacgtgctgctcctggagaaccacgatgctgttctaaagtaagcactaaacctctggctcccaccatgaccttatactgccaactctcacatctttgctcattgaatatgtccctgcctttccaggctacctaatggcagtaaaagcactggttcacctgcacattcaccactcacccaagtaggtaactgaaaaactggcctaaattagattgaaagtcaagcttatgtagttcatgcatcttttctccccaccaggatgggttttggccgggtgtgatgactcacgcctgtaatcccagcactttgggaggctgaggcaggaggatcacctgaggtcgggagtttgagaccagcctgaccaaaatggagaaaccctgtctctactaaaaatacaaaattagccaggcatggtggcacatgcctgtaatcccagctactagggaggctgaggcaggagaatcacttgaacctgggaagtggaggttgcggtgagccgagatggtgccattgcactccagcctgggcaacaagagcaaaactccgtctcaaaaaaaaaaaggatgggttttaagttattcatatattcaactaacatttatcaaatgcctattgggacracaagttttagagtcaaaaagaccagggtttgaattccagctctggcatgcaatagctatgtgagcccgtgtaaggtatttaaactctgtgagcccatttttttcatgtatcaaatgcaggtgatagtctacattatagggttgtggtgataattaatgagatgacatgtttagcgcctgtcataaaggtgttcagtaaatggtacctattggyaccttcaaatatattgtcttggccagatgaggtggctcacatctgtaatcccaacactttgggaggctgaggcagatggatcacctgaggtcaggagttctagaccagcctggccaacatggtgaaacctgtctctactaaaaatacaaaaattagacgggcatggccgggtgcagtggctcacacctgtagccccaacactttgggaggccaaggcgggtggatcacctgaggtcaggagttctagaccagcctggccaacatggtgaaaccccatctctactaaaaatacaaaaactagctgggcatgatggcacgcgcctgtagtcccagcaactcaggaggctgaggcaggagaatcgcttgaacctgggaggtggaggttgcagtgagccgagacgagatcgtgccattgcactccagctctgggaaacagagcaagactccatctcgcaaaaacaaaaagtaaacaaaaaacccacaaatatattgtctcaaaaactgcacattattcctgtaagctaagcattataccatttttgcatataaggctcagcaaaactgcacagttaggattggaacttgggattcttacctgattccaagtcctatattttctacccccatacttttttaaagggcagggtagaataatctaagaagcccttcttatctttcagrgaaatgtaccagacaatgaagatactcaacttaggaaatgaaggaaaccaagaaatgcttcaggagatcaagaacagggtaaataagtgcaagctctgttctcaagagaaaattcaggactctcaagagttcctcagaccctgtcctcctcaaacatgtacataccctttttcccaccatagaagtactttctaaaaccccagacacagatgccacatcatttgaagatgcaaagcatctgtgcaagattgggttacaaggtcctactagtaaagacaaaaacaaaacaaaaatcctattagtcctatcaagtaaccctcattgtttcagaaatactatttccctcccttcctattttctccccatcaaccccaaacccaagttgtttatttttcctttttttcaaataggcatagagaaggaataagggactagagctggccccctagattttcttcttaatttttctgaattcctaatctgggttttctcaccaaagaaaatctctagctgaaaggattaacataatttttgcttttttttttgagggggggacagtctcgctctgtcgcccaggctggagtgcagtggtgtgatcttggctcactgcaacctccacctcctgggttcaagtgattctcgtgcctcagccaccaaaatagctgggattataggcatgtgccaccacacccaactaatttttttgtatttttagtggagacaaggttttgctatgttggccaggctggtcttgaactcctggcctcaagtgatccacccgcctcagcctcccaaagtgctgggattacaggcatgagccatcatgcctggcctggattgttctaatttttcaaagctgttagataagatgaaggaatagaggggaaaggactttaaaaaggtaattcaagaaaccaacttcacatcaagcaagcaattcttagcaggttcatcatgcccaaaaagctgaagtaaaattttcacgaacaggtataaaaaatctccaaccaatatcataagagaacaatgttctcaggcacttatgtaccacctactactgataagcatatgcaattagttacttctttattttctagagacagggtctcactttgttgcccaggctggagtgcagtggcatgatcacagctcactgtagccttgaactgttgggctcaagtgatcctccctcctcagcctcctacaatcactttattaatgttttttgataatttgctgcctagtacaggtgttttgttttgtttttcaaacattatttgttctaatttagattaaaacactaagccaaaaggacttgctgacacacaaaatactcaagctggagatggtcatgggaaaagtgagggaggaagcaaaacgtgtttacttgaaacccaaaggagaacaaggaccactaacactccagactttactccaagaaacttttcagggtaggtttcctaggggtgagttccatgccttgattcctttaataagcctcttccaggatctggatgttttgggacttagtagcaagccttggaggatgaaagagtcaggaaagggtactctcttccctcttggctaccatccactcagtctttgtgtttttttttgtttgtttgtttctcgggtttttattcatttattttctcccttaaaaaaaagttatctctatttgaactgacttaaaagttaggtcaaaaaaggacatatcagaaaaacacaagtctttataaaacaatactaccatgtatgtttgactaagcactcaaaaaagctttatgagcttaaccttaatagtggtagtggttggtggttgggcgtggtggcgcacacctgaactctcagtgctttgggaggccatggtgggaggatcaccccaggccaggagttcaaaaccagtctgggcaacatagcaagacccctccatctctacaaaaaaataaataaataaaaattatctgggtgtggtggcacacactggtagtcctatctactaaggaggctgagatgggaggattgcttgagcccaggaggttgaggctgcagtaacccaatatctcaccactgtaccccagcctgggcaacaaagtgggaccctgtctcaaacaaaaaaacaaacaaacaaaaaatagtgcttgtctctggaaagtggggttggagggagaactatcatttttacttagtgtatgtctatgcttttgtaacttttttaaaaagaatttgtaaagttctcaaccttaaataacagaaaactatccattatggtgacagactcttaagagtcccagacgcaacctaaatgatgagggtgcagaaatcaaactgtaccaaaatatacttacaaaatctgtgtgcctgagcgtagcatcagcctcaggtcactcagccagctgcctaccagctaccaccccaaacccaggtcttctggttccaagtccagtgctctttctggtacatcaggcacttttccaccaaccatgagaatattcacttgtcagatttggggaagtttcttcgaactgccagaataaaaatgagagtggaaagtaacttgaacagtagccttccttcatggccagcttgctaaaagttggttgcctaaggtctatgaaggcacaactaggtgacatgctgcccttatgacagcagtgccagccatggatgtaagcaaacagtgagcaaaaacataccatgatcttaaaactgaacaagctggtagaaaataatttttctactagaattgggttgcataattaaatagcataaattatccccaaagttagtgaactggtcccaatcagataagattcttttttgtttttgtttttgtttttgagacggagtctcgctctgttgcccaggctggaatgcagtggcatgatctcagctcactgcaacctccacctcccaggttcaagtgatcctcctgcctcagcccccctagtagctgggattacaggcacgcaccactatgcctggctaatttttgtattctcactagagatggggttttgccatgttggccaggctggtctcaaactgctgacctcaggtgatccacccgcctcggcctcctaaagtgctgggattacaggcatgagtaccgcacccagcctgagagtctcttccttaagaggttgattaacatgctccttttacatgctacaaccaccccaggttgcttttcacttcagccattatagattttccctatcttcctcccgctcctgcatttcttcgaaccatcccacataataatctagccttaggaaagggaaacattctttggcactttaataacttttctaaggttcatacaaatttaacaataacaaacaggatactgaccccgacccgcccatgaaaaagaactcagatgaaagatccaaattccaaaaaaaatctaatatctgtctcaagcagaacgacatggtcagtgttacccagtacactgaagcctgaaggtgatgaagttggtgctctgaaatgatcacggatcaagggttttttttccacctccaacttctccttttccttttgtacctagatgagatggttcttcctagaagaccttccgaggtttgtgacactgaagcagtgataaaggtaaatgtgagcacactgatgcttatcaaggtaagaacgtgagtttaaggaaaaaaaaaaaaaaaaggtagcagtggcagcggagaatcactactgccttgtttccagcaatcaacaagaaactaatttagggctagaggcatcttagtgagcagcagccccttatcatacaamgtggttgccaaggacagctggtcctccacactgtcacagggcaggtcccccactctcacaaactctggataagaaccaagcaacagttccatggcatcagcttgctgggggtatatttccaagcacttgggttcttccagatgatacacacgggagttttccactgtgtaatagagaaacaaatggcccccctcacccaccagccgagctatcccatcctgaagcatatggacttctgtttctgttgtcaactgggcccccacgtttacaggttctccagcctcccascgaattggaagcccgtaaacacttagtgccctctccctatcagtcaaaacagggggcagagaatcgtgaatgaagtctttggctcgctggtcggccacagcatcaacaggagcaaagtgtcccaggcgggcaaccaagacccgcaccttctccatgaaagcggttcttcgcggatccttagaatctgaatgctgggcccccatgtaatccatgaagtctcggggcagacccctccgaaactccacattttcttccattgcagcctgcactgccagaggcagtatggcctctaagaagtcaccccaggtattgcgctggtacgtggacaaggtgaggtgcagagagtggactccatcctggcattcagcttggtgaatgaagccccgaggaaaatacagcaaatctccaggttccagcacggtctgcagcaccggctcaccgaggtcgtcctgactgaagttggggctggatgtcagagccagttcctcggttgggrctcggggtcggtatacacgccagagtttcctaccttccagctgcagcacgaaggcctcgatgtcgtcgtagtggggggcaaagccctgcgagttagggggcgtgaggtaaacgttggagcctgccatgcttccaaactgctcttgaagcacagccaaaaactgccacacagtagtagagaaagcctgcggacagaggagacgcagggagcagccggcctggtacagggaccacgcggcggcgggcagcgcgcggccgggtgggttcagggtctcgcgtcgtccgttgatgtagcgagcggcgtccaaatgctggccgaactgcacctcctcgttgcgcagcatcgaatccaggtcagcggtagagaaaagtccstggtagtaggtgtggtcctgccgccgcaccagcaccgcctcgcgctcccataggcgccggtaraagtgatctggcggcatgggcgcgatgagccactcaaagaggcgggccgctcgccgccggctgctggggatgcggttcagctcggccaagacgcgccgcagcggggagtcccaggccggctccccacccgtgttatccacctgcggccccgacgccgtcgcaggggccccggacgactggacggccgctaagtgttgcgcggtgcacagcagggccgaggtctccaccacccggaccggcgcggcgggcacctccaccaggcgcgcgggcggcrcggaagcgggcaccaggcgcgccgacggggtctgcagggagcgcgcggcgggcgaggcctccagcagctctgcgggccccaggtggccgtatggctctcgccgggctgcgtccgggacgccgccaccgccgccccaccgggtagcgcgtcccccaggtcgtcggccgtcgactccaccctcgattcctccgagttctcgctaggcagcgtctgcgtcctcagcgctgccatgcgggatacaacacttcgcagctgctttcgtatcttcctggacctcaagggcagggccaggaccgacccgctgtgtggctggggcttgcgccggcgcytcggccgcccgcgcctcaacggccctgcactggcctggagcccatccatggccagaccacaccagtcttccccgccyggccggccggggscgaagctaaarcgsttcctgaatgcagcggctgcggtgcactctgggaagggggcgcggcctccagccacctcggggttggccacgcccatcattcttctattcggcccctcccgctctctttcattaaatgtttggcttcaagctgtagcggcagcggcaagaacccttgccaaacaaacaaggaatctacactcagagagcaatttaaaaatcaagttgcggccaagcgcggtggttcacgactgtaatcctagcactttcggaggccgaggtgtgtggatcacctgaggtcaggagttcgagaccagcctgaccagtatggtgaaaccccgtctctactaaaactacaaaaattggccgggcgcggtggctccgcctgtaatcccagcactttgggaggccgaggcgggcggatcacgaggtcaggagatcgagaccatcctggctaacacggtgaaaccccgtctctactaaaaaagaaaaatacaaaaaactagccggacgtggtgctgggcgcctgtagtcccggctactcgggaggctgaggcaggaggatggcgtgaacccgggaggcagagcttgcagtgagccgagatggcgccactgcactccagcctgggcgacagagcgagactccgcctcaaaaaaataaaaatatataataatttaaaaattacaaaaattagccaggtgtggtgacttgcacctgtagtcccagctactcg

SEQ ID NO: 9944 - DNA, 13840 bp, Homo sapiens
gtggttagggaaggtctcactgaaaatgtgacatttgagccaagacttgaaggaggggagggactcagccatgcagtttttccaggagaagagcattcctgcagaacaaacagcaagtacaaataccctgaggcagccgtgggccaggtcacgccacagtgaggctggagcactatgagaaggggagcagtcaggtgagaggtaagacaarccagagagaggccagatcgtgtggacttggccttttcctctgggtctgatgggagcctctggaggattttgagagaggaaggacaagtccgtctttagtttktttttttttttttcttgagatggagtttcgctctcgttgcccaggctggagtacaatggctcgatctcggctcactgcaacctccacctcctgggttcaggcaattctcctgcctcagcctcctgagtagctgggattacaagcacacgccaccatacccggctaatttttgtatttttagtagagacagggtttcactgtgttggtcaggctggtctcaaactcctgacctcaggtaatccacctgccccggcctcccaaagtgctgggattacaggcatgagccactacgcctggccctgtcttaagttttaacaggatccctccagctgcctgagaatacacagaaataggatgaaggtagaagcagtaagacataagaggttgtggtgctcttccggatgagaagtgcttagattctggatacattttgaaggtaagctaattggatggtttactgatgagttgcatgtatgatataaaagttatgactctggccaggcatgtggctcacgcctgtaatcccagcactttgggaggccaaagcaagtggatcacctgaggtcaggagttcgagaccagcctggccaacatggtaaaaccctgtctttactaaaaatacaaaaattagctggatgtggtggtgtgcacctgtagtcccagctactggggaggctgaggcagaattgcttgaacctgggaggcggagggtgtagtgagccgagatcatgccattgcactccagcctgggcaasagagcaagattctgtctcaaaaaaaaaaaaaaaaaaaaagatatgactctaaggtttttgaaaagagattaacggcttgggtatggtagtcacacctataatcctagcactttgggaagctgagccagaggattgcttgagcccaggagttcgagaccaacctggrcaacatggtgaatcccygtctgtagaaaaaatgcaaaaactagccagttgtggtggtgggtgcctgtagtcccagttacctgggaggcagaggtgggaggatcaattgtgcctgaaagatcgaggctgcagtgagacgtgattgcactactgcactccaccctggatgacagactgagacactgtttcaacaagaaaaaaaagggaagcccaactccttaaggggcaggggaggcagtggtcttaaagcccagagagggtctctatgtgcaaagagagggtctctatatgcacacaaatagcagttactatcaacctgtggcttggcaggaaaggagctgggaaaatggaaactccaacctcactctcctcccacccttccatctctggctgaggcctcttaccagatgaatcccattggaaactcaagggcaagcgagccatggctttactgcacagtcatctttcctgggtgtggagcagggagggaggagagtagaatgtcctccacagtgttaaaagcaagccaaggagtttgggtttgaggtgacagcgaatgagaaagacgtgaacagggaagcaatatgttaagttgcacttaaggtttttaaaagtagtgacaggattatctccaaagaagatacagaagtggcaaagaaaataaaaataaataaatgaaaagaaaaaaataaaatgacaggattaattaggtggagagtcagggagaactttaaggaggatgcttgttgatgattgagggcctgaactaagtgggaatggagagaaaaagaattattcttatataacagggtcatgttgagagctgggcattgttcagcgagcttcacaggcatgctctctggaaatgctcacaaacacctctagctgtctcatgatycttaaataatgcatggaaatgatttaggacagtgtccagcatacaaacatatccaataaatgttattagttgtcatgcttattttaaagattattaaacaaaacgaacagaaaaatatccgagccaagaggttgcccaactccgacatccaaacacagacacattctgatcccagctcccatgttcccaaggtcttgtccaaccacactgtgttttctctagtgctgtgagaaatgtttcaaagtaagaacgagtaagacttggagacagacatgggccagcgcctgcaagctgggaacaaataggacagaagccaatggcaagggagaggcagaagttggagagggaagagataaatgtggaaacaatttgctgaggaaggcagggacaagtagcattaaggggacagctggttgggttagacttaaaaggaagaaaaggtcctgtgggaaagatgacaccactagtaggtggaggaagggcatcaggaattaaatgcaatataatatctactagtgactaagggcttatcaaaagatcagataccttcttcatttttactttgaaagtcctccaaaaatcgatcaaagtccaggtgtggtggctcacrcctgtaatcccagcactttggraggccaagacaggagggtcacttaaggccaggcaatgcagtgagaccctgtctctaaaaaataaataaataaataaaatctatcgaagtgttaactctcctcttcctagggaatttatccaacagaagtccaggaagatcaaggcgggaggatcacttgaggccaggagtttgagaccagcctgggcaacagagcaagacccgcatctctaaaaaacagtaaaaaattagccaggcatggtggtgcacacctgtagtctcaagtactcagcggtaggactgcraggctgcagtgagctctgactgtaccactgcactcctgcctgtgtgacagaatgacatactgtctctaaagcggaaaaaaacaaaacaaaaaamagcccaggagccagggaagacttytaacacatattttgttgaatgaatgaatgaagtgatccaggtttttgtgtgcatttaatttcacctctaggtgctgatccagtttgtggtatagtgttctggaggtccaacgtcatctacttcctgcccttcagaggtakgctgatgttgtgtgtacatcaacatcagcacagcctcctgaatgaacctaaattcagttaacacaaatttgcattaaaactaatattaggctttggattaggtatctgagttgttttgcatgttctccattgctcacagatttccttatctcatttttcagagtcttttgaaatggactctaatctactaattcattccattttgaccactctcttatgtgaattgttggaaccagacttctttggtcaccattttctagatatgcattcatatttaacgttgttgggcttcctaagtggtgatttggaaggccttactgaattttattttcctctcattcacagacagattaaaaaaaaaagctttccatttttaggcaaattcttaaactttattagccttagttcctcattcttttttgagacagggtctygmtctgttgcccaggctggagcacagtggtaccaccatagcttgtgacagccttaaactcctgggctcaagtgatctcctgcctcagtctccccaaatagctcaaactacagtcacccaacaccatgcatggactaagtttttaattttttgtagagagagggtctcactatgtttaagaccagccttgaactcctgggctcatgyggtcctcctgccttggtcttccaaagtgctgatagcacagacgagagccactacgcccagactagtttcctcattcttaaaatgggaataacagaatctaagagttgcctgcggtaaatgagattacacacrtacttatcacgtgggcttccaaatgtcagctctctgatgcgctagctgtgcaatcctgtgtaagtctcctaattttcaggtcccatttcctcttttgtgaaacgtggccaagggagaatggactttgcagtgtttgtgtttcagtctaagataatactgtctacttgggattgcagtccagccaccacttaccagctatatgcccttgggccatacttcctctgcgcctcagcttgagcctatcaatgacatctaagagctgtttatccagtcaggagttgcttgccayggcataagatgttggttcccttgaaaatgcaaccctatagcttaatgtcacccactgttaagattttccaacacttgcttaccatgtagctttcttgtggtgaaactctaaagttatttccatttacccaaaagcaaacctcagtgtgtacatatggaatggctkggattgaaytgtgtgaggaatacacagattcttgccttgtttggagaccacttctggtgggtacccactaaggagttgctcctggacagtgtatttctttttcctcctcctggcaggcaaatatgagtcacatctgagtctcttgacatatgggagtcgaatcgggaagatattctctctcttgttagaaatctttgttcctattcaaaatttagaaagaatatttgtcatgaatgtgatagtaagttgtaaaaggactcccaaggctcttgtaaaggaaaactcatgtcatcgtgtcttttttttgagacagggtcttgctctgctgcctaggctggagagcagtgctgtgatcatgggtcactgcagcgtcaatcccccccggctctagccattctcatgcctcagcctcttaagtagctggggctacaggtacacacctaccacccctggctatttwttatttcttgtagagatggggtcttactatgttactcaggctggtctcgaactcctgggctcaagcagtcctctggccttggcctcccaaagcgctgggattacaggtgtgagccactgtgtctgggctcgtgtcatcatttctgatctcttgtaatggttatcatggtgccagtatcagaacgataattttggacaatgaccagagcttgggatataaattcttgtaatatctttagggggtttttaatcttacgcccttgttacaaaatgaaatgcacaactccttggtcaatcattgaaagtttaaattctcccctcttgatgtctttgtcatttggtaacaytggtaatcttgcagcatcagatcactgtcccacagtcatctatgcactgtaacttcaaataatcaagttgttgcaagcagttactcatcttaacaatctagctaccagcctgtatgccctaccttatttgttggcacaaccttggaaagccccaaacgagatttttgtggtttttatttcaccccaacttcatcttgcagatttactgtcctacatacttctgatcttgtctcttctctatccttatgaccaacgccctcatgcatcatttcttttctatttcaggggtatgttaagtgcctcttggtcttaactttctcaaatccatcctaaaatagaaaatgattccttcctggcttagaatctttcaattgctcccaatttcaacttctgacatcatggtcccatcctctccaaagtcaccccaagtagtcatactaaacttctggttccttaaactagaaatcatattcatgtcttggccmtctgttgtttgtatgtgcgaaatccctttccacacattgtagcctggataacccaaacttccctaacatttcccccacgcacaggcaagctgatcttctgatatatctctgccctaaatcgtgtcattatttgcttacatctgtttcccctaagagacgctgaagtctttgatggcaaagctgtggctcattccttttttttttttaatctccatcacttgttagtgcttgctgaattaacagatgtaaggagttaacttamtgttgcactagctcaaacatatttagattgttacctcacaaatagctttttttttttggagacggagtctcgccttgtcgcccaggctggagtgcagtggcgcgatctcggttcactgcagcctccgcctccggggttcaagcgattctcctgcctcagcctctcaagtagctgggactagaggcgcgcactgccacacctggctaatttttttatttttagtagagacgggggtttcactatgttggccaggatggtcttgatttcctgacctcgtgatccgcctgcctcggcctcccaaagtgcttgggactacaggcgtgagccaccatacccgacagcctcacagatatctatgtccatttataaatatatataaaagcttttggccaggcgcagtggctcatgcatgtaatccccagcacttcgggaggccaaggcgggtggatcacctgaggccaggagttcgagaccagcctggccaacatggtgaaacccgtccctactaaaaatataaaaatataaaaattagccggacgtggtggcgcttgcctgcaattccagctactcgggaggctgaggcacaagaatcgctggaacccgggaggcagaggttgcagtgaggtgagatcgcgccactgcactccagcctgagagcaagaccctgtctcaaaataaataaaagcttttgctatttggtgtaaataaaagccaacttgtacacggtgcttactgtataccaggaacacaaattcattaaatcctcacaactttgagacaggcacaaatattatctgtttactagtgaggaattacctacggtttactagtaaggaacactgagacccacaggttgtgacttgctcaaggtcaagctggtggagccaagacaaggtgcaggcagtgagtcctgccctagagtctgacccgaaccacatttaacgtctatgtggtgtgtaggttattgccatgagtaagaatcagaattgttaacgcgcattccaggaaggcagggacaccactgagtgttactgctgtactttaggggccagagcagggcaggctggatgcgcggaggaaactcatagttaggtcaraagcctggcaagacaagggaattttctggtcgtcgtccacctctccaacctcacatcctactagtcttccaagaggattctaactgcacatgactccctagtttccggcttctcttcctaaggagggtctgcggcccgyctgcaccaccctctccccacagtcccgttttcctgtccatgcttggatggatccrgccgagccgtcagccgcagctgcgcgctgctcccccgactcgcaccccctcggcgaagcgctgcattttatgtaattttctgccgggctgctggcttgtgggggatgtggctgggtctcggcagccttcagcgccgcagacgctccggcaacgccagcatacgaggcccccgccccaggagcgcgggtccgggcggcgttcccctctgcgggaggcgcggcgagccaatcctcactttaaaagctttcstgtcctcgaagcgaggggtcttccgtgcggggcaagacgcactggccccagacgaccggtccgtgaaatgacccttccgagcgacccggagcgggcgaccttgcccaacccgcgactcggggcccctgcggtcccgcgtagaggacccaggtcccacggggggcggcggtgaatcgccccctcttgtggccgcgcttccgcccccggcacccgcccgctgctgggccacccggcgtcgcgctgccgcctcacaaagcccgggcagccgcctcattgcgcgcagggattcggaccacgcgccctcccctmccccactcgctgctgcggcgcccaggtctttgcctccgcgtcactttctcctcatcgagtccccggaggcagagagctgagcgaggttcgcctccccgggcgggacrcgagctccggtcctctcttggcgcaaacccccgccccccgcggagggactacttttcrtctccygcggaggractacttcctcccccgcggaggcgtcggtccaggcggcgcgcacggtatggcggcggcggcggcggcggcggcgcgcgcctgagaagaggggacgccagcccggtcaggcctcggcgcggcctacacgctccgctcgctcgctcgctcccgcctcccgccccgcgcccggccatggcggagccgtcgtccgcccgacgcccggtgcctctcatcgagtcgggtaagacgcgaggccgtgccacccccgccctggcgctcccggctgcttcggcttccccggctccccgggctcccccggctcccckggccccgtccccctcccctccccgccggggcttgaccygactccytgtcttcccgcagagctgtacttccttatcgcccggtacctatcggcgggcccgtgtcggagagcggcccaggtgagtgcgggcccgcgggcggctgcggacttggcgtccccagtgtccccgccgccgggggtcgcgggtggtgggcgggggtgaaacgggagcgccccgggcccgaccccacccctgaccgcgcgtctctcggccgcaggtgctggtgcaggagctggagcagtaccaggtctgtgcgcgcccgtccccgcgctccctcgggttcctcctgccgaccttgccctgagggatgctcgcccgcgccccccgcccgccgcccgccgcccgcccccggccccccgccccccgccccccccgcgccggagsggtggtcactcgtgtgcgtttcgtgtctttccagttgttgccgaagagattggactgggagggcaacgagcacaacaggagctacgaggagttggtgagcattgggcacgtttgctccccgggttttccgtgcaccgccccccgcccccgccccttcccctcgcggggaccccggcccgtggggtgcaaagtgtgacccgcactggggggcggcccgggsatagctgcgttcccggctgaagattttgttttgtttttgaggcggccaggtttgttttggcaggaaacagtcattgggggcggcgcggggcggagcggtgggggcgactcgcggaggtcctgcggcaggggtggggctccaggtgcggccgcctctgcgggggtgtggcgtgcgcagccagccattcaactgggcggtttcattcgcttccccrctccaccgcgcttgtaactcgcgctctgattggcctcsctgctcttgccccgcccgggtctgtccccccacttgttccctaggaatagaatcattggtctctgaaggtggagaaatgttcttgtgttgagctttttattttttgttttgtcagcagcgtcataaaaatcttgcagctgtatgaatatgccactgtagtgcttgtgctcctttctactgtacaatatttgttgaacgcagtagttgattgatgagtttcacactgatcttgtagataacacaataaagtgctttaaataggcacttttcttttgagctcggttaatcttgcattacagtctcatttyttttgtgaacttggttaatgtttctatataacttgcttttatctatagttacagcagttgcagggattcgtttgtttttactggagacatttttcaggaatatatttttgccgtttcgttattaggataaaggaattcattaattgccaggccatattcagcatcttgtataaggaaaacaattgagaaagaaaagagcttctgagtgatcttttaccacagttggaagacctgtaacacttgagtggtagagtatggtggcaagtgaaaagaagaaaaaaaagtggtagaagattactggttttgaattagacaacagaagagaccagaggatgtgttatttccatgaacagttaacacttgaagcctggtgcaagtaataaataattttaatatttgctttcttagattttgaagtaaacactttaacagtggatgttttcaagggaatgagttctaaaaattctgatggcaatgtgttgagtttgacattttgagatagtttatttttgtaaacgttgaggaaacatttaaaggatgccctcttttagttttcttcacggataatatagccttatcggtgaagcggaaaagcattactggttatgacgctgttgtcgtgctacctgagagaaaataacttgaaacaaatgtagtgctgtaactactggaaaagttacttttaaaatacatttataggggctgggtgcagtggctcatggctgcaatctcagcacattaggaggccgaggtgggaggatcacttgaggccaggagttcagaccaactcttgtctccacaaagaataagtaacagaaaatyaggcggctgtggtggtgcgtgcctgtagtcccagctatttcggaggctgaggcggaaggatcacttgactctgggagtttgaggctgcattgaactatcctcctgccactgcaytccagcctgggagatggagcaaggcctagtttcttttttttaaaaaaaaaatttatataaattttttggcttttgttggtagaattgcttaaaaccctacttactattgtttaaaatcacttaaattctgtgataatatggctgtgatttggctatgacatatggcatctatcattgcctccctgatttggtctgtctggtgggtgtcctttctttttttaccttcctctctgccctccagtcccccaggactgagtgatgatgagcctcatgtgtagagaattattcttttgttaatggtatatgtatcgtttctaaactttcaaagtcttttaaaaataccttattaagaagtattccaggccagctgcggtgctaacacctgtaatcccagcactttggcaggacgcttgaggccaggagttctagacctgcctaaagtgaggttgaggatgtagtgagccctgatcaagccactgtgctccagcctaggtgagcgagaccctgtctcgaaacgcaacaacaaaaaagaagtatttcagatgtacacaaatgagaataatgtaatgcaccsctgtatatcatcaaatttgaataataatwatttttttttttgagacagtctgttttgaggagcagcctcggctcactgcaacctctgcctcctgggttcaagtgatcctcctgcctcagcctcctcagtagctgggattacaggcacctggctaatttttgtatttttagtagagatggggtttcaccctgttggccaggctggtctcgaactcctgacttcaggtgatctgcctgcctctgtgtcccaaagtgctgggattacaggcacctggctaatttttatatttttagtggagaaggggtttcaccatgttggccaggctggtcttgaactcctaacttcaggtgatctgcccgcctctgtgtcccaaagtgctgggattacaggcgtgagccactgcgcctggccaacaaatttgaattttgaaagttactaacttgctatatttactttggtttctgtttgaggtatacatatgttttaagaaactatcaatggacatcttcaaacaaaaataatagaataaatgacccacccactaggtgcccattttccaacttcagtgattatcagagaatgttgcatattgtctgctsccttgtttttaagcaaattccagaaagccattcatttcactggttaatgtgttggaatgttttaaggcagattccagacactacatttcatctctaagtttgtcagagttcatctctaaaaaataaggactgcttattatatcatcaagtgccaatatcacagagtccatatccagattttctttttgttccctgggtgtcttttttttttttttttttttgagacggagtctcgctctgtygcccaggctggagtgcagcsgtgcgatctcggctcactgcaagctccgcctcccggattcacgccattctccagcctcagcctcccgagtagctgggactacaggcgtccgccmccacgcccggctaatttttctgtatttttagtagaggcggggtttcactgtgttagccaggatggtctcgatctcctgacctcatgatccgcctgcctctgcctcccaaagtgctgggattacaggcgtgagccaccgcgcccggcctccctgggtgtctttttacaattagtttgatttggtcttgagaaaggtccatacatgcattgactgattgattctctccccgccccaccctgggtctcactctattacccaggctggggtgcagtggtgtgatcacagctcactgaagcctccatttcccaggctcaagcaatcttcccacctcagccctccacctcctgagtagctgggaccacaggcatgtgccaccacacctggctaagttttttttttttcccctagagaaaaagactcgctatgttgtccaggctggtctcaaatgctcctcccaaagttggaattacaggtgtgagccaccacaccttccctgatttttgttttgtttttttttgagatggagtctcactctgtcgccaggctggagtgcagtggtgtgatctcggctcactgcaacctctgcctcccgggttcaagcgatttgcctgcttcagcctcccaagtagctgggactacaggcgcacaccactatgcccagctaattttcgtagttttagtagagacggctgttcaccatgtgggccaggatggtctccatctcttgaccttgtgacctgcccgcctcggcctcccaaagtgctgggattataggtgtgactcaccgcatcctgccccttccctgattatcttaaatctctttttatcttgaatagtcttgtttctatgccattgatttactggagaccaaatcatttatcctgtagaatgttttacattctgtatttgtcttattgttccttatgatggtaacttgttcctttttcttagtggttttcatcttcagatgagaatcatctggggagctttataaaatctggttgcccagagtatgccccaaaccagttaaatcagaatctttgtggtgggactggacatcagtattttaaaaagctttttagatgattctagtattagtgtttgtaaagccacaatttatcttaaacttgtgaccatgctgttattccaacctgtatttgggggcaagagtatttttggtacttttgcttttttttttttttttttttgagacaaggtgtcattctgttgcccaggctggagtgcagtggtataatcttggctgactgcaacctctgcctcacaggttcatgcagttctcctgcctcagcctcctgagtagctgggattacagacatgtaccactatgcctggctactttttgtgtttttagtagagacggggtttcaccatgttggcccggctagtctcgaactcctgaccttcagtgatccacctgcattggcctcccaaagtgctgggattacaggcatgagtcaccttgccaggcctacttttgcttcttataagaattgaagccaagtgtggtggctaaggctacacagagacttgagagtctgaggtgggaggatcacttggtgccaggggtttgagagcagcctgggcaacataagcaacacctcatctgtagaaaaaaagtttacaaaaccttggtttacaggtgtgagcctccgtgtccagctcccaagtttctagtctctacctgcactgctatattgctagactgtaactcatcaatcacactaccatgatcat

SEQ ID NO: 9945 - DNA, 595353 bp, Homo sapiens
agaaaggggaggtgattttcctaagatcattctgccacatgttctgaagagcagtgtagacgagtggttaagagtcgggccattggagacagactgtaggaattgaaatctcagtcctgccgtttactacatgtgtgatcttggcaagaaacttaacttctctgttccttggttttctttatctgcaaaatgggcatttaaaacagtacctacctcacagggtgctacaagaattaaatgagttaatgtaggaaaagcactaatatagcacctggtacctgataactgctttatgagttagctgctacagctgctgctgctgttacttttattgtgataattctgtcagttgaaggtcaatgatttccacatactaagttgtctctccctaaccttacagtgactaaataaatgaacataagtctccatggctgtcttctaaagtcacttrgagtttgtcttgttagcaagyagagagtttaaagcacaagagcaagccacagatgttgacatttgaattcatactttgtggactatctgaaggcatcttctgcagtaaaaactataattgacttctttgttttgcactctgttccatagcagcatgtgttttccatacacatttgctttgtcttagagtttatcattatcaaaataatatagaaatgatattatttggatgtgaatagcattttatatatatttgatttttctgtaagttgacagtttcatcatcatgtctaaataacatttacttgacagtggacccccaggatgccatgatgggcactgactgaaaaastcaattaagcacatgggaacctatcctttaccatagagtatttggaacaacattctttcagaattattatgctttcaaccattggtggatttaaaatattaatctttttyttaatgttttctgcttttttattttgaaaaaaatgagctatttattagtgaattcaaactctgtttctcaagcctttgacaaatatcacagttatgatttcacaactctaggcacacataattgtgtgcacctccatatcacatgctttgagagacctggaaagttttccttgtcacctgggtccactgacacaaattttaggacaaaaagttatcgttgagtgtcgaggagcaggaaaggattattttctcttagtttatactacttttgtggtttgaaggaagagtgcttccaagggcactcaataaccttgaatagatatgacattcctagctgattcatggctatgaatagttatgattggaaatttgaaagggtttccagatggctataggaaagtctctctctctttctctctctctcgttacaaataaacctatggagggaaaagagaatgcctaggtttccatrcataaaattaagggtgattttaacatgataaatcatatttgccaaaacacaacattcagcattcaaagtgagacatttttcttttttaawtttaaatcgttaggtttgagtggcattaagattagtagagattcataatcaactgaagtttaagttgaaatgaagttaagttaataaagcttaagttgaaatgaattcgttgaaatgaagttaggtgaattatttttaccttttaattttatttttgtattttaattaatagatttaattttttggtgttgttttactttaacagaaaaactaagcacgtttttcaaagtttctgtatatatgttttatcccactcagcaaccatttttatttacctaaactctactttgagtatttaatattcttgagcagcttagaaatttgagactatctttgtatatttttaataatgcaactacccttgtcaaatttattttcccttgttgtttccagtatctagtccactaatacatttcttttatagttcagctctcacagccactgaagaactttacattggtcattgtgatgatgaccctagtggcagtgtggaggatgggttggagcaggaagggtatgggggaaggaacatctacagttcaggcagaactgatgagggactgagctaaagcagtggcaactgggatggaaaggaagagagagactggagattgcaatgcgacctagcaattagctagatgcttgtgtggatggaggagtggtaagttctaggtttctgacttgaactactaatgtggccattaacagagatggggaagtttgagaacatgaacacattttgggagggaggaaatactgacttgccatacctaagggaccttcgagtaaagctgcccactttacagttgaaataggtgcacatagcttaagaaagctctcggggctagattaaagctgtatgaatcatcggcgttccatgaaaagaaaagacgtggctggatatgggatggaccggggaagctgtggcatttgtagaaaggaaagacctgtttagacgttaggtgaattttatagatgcttccttttctgggtgaaagtctaatccttggctgtaaaactacatctctggaagcctgctattggtacagttctcaatttgcactgtttgtagcaaagtaagacaactgtccacctttcttcttaggtttccatagcatctcctgaagatcatgttatggaaacctaagaagaaagagattaaaactggtgttatagatgctcaatggaatttcaatggttgtggtgacaactagttgaatcaagtgcaatccttttccaatatcttcatctttagtgctcaaacattactgtttttgtcttttgtgtatacaagccacttcattctgctttgtagtagagttgtttacttattgtgtatattaagctatgagttcctcaggggccgagactatgtcttatgcatttccacgttctctccagcccctcttgagagttttcaacagttgtttatttattcattcaacatgtattgaccaagtctctactatatgcaaggtactatgctttttctgaatcatatagcaatgaatagaagagataaaaatgcctcccttcatggagcttatgttttagtgggcagagacagatggcagatgataagcaaataaataaaaaatatatagtgtgtaatttggtaataagttctttgaaagacaagaagaaagacgagacgtaccattttttkgkttttttttttttttgagacggagtctcgctctgtcgcccaggctggagtgcagtggcgcgatctcggctcactgcaagctccgcctcccrggttcacgccattctcctgcctcagcctcccgagtagctgggactacaggcgcccgcyaccacgcccggctaattttttgtatttttagtagagayggggtttcaccgtgttagccaggatggtctcgatctcctgacctcgtgatccgcccgcctcggcctcccaaagtgctgggattacaggcgtgagtttttggtatttttttatgggaggttgcaaaggctgtgaggcacaaatatgcctggtgttttcacaaacagcaagagggttagtgcagctagggtacatgagcaaaggtagagtagggtacatgcttctgagcaaaggagagacgtgatatgacttagttttattctggctgcggtgtggagggcagtaatgtaagaaggaaaccaaytaggaaacaattgcaataatccaggagggatatgatggcttgaactgatgtggtagtgggaaattgaagagatctggttggattstggatacctttcaaaggcaagaccaacaggatttactgatggattgcatgtgggatgtgaaaaacaggagtcaaaaatgacttcaagttctttggcctgagcaaacagaagagccttgtggccatctattaatatcaatataaagaatattatggaaggattaggtttggaaaggggtgggaattaagagctcacttttgaacatactgtgtttgacgtatcttttagatacccaagtacagatattgagtaggcagttggatattcaaagttgtggctcagggtcaagacccatgctgaagctataaactgagaagttatgggtgtgtagacagtatatgaagccaatatactggcgtgagattagattgttgttgaatcattggtgtgtgtatatatatatatatgtatatgttcatatctgctgctttctctttaagcatgctcatctctcatattagttcaaaccaaactaggtgtctccatacacagtttgtaggttcaggagttaaatagtttctactacgtgtgtgcctaaagtaatacttagcggtgtgggggatataaagagacattaagactcacatcctgccttcaagaccttcacatttgattaggaaaagaagaccttgacttgtgaaactgttcataccacaaaagaagaaccatttaaaacatatatcagtcaaatgtgtaagccttttttwaaaaatcagcctacataggccgggcgtggtgcctcacgcctgtaatcccagcactttgggaggccgaggcgggtggatcacgaggtsaggagatcgagaccatcctggctaacttggtgaaatcccgtctctactaaaaatacaaaaaaaattagccgggcatggtggcgggtgcctgtagtcctagctactcgggaggctgaggcagaagaatggcgtgaacccgggagacggagcttgcagtgagccgagatcgcaccactgaactccagcctgggcgactgagcaagactccgtctctaaatcaatcaatcaatcaatcaatcaaattgatcaataaaaatcagcctacatcatactttgaaaagctaaaagccttttttgaatgatttctgtgttctatgtgcttggcataaatgcaataagaattccaaaatatgagatagtgtacatgatagaggagccaccatttggatgtctatagatttctttgaaaatacatatggtgaagagctgaagaaaaataaaagagtcagtttcactgcaaaataaaatcataaagttaattggtttctaactacatttttaaacattgtatgaaaagaccaagttgcaaagttgcaacagtggactgaaatggtratgacaaaataatgtaaagaatgaaaataagaacatttttacagggcttttaaatttacagaggactttgacatctcagatgacacttgatcgtctcgaaactctccgtgctaagtagagcagttaatgcctctactggccctaagaccttcagtggctcctagctcagcattctatggggaaagggggttctttcggtgatttatcatgaagtttaaaattgctatttccaaaactgatttagatcctgctgttgctgtaccagtatactcaccagaagtgtttacatcctctcagtactatgaagaacaaaaatttaccaccacctaactcattaagaatgctctgcaggcctgaggctcaaaagccacaatatgagcacaaagagttcagtccccctcaaggatactttattccatgagctctctcactcagaatccttcccttactcagagcccctgtcttaaatgtaatattaaaccagaagcaagaatgtgttctttctgaatgtagttctcttaccagttttcatttcaaatgtggaatgtgcagggttaatctttgtactcctcaccactttcaaatctgataacgttttttaatctaaccactgattttaacattaaaaacacgcacacaccatagaacaacgttgtcctctatttgaattccaatacaaatatttttgaaggctgtctctcttttaccttgagtattttctgatgctgcaacctccagcttaatccttaatgcttgacaatgtatgcatgtaacacagagtgttattattgcctccggctagcttcatgtcatctagtttgtcttttacttctctcctttgatrgtattatcaggaccaattgtgaatctgccagatgcatttcctcacaaaaagataaatctaagaaggcttgtgtttttccctttctcttccaggactgcttgcattaaaggacttcctcatcctttttttcatgaaactgagcttgcttaatcagagatggagcaaactgactgcaaaccctaccagcctctaccaaaagtcaagcatgaaatggatctagcttacaccagttcttctgatgagagtgaagatggaagaaaaccaagacagtcayacaactccagggagaccctgcacgagtataaccaggagctgaggatgaattacaatagccagagtagaaagaggaaagaagtagaaaaatctactcaaggtatgtttttattggatctttataacaaatattatttctcattagagaatgcttgtgtgcataaactttgtttcaaaaataaatttgctaatgttaactggttaataattcgcactgcttatatatgctcagagaatctattgcatatgtcagcccagctgaggttgtaggttacatgtgctttttatggattatgcatgaatttggatgctgcagtcctcttatcagagcattcaaaatttgtgtaatcctacaaatagccatttatagactgaaggataaataatttatagtaagatgaaaagtaaacagctaagtgcttttcaagccattgcttatatgggacagaagtctcaaataaatatttggctgctgacaaagctagcaggttagtggagaccaccaaacagggttccagaaagtctatcaccgtaatgtagaaacattgtgtagccgagtctgaaaggaaagtaagaattttttagaacccttcctacaatagccatattttggagcatattctttgggcagtcttagtttctcarttatggattgacaagacagtttctaacaaaaaactagtagaaatacgatttcctgttccarttgatagataaactgtgttagacactattttaatgacgtagaagatactgacattggcacaaggttttttgtttttttgttttgttttgttttgttttgttttgtcttgttttgagacagartctcactctgttgcccagtctggagtgcagtggcgcaatctcggcttactgcaacctccacctcccaggttcaagcgattgtcctgcctcagccacctgagtagctgggattacaggtgcgcctcaccacactcagctacgttttgtatttttagtggagatggggtttcaccatgttggtcaggctggtctcaaactcctgacctcgtgatccacccgcctcagcctccgaaaatgctgggattataggcatgagccaccgcgcccggatggcacaagttatcttttttatgaataagttaatgctgagataaaaagtaatagacttaattttctatgtcctccaagtgtggacttgactagcaacaacagcaaaacctgagaatttttttagagtgtaaattctccagccccactctagacatattgagtcagaaaccctgggggtgggacccatttgtggtttaacaaatccccaggggattctgattcctgctcaagattgaagattactgcttgaaccccgaaatatttttactcagatggcttcaatgatcacatctatttgagtgaccttcaaatatttatcttcagacctaacctccttcctaaactctagtcctaaattttcagttaacctccccggcatttccaaatgaataatacactgacacctctaaaccagtctatttaaagtggaagcaatcatcttaacactcctaatcccactcatcttccttgtatcacctacatctgttaatgatgctcccattctcccaaccacacatacttactatatctaatcagtttcctcatccagcagagttaatctctacatctctcaaatccattttctcctttccattttcatgatcattactctcattatatctcacctagactgttttttgtttctttactggtctaccgggatctcacctcatctcttttcaatccctttgctgtgctgttacatctttcttgggatacaatttgctgctatctctctttatgcatattcaaccatctttcaaggcctagcttacaagcatcctttcccactgaatccttgcctcaccatcacccccaacatcatcactgtttcactgtgtaggtgatcttcctctgtgaactttgaaaatacattctttttacttttttttttctgacagagtcttactctgttgcccaggctggaatgcagtggcatgatcttggctcactgcaacctctgcctcgtaggctcaagtgattctcgtgccttagcctcccgagtagctgggatttcaggtacgcgcctccatgcctggctaatgtttttgtatttttagtagagatggggtttcaccatattggccaggctggtctcgaactcctggcctcatgtgatctgcccgcctcggcctcccaaagtgctgggattgcaggcataagccaccatgcccggcctctttttaacctcttcttatggttatatatattctcctagactgtatactcartaaagatggggatcatgacagatctctattttccataaaattttgcatataatatatgctttataattgtttcatttaaggaattagttgctatcaactgaaatataagtgcttatcatgcattgaaaactattctttaaatattgccatgtcaaatgcaattattacaaatgaaaattacagtactctaattagtactggaatcttacattttaaaaacaaccttaaattgagccaaaatttaagatattcattctaacaaatatacattaaatatttgtgatgttaactatattactcattttcatcccttaacgtaattggtaaaagttttatatctttcttttcaaggaattcattttaatatttcccatttttttcagttaatatcatgtaagttcgttctaaaataattctcttcttctgcctgacaattgggaaattatttcctatggaaatgtttttggctttaggaaatgcctagttctcattaaaatacttatctgtaagtttgtctttacagaagatgaatttacaattgtgatttatgggttgtgggtttagggtgtagagtggttgacctaatatattgtgagtagaaataagaatgcattctggtgacagttctaaaaacataagcaattttatgctgagtcagtataaagagctggccagcctcagattttgtctgtgcagtttcatcaaaaggaatttggggtgagggaagtttgtctctatgatgtcattctaacgtcctttcaacggattctttttattcaataagcttttatttacaaattaatatgtgtcagaccttgaagccaatgctgaggatggagatgactgcttgcaggaaacttatagtgcagtggagaaaatagacactcaaaacacattattgcaattaaatgtatgaagtggttttacagataaaaaaggtgctgtggaagtacacagaatgaaacaattaacttctttagaggaatcagagtacatagaaaggtgatatttgatctaagttaaaatttgaataaaagtttaccagaaggacattcctagagagcagataagcaagtgcaaagtatacagctctgaagaaggcctgtaatggtgaaacattcaatatggctagagcaaggaatgttggagccagattgtgaagtcgcgcatgcccaatttaggagttttttaaaattccctttaagcatcagaaaagaaagctttcaattagtggagaatttcatgatcaattgtaatttttaggataagaagtgtatacaggggaattgtagaagtgtaggcagcagtgtagaagattgattgcaactggaaataatgggatgcagggagaaaaatctgtgaggccactgaattaggctagagctaagaatcgcattagaggtccaaacaatgtctgtggagatgaagagacacactcaagagatataagtgtgttcgaattgatagaacctcataattgattactggttgaggttgaaggaaataacagagtcaaggatgactttaaagttttaagtttgggaaactgagagaatagtgattaatttaccaagagaaggaacacagcaggaggagcaggtttggaagggaaaatgagtttctttttagacatgttaagtttaagatgctggtatgacatccaggtagcttttcccatcagcgattggaaaagtgtgtctaggattcagaacagatctgggctgttgttataagtagatttgwgctcatcagtgtctcagaatagagatgccaggggatggatgagrttacccagggagagtgtatagaaggttgagactagaaaaaggccaaggacaaaaacctgaatctatcatccatgaactgacataaacacattttgaaccaatttatatttttagccagcaccatccttcagtgcactgacttatataaaataaagtatayagacccgggaactaaaagtctggaaacagtatctcatctgccactgactgccaatcagtagagacacctaggagggaaaatatgtacccctttgaaggagaaatgacttatcttatgttaggcgaaatagtgggcctaattatcatctttttttgtaagatctggaatcctctttattgtcttagtccatgtattaccacctgtgagtcagaaaaaaatgtttttaatttttgcaaatgtatgtcagtagttgaatcttgcatcaaccaaggtaaagttgagcctaactcattattttaaaggaagaagatctcaaaaaataattgagttttagatcaggaaggatgaatgcaaacaaaatgttgattgggcacctgctatggtaccaggtacrgtactagatgccttttaagtttactagttatgtaaacttaagcaagatacttcagctctgaatctgytttttcttctgcaaaattgacttcatcatcatcaccatcatcacaataataatgataaatttggaattgtacctattctattctagcactctgcaaggtgctttacatttgctcctcataaacacctgatgaggtatgcgctattatccccagtttacagatgagataactgaggcttggagagacataacttgccagaggttgcacagctaaaggagaggtgagagttaggatcagaaatcaagtcgatggctctaaagcccccattcttcactataccacactgtcttccatacctatgtcaggaggttgtgataagtattgaatgccatcatgagagtgatgatcttcaggaattcaaaaaatgttagtttcccttcattttcttcaacaaccttgccagcctccagtgaccaagcgtttataaggaggttaaacgccttttcattctgattatcattagaaaagggcagatgatatgctctataatttaccatgaaatattcctgagtctgcttatttccactttttagggaagttaatgttttatccaattgaagacttgttttgagaartattaataagagaaaatactctataccagctgaagatatgttcatattatctttattttccaaaacagcagtgccctactccatgtatatgtggaatgctggactctaaaactgaatttcttattttccaaaagcttttgaattaagggatggacactaatataatattattcacaattctttgctaacaggatgaatgagccctaggcaggcttatttcatatgacttttggcaggttgaatagcaggggaagatttcctagaggcacacaggctagctatttttcccaagcagcctcacatccaagggaggcatcaattaactaagaaattagtattaaaaatgaaaatataaatgcatggagatatatataccaagggtaataattttagttgtgtgaattggccaataattttatatagataagattagtttttgaatatctccattttactgcaaagtaattatgaatgagaagtcatccatgcataaaaaggaggtatgttgaggacctgatacaagtctcacaaggtcatagactcctaaggtattacagatgacacaaacatttcatttctgtcatctaaatctgttcttttaacgcttctttttctccgaatagcatttttgtttggttggttggttgtttttctcttcaggattacaacctaaacctatatctcacattattgccatctggtggaaaaaaatttaaactgccattttttttttttttttttttttgagttggagttttgtcgcccaggctggagtgcattggcatgatcttggctcactgcaaactccgccttccaggttcaagcgattctcctgcttcagtctcctgagtagctgagattacaggcgtgtgccaccacaccttgctaatttttgtatttttaatagggacgaagtttcgccatgttggctagactggtctcaaactcctgacctcaagtgatctgcccgactcaggctcccaaattgctgggattacaggtgtgagccaccatgcccagcccaaactgccaatttttttttttttgccaagattacatggaagcaaagtttatctgtcatccattcatccatccatccaaccatccatccatccatccatccatctatccatccgtccatttgttcatttatacacttatgcatcagcatttatttaatgtaaactatgtaccaggtactgttctaggtaaatgaagttaatcttgaaataaatgtaccctagtgactatgattttctctctttttgccccagtatgataagccacttcatcccacagggaaaaatgcttaagcagcactgccacctgtgcagtctttgccctcaaaatttgagaagtgcatttctctattcttatatcaggcatttagcagtagtttaaatgattgtttgcttatatgtagacagtttagatatcagttccttcaaaatccttgaaagaactcttaatctcaggatctgtatttacatggcaaagatcacagatggcaggtgtaatattaatgtggcaaaacctatgaaatgaaaatttcagcagaatttgatcacatttaatgaattgtctgctgtgagcatactatrcttctagatgtcacaagtttctagcrcaaaatccataatgactgctctgaaagaacttagactgtaagagaaattagccaagttatttaacaataactctaattggctcatgtctttcaactagtaacatttgttcatgaaaattcattcaataagtatttacttacacagcatctaaaactggaatggaatgtccatgacacttgtgccactgctccctctatttgtcccatggaagacatccctaattaatcatgatgctctttcccctgttgagaccagcttcagcctcacatccctttcaaaatggcatttcacgcaagcattgtcaatcaattagagttgaaaaaggacaaaacctatttctaaactttggtttgcttatctgtacaaagttctttgttaaactatgaagtttataggtgagtaagaagcaatctttgccctcaataaattcatagtacagttgggaaggtacatgtcaatcagcaatagtgatgcaatatgattgatgtgataatagtggtatatgtaaagtaccatgggggtctagaagctagaaccatgccgtgtattctgcctagggcatggtgacattgattatgagagaaatatctagcatttatgcaacaacagaccggaagtaaggcactttwaatggattctgttatttaatcttcccagcaatgctataaggttgggatcattattatacccattttacaatgaataaaataagcacagagatgctaagtaacttgcccaatattacagaggtagtaagtgatagaactagcatcggaacccaggcagtctgaaattagagcccactgtcataactactatggacagatagactgctgtaaatttagatcaattttaaagaaatggtgtctgtgtgtgtgtgtgtgtgtgtgtgtgtgtgcgtgcgcgtgtgttgtatctgtttatgcatgtgtttggagacatgtaatattgctaaaatgtccatattacccaaagtgatcaatagattcaatgtaatccctatcaaaatcccaatgtaatttttcttagaaatagaaataggtggttctattctatgaaactacgggagtaaaagagatgaccagtgaaaatacatacaatcagaaataatgagagccaattatcttaccctcagaagcactgaatttaaaatagtgggcagaagcaatgaagtggtcttgatatgtcatagaagaacaaaaaggaatgagtatcacataagccaaaggaggagacttttcagcaggaagatgtaactaatattgtcaaataaagacagtaacacagccagtttagaaggtcattgctgactttagactagagattgtccactttgactggacattaaaatcatctggagagttttacaaacctcaattccaagactgttccccagaccaattaaatcagaatttccagtgggcgggactcaggcatttaaaaaaaatatccttgggggatgccaatgtgcatccaagatagggatccactgccttaaaataagcagtttcaataatattcaataatattagagaaagatgccaactcacaaggatttgaagggtgagtgcaagtgaatgtagatgagtttattgccataaggctcaactggagaatgtttctggatctcagttggaaggaaaggctttgaaaggggaatgttcactgcatcctctaagacaggaagtaaattacaaaatatagtggtgagaagttaaagtastttatgacttgatggtctcacccaagaaaaatgagagrcagggttatgtgctgaaagtgtgaatcaagtcaaaggcttcagatgagtagtgaggtaagtttttgacgaggccaaaacagaattgcacatgcctatctagagctcaggtgaggtggaactgtagatggagatgtgggaacattaatgacaataaatattgttgaccactatgtgccaagtactctgctaactgagcttgcatatattttttatttagtccttatttgcaaccctgtgatgtaaagataattatcatggtggtgggaggcaaccaagcagtaaactctgcccctacatttcaccctcccttgccattatgtcatcttgatttactactgtcaccatcaactaggaagttttccacttagtgccaaaaccacagatggtctgggttttgtttctaacaagagaggtaatatttccttatataaacatttatacaacacatcccttcatataaatgattttacaaattttgctgatgagtatgaatgtatatattgtacaggtaagtctggaacccagtattggagaagggaaagaagccagaaaagtggataaatggaggagggaggtttatagtggtgcagtgtagatgttgcaccttcaggcatctttttgaaggtcatcatttctgtaaaactccctctttccccttcatcagttagctaggagtataggtaaccacagtcagtgacagtccatcacttcctagataccaatttattaccaaatggtaggagtcacctagtagggctaaatttgatttaaataatttgctatatatattcttaaattaactttatgaaacaatatacaattacagctaactacatacgtattacacaaatgtaattttacctttgaccatcacgtctctttgtggacattctttagctaggaaaagctaggtcagtttcaaaattctttggtcttgctgcttctgaggctacatgactttttgatctcagtctgaaaatagctcttgcctctgcrcattcattctatttctgtggtctatctctgagcccactttgctcaattctatgttcaaccctttgctgcttcttcctaaatctagattaaaaactgtaccatagtatgagaattgattctagtgttttcttcttaaataactcttcaccaaatggaattgtgtattkcttttgaggatctacataatatcagaaggaaaagactgactccctggctaagtgtcacatagatgattgtcccctgggaaacaaagcaactggtttttggggtacataattttgttcctccttttaaattrcttcagctactgggcaggatcaaaggggatacatattcatgggactgtgaagactgggaaaaagagctttgtctttttttcttttaatactttaggacccatttattatataattaacacaaagaggcagagacacgggtcagtaagataatctgaatagatatcatggctaacacaatagataacatggctgaagtagcgggactgttcaagaatgatgtaaaaggaaagttagtgaaatatagaaggaatcagttgctaaacctaaagagtgaagtgaaaagacatggatttgattcagtagatgacagggaacctcggagggtttcagttcataggatttattggaactatatccaaattacatgctgcttctcttttattacaaggatttgaggaagattcagaaatggcattttgaaatgtagcaatatttcatattaacagtcaaaagcagttttaaatatctgcaaaggcataaccatgaggtatgccaacatgtcctgtcaggaaatcatcctgtcagcaaactgttattctgctttttttggtcatctgtgatgcagaactggctccatatacaaataagttctgtttattttcaacacttttttctcattataattctgaaagggtctagaggtgacggaagataaactttgaatcccttgagaccttgacaatattctcatttgaagcatttataccaaaagatgagaattcttctgtcccaccagtataaactgagccatatgcagtgctattttggtgccagtcattcttgtgacacatgaagtatttagttttgttacaccagagtcaaactgttagaggaaatgaccctttgtgtcttttatgtcatggaagaaagcagttagaaataagctcaaaggcaaaaataattaataaggacacacccaaacctttcatgaaatttaaaggtttgagttaagatttatttctcaagcttcaactgagatatttataaggcttcactactaaagtccaattatgtcttctcattaatggttsaagtccaaagtttcaagaacacttaaaaaattatcacattgacatacaaccaggctgaatgctaatgtgtctcaaattattcaataaatatggtcaaaaattaccttcactgacttgaaaaaagtaatctgtggttttgataaatgagatggtcacaagaaatgcagaattttattgtatgttttatatgaatacatatacatactaatgtcatatatttagtaatcagatgcacatacacacacacacacacacacacacacacacacaccccatacataaggaacagtgaagtgaatcaatttgtaatggggttgttctctaatttttttctattgattgcattttcttaagcaagatgtactagtatatgataatggaaaggcaaaacagaagagatgttatatggagcagcaactaacattcaaacatggatgcttatgctcctttttctcctgcagcttcccatcccacatactctaagccccaggtatgcttgtcaagtgctagtggttggcaagctttatgtttcttattggtttccttcagactacctctaggatagaggacaatcaacctgatttctgaagcattctaaccataacacacagccaggatatttagtcagtgtgttctttcgaatctgcaatatgattggcagtaccaaagcatctggccaatggaccagggaacatacctgatcaatttaacttaaaagtacaagctacaagcgggctggctgtaccatcattctgccaccatgattttataatttactttagagcttggaacagtatttggcacataatatgtattcagtgaatatttattgaacaaattaatttattaaatgtataacagcactttcttttggtaaattaagttggaaagagactcaaattagaattttccctatttgtcacattgattgttwtatatatatatatatatatatatatatatatattttaacttttcatagaaaagtatgtggtagttttagtaaatgatgttttgtcataacataaaaatcaagtttagataaaataattacacaactgaagtccaagttcataaccctttgcagttaacaagagttagtctaaaatttattggctaaaggctttctaaaatacatgtgtcttctttataccactccttggtttgtagaattgcatttggatgtggaattggtttagaacattgtttgtatacacagaaggatgttattctggtcagctgcttccactttcattgcactagactatagatatagaagccattgaagaatggcctcaatgtagaaatgaagagaacctaaaagcttggaggtggctttgtatttttgatatttgtctcatttttatcaatgccaactactggggtgaatggaaatgtagatattccaattaaacaaggctactttttattctgtggttttttttattaattgtggctgcactgtactaataagatgattcaaaatgtatatttgaaacttttatttgcatgtatttatgtactgtgggattaaaatgtacatttcaatataaagtctgaagcctatgttgttagaattgtgacttcataagaatactgtgaagtctgtcacagtagaatttataatcttacatgacatccgaattcaacaagagtgtcttgagaaagttgcctttttaacaaactaaacagacttttcacagtcattcttttggtaaaacacgtgcacttttactaaaataaagctttaaaacatgggaactataaaaggaaaacaattatgcagtttttattactcaggttcggaaccaaagttcatagcacttaaaactgaatcacaaggctgtcaaggaccttgagagaacatacctttcaggcaggaccacactaagcctacccagctaaaaattacataaaatttgattctatttcagccctatcaccaagcttttgtgatagtgtgttgattttttactgcctacattattataattctacataaactttcattctacttatacttaagtctcaccagagttcaactcagcaatcactatttccaaaagaagtattcaatacctatttgttgatcactgattttgaaggcatcaggaaatttctaccattttctagtgtttgacagtatttagtactaagcacattttactaaaattccactggtcctttcctcttagagagcatggagtataaccaacaaccattaaccagtaagtagatactttgatacagtgcaatattttgcacgtaataggtcaagtatttaacaaacatttagtaaattgaattaaaaagttgattgtttttgttttgatgtatttgttgcttaattattcatgatggtataatagaaagaatactgaactaatagcaatttgggttcaaattgctcttttacttaatagcctagcacagtatcatcacagaataagtgcttaggaaatatttcctgaatgaattaatgaattgagttgaataaatgaagccttgggccccctttcccctgcaaccctctcatatggctcctctcacttttcaatgtgcctcaaggatggctttcccctgaggccactgtttctccatcaagggtgcctttggagcctactcttcattatcctatgctctacaaaccaaattctttactacagcactaagactcctctaccctatgttaaaaaccaacaagcctcaataaaatactaaacctacttcatggtacatgccattcagctatacccctaccaatcttaaaggcrtggcacctcatttcttttatgtttttggatctgataaaattattcctrttgatccaaatttggctatactcctgggtacatttgcaccagctctcatctctgactgaaacactgttccaaacccattcttcccctctaggggaaggaacaataaagtggatcaatttgtaatgggattgtcctctaattttttacttggctaggtacttctcagcctgtgagtctccattagagtctctacctagaaactacttgctctggaaagcctgccttggtgccgtgcaatcttgggtggatgctcctgctgtatactcctacagcagtctgtacttattactactgtagcactaatcaccatgaattgtaattggcttgtttgtttctccacctagactgtaaacttattgaggtcaggaactatgccttatttacttttataaaccctgtcatatagtaagtgctcaacagtttttttcttataatgagataacttttacaacgttttgtttccacttatgtaaagtgaggatgtttcckcgctgtggtgcagaggatcaatggaaattgtatacataaatcattctgaaaagtgccaggacacaagaattattcctgattgtcaaatcctttcacagatgcttttaacacacagattgccagtttcagccattttcagagagagattttctcttcatacttaggatctagtaagttgtgtcactgtaaataacagaatgaattggaactttatacataggaataagggagaatcctatctccacaccagccagtcggactttgttgaggatcttaagttcccaygcccttgctctgtaacttcatggtatagaaatagagcaatagtggaaacaggtttaacaaaattcttagtcctatcatggtaactacagttgtaatacctccaattaagctgctatgaaacactggagaattgttttcagttcaaatcttctagagaatgtctctgataaaaatgacgcctgtaatcccagcattttaggaggccaaggtgagtggatcacctgaggtcaggagttcgagaccaacctggccaatatggtgaaacaccatctctattaaaaatacaaaaaattagctgggcatggtggcagacacctgtaatcccagctactcaggaggctgaggctggagaatcgcttgaagccaggaggcggaggttgcagtgagccaagatcgtgccactgcacttcagcctgggcaacaagagtgaaactctgtctcaaaaacaacaacaacaacaacaacaaaaatacacaattaacatcagataatacaatttttaaaccctgaaagagtattgattaaaataaaattcctaacatttatcttttttatgcacattaatcagttggtttagaagagtcttgcttgactacaacttgttaaagcatcatggcttttgtacactgtagattatgtaaactttatgcaaaatagctcagcagtagatcttgtgctccctctaatacatcctgatggcattgaccccataaatggagttttagtgaatcttcaacagcagatgagtctttccccatagygttcttcatcacgttctctgttgccttcatgccacaaactcatttgaaaggttttatgatscaattactaccaacaactattacttcagttactatcattacatagccatatttattaaaaattctgtacatactagtggatcattttattgtgaagttcaggaactgttaaaattttgaacaaattagtccaaacagtgtcctttattgctagattatgggaggcagattctattgatgttgtagtttgaataaatggaaatattgctctttatgatacagatggccttcctaactaagcatttactggattattttacaactaagtctactcagagtgagaatgaaagagtttctaatcttccaagggattttttttcttccttgaaaggttaggataactagaattggtagctcataaaaagtataaatcaatattgccattgacttaatccacataagaggcttaacttcataggtgacttctgaacagctgaaacaaaacaaaaatcagtctctggtgagttcccaagtttaaaatgaagttgaaagctgttacagaaaaatgcttctagaataacaacgacagcaggatgggaccttgtaaaccattatacttcagcaagtaaatcctcgtgcttacccattttaaagaacaataatagctcatctttaattatgtgtcagacactgtgttaagcatgatctcatttaacctttaaaataaccctgtaatatttagccacatttctaatccccattttacaatttatgaaattgaggcatggagaaggaggttatagtaaacagcccagttgaaacttgaacatatgtctactggacactaagtatcatgcccttaatcaatatactgtaatgtatatgtagaaaggcattcataaaatatagtcattggtgttcaaatgggtctataatgagagctgatgctctttacatacaattagaaatatctgcatggttttcctagttaatagggaatggtataccctgagccctctgcacttaatgtcagggatccactatgattagcattaggccaatataatttgcaagattgctgtgcaagaccgaagtgtatgccatggccaagggacagtgttctttcctttgccagatgagctgtctagggtgaagatcaaattattgacctctctctttctaacactatgaactaactagctgaattaactgagccaaaaataatttactcaatgataaccaatttactccaaggtgttcactggattatttgacaactaagtctactcagagtgacttctttttagtttttttttttttttcagttttacagcttcacttcttttaaagttcataccatctgactattgttttctccttccttctacctcattaaggtggtttgtcaatcttcagacttacagacatttttcagcgtttgatttttgcatcgtggtctttcttatttcattccctaccactatttgcaggaaacgcaacatttaggttaatgatttttcttagagtttcttgaaatacttagctcttgtcaagatcaccgaggtctccatggtgctaaattcaatggtcaattcttagttttcatcttgacctttcagcagcatttgacaccgctgatcattcactgtttcttctttacctggttttcaagatatcrtattctgagcctcctcttatcctactgaccattcttctaactctcttttattggatccttctcatcctcccaactattaaacatcagacagcctgagaatccagccttcagacctcttctcttacctttgctacacttattcccttggtcagatcatcctctttcatacggttaatatcatttatatacagaaaacacttacatcaccagctttgacctctcccttgaaattcggattcatatatccagctggttattttttatttccacttgcatgtctgatacgtatctcaaacttaacatatctgtatcggacacctctgattcacctcgcattttcaccccacctttttattccagctattgctgcgcctactagctgcatgcagatatacactaacaacacgtttttttcaactgcatcagatagctctcattcctgccttttctgctacttgtatgtggaatgcctgtagcaacccactcagccattctgaggcatgtgcaagcctggaagtgtgagagggttaacacatcatgggacawcccttgatctagaagagaaagaatcattcatgactgcctccctcttttgtatttgagcagacaattctcccaagcattttacaagctcttcagagggtgccctgtaagatcaagcttcagctgctctcagctgtgaccagctcaaaaactcaccctttgacttgcctcacttctttatttcacttttactgatcctccattcttattttggggatcactttccaaaatttacttcctacacacaatcccttctttcactgtctgctttttgggaaaaccaagctgagacaatattcaaaacagaactcctgaccctcccttcaaaatctgctcctccgactttttctgtctcagattctggcaactcttatgtccacatatttatatcaaaaaccttgatatgattcgtgacctcatccattttaccatcaaaccttgtcatctctgtcttcaaaatatatccaaaatctgactaattatcatcacctcttttgctactaccctagtccaagccaccatcagttctcatattgatttttgcaataggcttttgactgatttctctccttttatgctcttacacccctacaatttactcaaaatacaatagtcagagtgatactcttaaagcccaaagcctatcacttccctgctcaaaacctsmaatggctcgccatctcactgaggacacagacctacataatgtggcttccctttccatgtgtgactccatctcctgctactctctttctcaaccattctgttacaaccattctgttgtgattctgaaaaatataggcaatcactattccctctgcctgaaatgttctttcccttgatatctacctggatagggacctggctyggtctcttgcctgatgcaggttcttacccagatgtgaccttctcagagaggcattccctgactacgctattgaaaattacaaccctcctccaacacatttgttttcctgcttttttctttccatagtgcttatcatttaggtgaccatatgatttattgtctaaactgggacattttttagagtgaaagggtgtgctaggagtaattacactaagaccacacatataaaccagtactatctgagaaaactgagacattatggtcaccctatttatcaccatctgacatactattttgcttatttctctttatgctttacatatttatttatatttctatatacatatttactgtactatacgttcaaatatgtataactatacatttatacttattagtatatttttattktattcatttgttttctgtctttcatactagattaagttctgtgagagcaaggaattttgtattttgttctttgctgagtcccagtgtttgaacactgcctaggacacactaaccaggtggtaaatatttatttaagtaaagcaaaccaacaaaatactaaaataatgtctggcacataattatctttcaatattgcttattgttatcaatacttattattagtgttgttgttgtttgtcctcaaacaaaagctattactttcagctctgagtgagaatggtatattttagatgatattgccctattttatttactcctcagtaatatttttatgagctgcctgtatagagatgtttgcatctgccaaataatttttatttaagtggcctgctcttctccagctttttaatcaggatgcttagtagttgggtggcttacaagcctttgtgattcatgacatacagatgaatttttcttttatacatcagggtagataataaaaaaaattagctggtaaaccctaaacccttgtatgagttcctattttaaaatatattggattaatttatttaatgtccagttgtgaacatgtttaaaagactcttgaacttatcattataataataagcagsatatctcttttatacttcatccagttgggaaacatagctaaaaatatcttaaaagaatgattttgagttctttcagtgaaattctagaaatgcaaattcagataattgtaatgatcaatcatttactggtatgttaatttcttaatgcattcaatttatcagcagcaggtttttcctaattctaaagaagcaatgcttaattctctttttactgawtaattgtagagaattatacttctggcagttgacaaagggacttacatggcttgcttcaataccattcaagacataggtaaataataaaagtaaacaattcatgagaagtggaaacataattaacagcaatcttatgactgtttgtctcctcttgcaaaaatcctagtaagctatggcatgagcttccagttttctctggataagaagtacttgttagctaatcaatgtataatccccagtgatccttaaatattaaaaagttgacattagccaattagataattcaattggacaagcatttatggagcatttgctattcaagaaattttcttttggtcacagacaaaaatttaatacagcagcaccgctttataaaactcatgttgagaagcataactgatagcttttttattttggcttttgttttactgagcttttatttttcaagacacaggattttctctgcagtacatttgtagccttataatcgtgtgctgtgttataataggattgagctttattgagatatggttgaattgaaagttcactaggtaagttctttcattttaattctgaattccatgctgagtagctttgtcttctaaccttttgtgcagatagtgtcccttattcccatttgcccccttttggattgcctctactatgtggtctactagaaagatcatatcactgggtcaaaactcatgctttcaattttgcttctttcactcactgaatgacctcaggtcttcttttaaccgcctttactagtatattaatagtcacctggggtctggtggcacagttaatcaaagacctaaaaataatttgaaatgtacagccctcccttctgcctctagagagaatcttcgaaccaaagaagaaaagtaaaatgaaaagagagatttgctaggataatcaacaagatctctgtgtgatggtttccttttcagcactggcctgtctgatcctccttagtctcctaaaactgaaatgctcgtttctgagattcttctttataattcctcatttgaagaacagaccttagaaagtgacaagacatctatttgaaataaaaataataaaactggcgatatgtctttatctgcttgtgttgagatacgaaagaacagaaatgacttccaagttatatgctaatataatattgagcatgatatacatgaagacatggttcagaagaagtgtttgaaccctagcaatagacaaattgtaacaaaaaggcaggtaagaatttagttctcctctaaattacattaccatttctttttctccgctgttttttacctctctgcccaatgctatgaccagtattcagtgacttcctgttactgttaatagacttctactttacttggttaattgtagtcttatcaaaataattgtgaaaaattcaaaggtacattttggaactattcatagtgagccctgcggggcgggggggaaagcataatcttcaaggtgaactttagtgtgctttaagcacattcctctccagtggggaggatttcaaaacttttgtcgtttctgtrggcaatgaggtggatatattagaagcgtgaaagacaggttgaaagtgatcagttaggaaaatgttgcaataatctagagaaagagatgattaggagcttaacttaggcattaaatatccaaattttctaaaagggagacatacataggagataaatttaaattggcaagacttaggggctaactggttgtaagcaatgaaagagagaaaataataaagatttctgaaaaaaactggtttggctgtgtccccacccaaatctcatcttgaattgtagctcccataatttctacatgtcatgagagggacccagtgagagaaaattgaatcatgggggcagtttctcccgtactattctcatggcagtgaataagtctcaagagatctgttggttttataagaggaaaaccctttcacytggctctcattctcttttgcctgctgccatgtaagacatgccttttgccttccaccatgattgtgaggcctccccagccacgtggaactgtgagtccactaaacctctttttccttataaattacccagtcttgggtatgtctttatcagcagcttgaaaatgaactaatacaatttctatctttggcaagtcattaaagaggaggatggtgctagcaatcaacaaaggaaggtagggaagcaagaaggcagagttttagggggaaaaataatgattctcttttgaacgtgacttcacagggctgtagtttctccagatagaaatatctaatttgaagttagatatacaagacttggagtactggggctagaaaatggatctggatattgttgatacataactgatatttgagactggtgtgatcacactggaagagcatgtacagagtagaaaacataaaaggaagaggcaattgacaaaatcatgtagcacactaaacatttaaatgactgacaggaaaaggatcccaggaaaattgctgagaagtggactaatggaaattcaagacaagtggtattatagaagacaagaaagaacaaataatccagaaagagggaacagtatcgtatatgaraaaaaggtctcgttaagtaaagactacaatatttaccagttttggcatttaggagtttattgctgactttgaaaaaagagatttttagtgtagtagtagagaaataagaaagatttcagtgggttgataaataaatgcaaagaaaaggaagtggagacatcaagtataggcttttaagatgcttggctgagaagtgatgggatggtcaaggagagaggggcaatagctaaaagagaacacaggttttaggaaggaatttttttgttgtctcattaatttgtttttttggatggaaaagaaacataagcatgtacattaacctagtcctgcccctcccacagtggcaatgaataaatatttgaagtatgaatgaatgaatacttatagtcaagggaaaatgaactaatgaagaaaaaatattaagtgatagaaaagagaggtagtatctgatggagcaaggtcctggagaaagcctaaataaaggatccagaatacagatggaatttttggtctctgaaacatgagaggagcagggataattgagggaatgtgtcatgtctcgtagcatctgctgtctatgttaagtaggagmcaatgtcgtctgccaagattcagggagagagggctgtgagtagagtaagaaacattagcagaatgaacaatgagacagaaaaaaatctggaaagtggtagtagggttgcagggaaagttagtatataagttagaatctcggttgtaaktgacagaaagtcaactcaaactagcttaagcaaaaagtggtatgaatttattggctcagggaacaaaagaaagtttagaatagcaaactgtagaaagggcaaggatatgactgacataggaaataactggagctaatgaatcaaatatgatcaatatagtatttatatttttctagtgggcattgaatttaaacttcattttctttcatgtacacaggcttagtaaacacaaagtgtgaaacatggctcatacaggctcttgaccatctcttcttaccaccctgatatagaagcagtgtatttaatgggtccaagacctagaatcctaagcaaggactttgattagccttgctttgttcagttgcccactcctgcatcaatcacttgtggccaggggtaggacctgcagaatgtactttgattgacaaagcttaggtcagatgttcacacatgaactgatgactgtggcaattgagtccatcattcaatgagaattttttgtgttctgacaatgtttcagatcttgttttaggtgttggggatagagttgtgaaaaacatagacatggtccctacttttaagagcttatactctagtaaggagagattgataataaacaatatattttggctattgatatattttattaaaaaattaaaacaggattataacaaagagtaactggcagtagggtctactttatttagccttgatggtcagggaagtctgaatagctgacacctggaycacaagaataagccaactatttgaagatttggatgaatattattcagacagagggaagaacaagggcaaaagccctgactgatacataagcttgggatatttaattagcagaaagagggccgctgtgagtggatcttagtgagtgaagagaagggtaatgtgagatgaggtgggagaagttagcaggagctagatcacataggactttgaagccactgtaaggaatggctattaggatttatccagtcaaatcaagtgccttttcttatagyaatcattcgaattgagggccacgttcctgggaaagggatattaaatacagtaattttaattttcttatcagtccaggtgcagaaacagtggaaaccaaggtaaaacttcttggaggttcgaytgataagataggtcaagtagaaacatgagggagaaggcagaggtaatgctgttgaaagactagttaaaacagctgatcctggattccagaccaccatagaaaagagcagaagttaggagagggactgattgggaaaataaaagaaggttatcaatcttgtggtctttgtcaaggttgaaaagtaggttttatggccatgaggaagtccaataggtataagcataggctatcattggcggagtaagatttcctagtcaaaggtgttgtaatgtcctttcttattcagatgaatacttgtttttatatatttatttgtatccaacctaagtccataaataccttgttagtgtacccagtttccaaaaacttgctgattggggttcaaaaatactctatctccccgcctcccttyttaagttgtgatcttttccattattaaacattggcttttttcccagggatggcactgaagaagaaaatcaatgacatatctagccagccagcttggactgaatgggcattcaaatagactccaagggccaagtacagatggtgatttattgtgcatacaacttctacagagtgccttcatttgagcatcgatgtatatacaattactcaccagaatgctgcagttttactatttagccaggaatctgtggagagattatgttcactaagaaatccacacatgtagtttctacccttttcagcaactctagaaactctcagtagtcttctgcatgaagaaaagagatttcaaaaatagttcttccattttaccatatttctcactattgtcatccttatgcaattcccatttcagagccaattcagatttattaaaccatgttcctctactggcatgtaagtagatggatttgctagaggcaaatcatttactgtggctattgtgaaacctaaaattgcagtagtcgtctccacatatcacaggctttcttattgtaaaaatcatttttaggcaatgtttatgtgatattgaaacaaccaagtggaagttcaactgtttaaatgaagcagatatttgacatcacacaggcagaaaaacaatgaaggcacttctaaattcctttttctcacggaaaacagtttgagtggccagtttgcccttataatttgaacttcaattgaaattgttagcaggttatttatagctttaggaggataatttccaaaaatcttgcttttcctctctggccaaatattacctaattgctatcctatttcagaaatggcatcatgtccagacatttataggtttatattgtattcgtgttttattatattaaggagactgggttgttggggtttacatcaggaattgaattatgttgctctttgcataaacatatatggagttatattacaatgtattttctttaatattttggctaaatttcagtgaaaaatgttaataattttaatagaaacacttcagaccaatcttcaacgcaagcaatatgatgtcaagattaatagaagctataaataaaaagaagctgtaataatattgataaaaatcagctcagcaaatgaaaatgaggaaattcaataacaaataatatactgcaatgacatagcccatcgagttgctatatgaggcaggatgaaaaatagccctttaaattatttatgtaccttgcagtataatcagtatcttggatagtaagctactagaaggcataaacaaacatcgtttgtatggtgctaagtttatcaccctcaaattaaatgtaaatatatgcatctgatgctgcgtagtagtgcttcttctaatgtttttctgtccatcatcattgacagacttttcagctcttattagggttttcttttcttatctgtattttctctttcctttctcagggagtatcttcttttggatcttagtatgagttttgttatggaaaagctcagggtctatgttggtacagatacagggagaagcacttagatgagcatcatctatttatttgcygagcattgcaataagcactattggagcaggaaacatacaatttatggaccctatcctctatgtatagagtctagacaggagaaataaacatatgcctttggggaagtttaaaggcacttaaatataactattcaaaaaattgaaattagctgattgttccatgttgtttgtaatcgaatccattcatttatgataacagtgtatctctatatagttatagtcattattgattttctattattatatcatttgttgaataaatgagtaaataaatgggtgaatatctttagtggtttttgccagtatttatttacggctgaaagatcgtggataagtgcttaatagttacactactttttttttttttttcttttttgaggcagagtttcactcttgttgcccaggctggagtgcaatggcgtgatcgtggttcactgcaacctccgcctccctgggtcaagcaattctccttcctcagcctcccaagtagctgggattacaagcatgtgccaccacgcccagttaattttgtatttttagtagagatgaggtttcaccatgttggtcaagctggtctcaaactcctgatctcaggtgatctgcccacgtcggcctcccaaagtgctgggattacaggtgtgaaccaccatgcccggcctagttatactactttttaagaattgtgaataggcactgaatatctgttcatcaagattgtacctctgtgattaaccaggcttgattttgcaccaaaacagtacagcattgtcattgcactcttagtatttattttgcatttgcttagtgttacatcaagaaatagagaacatctattgtgtgccagacaaagtactaagcactgagtacagtggtgaatgaaacaaatatataccccgtcttcattgagctgataaactacttagggataccaaatagtgctatgaggtgctatggtgaccaacagagtgtattcttagaagataacagggtgaggctagggatctacttagtgtgtccagggaagtaatctttaagctgagataagaaggataaggaagagcggagcatgtgaagagccagggactgagcattccaagcaaggggaaacagcatgtccaaagactataaggcacgaaagagtttggtgtgttttaatgactgtaaggaaaccaatgtgattatgttgcagaaagggagagaaaatgtactacatgatgaagttggggagtcaggtggagacaagacctaagggctttgaaaactatgccaaagattttagactttctcctaaggtaatgggactatattgattggttttaatcaggggcagcagtggggttcacatatataaaagagtactttggcagttgtttggataatggatggggaatacaaaaaggaacaagagaaatcagttatcaagttactgcagaagtccatgcaagaggtgaagctagaggcaagtggactaatttgagatatattcttgagatataacctaaaggaccttatgttcagggctgtatttgagtggacaggaagagggaagaatcaggaatcagtcagggttctggtggaggaaactaatgtccggaaaactgagaaaggaataggtttcaggttagaaatcaagaattctgttttaaatattttcatttttagatactcatgagacatctaagaatataaataggcagttgcatttaccagccaatgatgtagcaatttcagatatttctgctgtaaaaaattattgacatgagtgtttgaatgtcatgctttaattgatttggtaaacatttgttgggtctctgctatgtcgcaggtattgtgctaggcactgggaatgcaaaggcatagttgctgccaaaaaggagtttattataatcaaataaggagactgaaaaaaaagcagataatttaaaacacagtgtgataataacagtaggaggaacatctaactcaaataaggggttagaagggtcggggaaagtttcctggaagatatgacatctgagttaagttcaaaagtaaaatctagccaggcacagaggagcaaaaggctgtgttaggaaaaattgtaccaatagtggatttaagaaaaatacaaaagtgagcatcttaatatttctggccacagaatattttatgcctattacaattattattaaatatgtccataatatcagaatcatcgaaatgaaagagctgttagaaatcatctagtatagccacttagctttacagaaagggaattggactcagggagaagtgaactgtccaaatcatcaataattctactataacttttttgttttcaaatattgtaagtttactgtcaatccactgtctaaatggtgccccaaagcattaatttaatccttcaaattgcccacctgttacaagaggatattttatttccagagagattttgttgttctcaactctcctcagttattattttccacttaattcacagtgaacaatgtgaaacgatctttcaataagtgatacctatacaattaaacagctttgtgtaacatacagggagatatttaaaatataatctttcaaaagaatgttcatagtcacattctctttattcctaaaccatttatagggctccattttcttccactgggcaaaccaatggggttttgggagaaagatgaaagagttgattactcaaaattcaattatatttggttatcttatagcccttttgtttctactgctcctatcttctgccggactaacactctgatctgctgcaccactggtttcctacctgttctgccaccgttgtttctaacacgctaagaaatgcagttcctcacaagccatacaggcagtagtcaagaagaatacaaaaggagagaacataatccattttcctttcccttctgtccctgaaatgccaaatacacaatataaaggagctgaaatctttagcaaagagggcagagtatgccatgacaatagcagcagtgtctccaaaagcaaagtattgtatagtaggacctagctaatttagaccagttgagaataagctcatctgaatgtttgaatatgttagtaagaattgcattttcattattctaaaatgcatggagtcaggcactgtcatgtaatgcagtctgtttggaggacacttgtagtaatatctgacaaaaacaaaatggaaatgctttaaatctccatctgtggtgactggttaaaaaataaattcttccatctatgcagccattgagaaagatgtagacagatatatctccaatacattatattgttaaacaaaattaaccaagtatagaacagtctgcatcaaaagctcccaaatttcattgaaaatatgtaatccacatacatgtatacacaaatatgcacacatttcatttgatacacatatataaaggtatatgcacataaaaagatataatgtgtgtattacaaagtattcttctttgtaataaaaacatgagataaaatgtgaaaatgtctaggtggaaaataaattgtgcaaaatagtacaagtaatattatatagctctataaaaattatagagtagaatatgcaaaaatggkcctaaaatgcaatggaatttaaactgggtaaataaagtgtggccaaatagagatcctttgactcctgctttaatgaacagataagaatgattaccagttattggaatgtaaatgtatgcctttaaagtgctttttaaaagcttattttaagaagcttaagcttttcctctccaaattttaattttgaaattaatttgttttatgcacatttttcactaatagtaaatttctaacaaagcctgtcgaaattttaacaaattctggatttgtagaacattaacgaggactttaaacgtctttctaaaattaacaatggataatttctagtccctccttttaaagtgcactttgaaatactgcattaaaaattgtctgtaagttgagaaatgactcaagactgttctaatcactcttgataaatctttggatttatttatactctttgaactcatggacatattctatttgactggtgaatcaaatgctcacaaagttgggttgttgraacagggctttcccaattgtattttgtgtgcctttcttcctttggctgctggccttttggccttttcastgctcattaacaccttcttggcagtgtggagagctgaaaaaggtgaaatacaaactggttaatactgctaccccagcataaaaatctggaagtagggcttcatgaaaagcagaggttaattttctctactacaaccacatgaataatcaaaagttggagctatagagttggaggatttggttttaagattactcctgggattattttaaaatagaatttatgattgatttgaatatgaactcaccaagtgtagtgacttgactgtggaaccctttcagaggcaactcttgggattttttattccagtactgattgtgatcttaaacctaagtatgcagagatgcctgaaatttaattaaggtaaaaatttaaaaatttatttttccgtttgaattatgtgcaaggttagaaaaaccccatgtaaattggtggtaatttatttcacttgaatccctagggacttacatttccacattaataagaatacactgattcttacacacaagggtaaatatagtaactgagactcatgctgaaggtcatgtttggaatctcatatttcctttgcatcttagtttcatacattctttctggattctttctagcatttccaaatcctattcatcctcagggcctaactcaagtctcgcctctttgataaagtcttccttcacaacttctgacttccacatatattgctcactgccttctgtgaactccagtttttattgtctgacattcacagctttgcagttgactatttactggcttaagcactggttgtaaagattgtctccccagtgaaatgttaagttccttaaggattgcaaatacttttaattgtattggtatagaggtcttttgaattccttgcaatacctaacatagagttcctagtaggtactcaaaaatactgtactttttagtccatttatggactatgcatraattacatttaaaattccttctatctcactattgccactgcctcaattagttgcatcccttgctagatcattttttttacaaggcaggacaaaatattgccactgatattgaactctagtttggcttatctgctggcagcaggctttcctgtagggcattgtgaacgtttacaaagctagtatagctaatctgctacagagctatcttgcccttttggtctgatttattctcattggccttaaatattctctgggctactgtggaagcccagaattcgacttttgcaagcatcaatgaccaggtagccgctttgtggaaccagaaatgatggcatgttcttaagtgagcatccacagttaaaggcgaaacaattactatggggaagtaaggccttttggcaggtgtgtgtgcgtgtacgtgtgtgtgtgtgtgtgtgtgtgtgtgcgtgcgcttggcgtcctccctccccttacaatctctgtctaccttaccagtcccagtaggcttcatgccacctcagattcaacacctttaagtcacattttaatatagcacataatagtgtatcttctttctccagcgtaggccacagaaaatgtttgcctcccttctctcttggggcctttaaggaatttctttctatcagctagaagaggaatttgagagactatgaaaattgaaagacttaggtgaaatcttatgtggttactctgcatccattcctgccgaggaaataactccagaggagtaagggaaaatatttaagggttgcaagagtcatcctacccttttcttgggcgttttctgctgtttcagcctcatggttcctctccctgaaaagaacaggtgtgcctgacagcaggtgtgtttgttctacttttcctatggcagctgtcactccccaggtaactctcttttccaggtggtgaattcttacaacccatcgtcttctttcctggctaccattactttaaaaaaaggtttggctgtcaaccctccctccttttagaatcttttgaaatgttattgttgtgattgttgatttttttttttttttgcttttgtgttttgggatgactttttaagggaaaatgcatcttcagatggattctgtttacaattcagacaaacttaacactttccttttaaaagcctccataaaagtctgcagccctctttgatttggattgagttttgaagccttcttctctgacagcgttgggtttctccattttgcattttccagtagatcttggggtctgtcctcagtcaagacacctgctgctgggactgccagtcgccacatgcttggctttcatcttccctcgtgtctattcatagcatgcacttctcataactctaaaagactgtttgatgccccctcattgtttaatatctacatgattaaagcagctgakagaattagcacgtgtcttaagcctaaggaaaaatccagtctaaaagaaattgtattgcaagcccagatcgtttttaataagctctgctgtgctctgtctcacctattcctctgtggggctcccttgggcattttataggtatttgagggttagctttaaaaggattctttcaggcatgtatttcaggactctcaatataacatttatcaagcccccacagtgtgcaggacccttacagtggtcccatggtaaggtacaaaagaagcaagcataccattttaacacttaaggaatcaagttacctgtcctttaggatgaagtgagggagaaaaagtgcacatatataaaagatttgggtacatgttgaagatgtcagatgtataggtgcaacatgagtatcaattcggtacacaaagggggcataaaatgaatgtgtaatcacagttggaaagatatagtgagagcctcagaggagtgaatggtgtgagcttaagggctttcatcatgagtgtcctcagggacttcagtaaggcaatgcaccgtgcagaaaagttggtattctgatagtgttatatgaaaataatagtaactgctactrtttattcaattgaatttttactttgtgtcaatgtaaaaagaatggaagaactagggagcaagacaatatagactgtaaagaaatacattcttaaagtgtcaattgtatgaccatgggttgaaatttggctagggaggtgggtgggccgtatgcttgtcgcgtgtgtctgtgcatgtctgtgcggggtakggggtggcagcggggargaagaagcaagataaagagacttggagagtasggcagagtctgggaaatagaggttacggtatgaggtgacagcaattaaagtggggaaaggagtaaaagaaaagagaggctgtgttcaaagaaaggattcacagttccagatcttggaattaaatcctttaccttctgaatatatttttctctgaaaccttaggcttattttgctcattcagaataaaatagaatatttaactttgaaaatagggtttttacagaaaataaagtgcttctttaaaatgctaatttttgactctcagagtatgcccaatttttccacaaatttgtaatccatagtaattctgaggcatagcttatgggaaattaggatgctaaagccatgtcagaaaactaagcaagtakaaatttacagtaaattattggagagactcacatcactacattagcacatggtttagctgtattttgacagtggaaaacctggcataagagtctctgggagcaccaggtaatatgcctgaggtccctttcctgcaggtgaattctctagtggcagctatcgcaatttatgccagaggcttatttttgtgcagacataatctctggtagaattttcgcagcctctgttgacagaactgacagtgtgtataggcccaggctactaggcaacaccagcatcagttagcagtcagcaaatatttattatgccttaaccatatgcctagaaccaagttagaagcaaggaggatatattagaacaggcataaacaatcccctcagactctttacagggctgacatacttaaagtaactaaaatagtgacaaggctatatttaatcaaatgccacattcgagggagggtgagtattttaggatgttagaaaaaggagagatcagttagagcactagattgggagagtcttcagaaaagaattggaactcatcctataacgcataagacaggtcgaatttaaagagtaagagtgagaaaaggaaggaaatctatgcacattgagaacaattcagaggaaggcaaaaaacaaacaaaacataacaaaacaaaacaaaaacaccctggtatttatatagtacaacaggagaccagcttgattgacatggaagatgtttgaaatcaatagaaaataagttaggtcgggccagagtatcaaagtactttgaaaaccaagtcaaatgttttgaatacaatacattaagaaatgggagacgtgtgatgatgaaaggtgggagcatagcatggtcatttaaggggcattttagcacaattaatatggtactgatttactggacaggttggagagggtagagaaaggtatacaaatattactatagctattggataagcacatatttaacttcaatttcacccttcaaggaagtcattcaggccattcccaacaaaatcctagattcccgttgttttttatgttaaacataaaagtgttaaaaagatctaagttcacatcagatgggtaatgtgccaaagttgtaacaaggtttgaaagaggcacatctcacacataaatatgaaaacctattgtttgagtcagtttccaaggctgaagggactatatgcacttacatcattggataaaatctctgtgtctctaattagcttcaatctgtacagatgttctttaaggaattgccattcctttttattagaccgagctcacaaatttttccatctaagtttgatgtagtatgttggaaatgactattctaggaaacttggaatgtatgaaaaatatggaggttttttaagaaaaagaaaagaaatatgtgtaagtaagaggtaaaaataagcaaaccaaaataacttagatggatgaacccaaacctaggttgtagctgaaaatagaagggtaaacaagtgccatcccaaataaaaacaaactaaagtaagaaaatgggcaatgcagagaaatcaggacataaaccaagtttcacttgaattatgcataaaaattaagacagttatttcagttttgattcatttgcttgtgtatacacttaggttttcacctgccaaactttgtaagttagtataaaattgatcatatttacatcatcatcaaatggacactggttgtcagatttgagggaggaaaatatttttcttaaaatcattggagattaagtctcaggaaagctacagcctcaatgaaaatcttgtaaatataattggtattaagatctgtttaattaaatggcattacaagggaaaagaaggtcaagtttgtctttaggtatttgtcttttgctttcctcggttatttccctacagtgcaatttattccatttagactggtggtggttcaacactggctgtaccttaggatccctatgggaactttcaaaaagtccactgcccagactccaccctagattgatccaagctttggtattttccagagctcctcgggggattctaataggtatgccgagttgagaagcactgtattagattagcaccagcatctttctctcttcccccctcatatagtcccttaaggcataacacttcttacaagggacatatattttagccagactaaatatttgtgttacactgatgatagaaagctcttgagggcaggtccttggtttgtttatttttctatcactcagtgggctctggccagtaaagtttgttgtattaataccaagtacaagtataagaggtagcaggattagaaatagggcccaggacaggctagtttttatgtaagtggggaggggaagaaaaaatccagattgtaaaatacagaagtcttggctatagtgggaagtcttcaataggtcctgtgaatataaaatatcaccttagaactatggtttattgccagattttttagttatccatactgtgactttaggtaaggtgtttatcactgggtgtctctgatatctctttaaaatgaggaaaatagttccagtcccatctaccccaaaagattgatgtgagattcaactgacatttgtagttatgagttcattttacagtatttttaagtataatatgccagatatatgtaaaattgttgtcgttatgatttacaaaggcagttaatagtctttttgtcagaatgaaaaacctagaataatccacagagcactgcaagtgcctttaaccaccaaagtcagtggaagtgtgaggaagacttcctttgcaaagctattcaaatacctcaaagattgtattttctataatcccaagagatgagtatgtccatgtagaacattgcataattttgacagactttaatagtgcaatgaaaataatcatagcgaaataacttgatgtgaattcaagttccagtacagcattaacttggtttatgagcttggataacatatatgtatatgtacttgtgtgtgtttattcattaaagggaaggagtcagtgtactaaaatttgttaaaatcattaatctatctatccaacgtacattaattgaacacctattatgggtcaggcagtatttttagtgttgggaatacagcagtgaaaagaaatagacacattgcttaccatcatgtaaacttacattctagtaggaagtggagcataatataattccaagtctatagaattgctattgaaaaaaataataaaacagggtaggcacatagactggtggaaaagggtaaaaagagtggatgtttcataggtgccaagatctaccataggcacttcccacacgttacttttatttataaatcttcacaagcaycctatgcaacaggtattgttatcttcattttaaggagagggaaattgaggctcagagagtttttaaaacttgcctaacattacctagtggttatgtgacagagttagaattgcaacttgcatctgcctgagttcaaatcccatgttctttctactacatgtggccagcacgtaagtgacttagtatatgtttccatattcttttctgtacaattcctttctgttgggcttcatcagagatttaatctgacatcccatgtaccctatatgttccacagatactaacactttaaaaattgaattagttattagcatttaaaagtaaaaagctgcatatagaagtattggtttccagcttgtctcaaagtattgaaaagtccagcaaaattgggcctgtgctcccatagggcagaaaccagctgaagctgagcagcatgatccctctgagacagagcatgcactctctgggtttccacagccactactaatccatgttgtcatagctgagccacttcattcatttatgttatttacctggcccatgtaaatatttgaatttgtgacccactagaacaaatacatgaaaaaccctcttccagttccaaagttttgattcaatgctgaacattcgggctcagttataagccttgtaactattcctttgacaacttagttatacttaaatgagtttttttctttcatttcttctccactttgtttatcttttatggtttaacaaccatgcaaacaatagccaaaattgcacattaatttctttactttttctattttaaaatatgattcagtgcagcacacacaaacctatatatttttagtctttatgcagaaaaaagtgaaacatgctaaacatgttaaaattctcaagcatgcatataaactgtaaatagcataattaacaagtaattcataatggcagttaaattctgccaatgtggaatcatgcaagccagtttagaagtccatgttttagttaagtctataattcaccatagcctttaaaatccaagtaatttattaacctaatataggttagaagagaaaacccagtcataatattgaagtgaatatagggaaagatgcctctcatgaaaatcattcaaagtataattattcttaagcacaacattattaaaatgtatttctataatataaaagtttttattagtattctgtgatataaggtaccctatgcagcattatgttaaattctgtctccatatttataagttttatagagtttattttatagcagtaaacaatgggatctctgctagactcagagtgaattacagttgcttaatggtgtgggtacaagttgatttgtcagctcacaggcccaattatctgttcttgtggttgccctagagcggccctgaggcacaatagcctctatggccaggatatctagcttgttcggtggttcatacactgttagtacatgtttgatttcatgcaggtggagtaggagcccacttcgatagtgcacagtgaagtatggcatgaagactccttcctcgtccagccacaaatgtcttcctgtatagcctgccacaatgcctgaaatttccagcctcaaatagtcatttctttggttaaattttcatccctgtccggaaaacaaaaccacttcaaaaaggttaagccattgtcccacatataaatagtgttggcttcattaacactatgaaattgttcattggtttgcataacaaaatgtcatggtccctgggagaacaggtaacgcagagcaggtaactcttaaggacggaaataggaaagtttggtctaaatataagatatttgccaggaaggtcatgcctagcacaaagctctgtggtagagagccttgaacagtacatacttggttgggggcagggtgttagagataaaggaaagaaacgttagaaaagagaaggtgaaagtgaaataaggttaaatttgacatagttcctgccaccctcttcctaggtccaatcctcatgttatctgktgcttataaatttaaaagacagttagacttcagatagtatgaatgcttgagaaatggggcattataactgaaagatttgktagtttagattgaaatgtattataaaataaaagtaccagtaaatttgcagatttctaagaaggggtttgataagggacaaaaagtcaattcgaaaattaaacaaggaaatggaaagaagaataaacaatgtaagaatattaattcatttaatttttgaattgacttttccccgttatccatccactgtccacagtaatttggaaacaaactgttatttacattttataatattgcattagttttctattgccactataacaacttaccataaacttagtggcttaaaacaacacaaatgtgttatcttacagttctggatagtcagaagtatgaaatgagtctcaccaggctaaaatcaagatatcagcaaggctctattcctttctgaaagctctaggagaaaacctgtttttcttgcattttccagcttctagaggctgctcatattctttggctcatgatctcttcctccatcttcaaagccagcgatttcatgtctatttgatccatcttccccrtcatacattctttgatacttctgcctcactcgtctacttttaaggacccttgtgagtacgttgggtatacttagataatccagaatagtctccctatcttaatgtcaacggattattaactttaatttcatctgcaaccttcatttccctttgccatgtaacctaacatatttrtatgttgtgggtattagaatatggatgtctttaggcattattctgcctaccacaaagataataaacatacattgttatactatgattaagacattgtgtttgttacaataatggaaatgggttgacaaattttattcccagacaaaaccactcagatttacgcattttagctaagtacatatataagtgacaaacattaaacaaaatgatgaaactgtttcaaaataaaggaacagatgaagatatgccagggaattttcaataaggagaggatagggcaaggatgtcaatatcagattaagtggaatttaaggccaaaagcattaaaatagaacctagagggattcattccataaacaaatatttattagatgtaactgtatggaatgatatgtgaagcatttgataaaactgcagttacagttgtgaaatacagatttctcagaatttgaaaagtaggcaaaaaataataccaaggatttgaataattatgaagcttgacctaatattttgtcaaataaatagaattagatactctaatgccaaaaacaaaaccacatttgtattttatgcccctggaccatttacaaaatttatcatgtactttgccacaaggaaaaccttaataaattctcaagtggaaaactggcaggtaacatcctctgacaagaattctgtaaagctagaaatcaacaattcaaagaccagaaaaggtaaacaggaaaaaacttagaagaaccataaaatactttatgtaagtaatttttggatcaaagagaaaatcaaaagaaaattttaaaattatttaaaaatgaacaaaaattatattacttcctaaataatctaggaatgtggctaaaaacatgagagctgcaagtaaaaaatatatgtgggattttcaagactttgcacaaaatatacatttaaattaaaatttattatttctttaaattcatttaacgctataaattttccttatagcattaactgaatttaaagaaatattgaaaaaaatctttcaactcaggaacagaaaaagaatatatagatatatatttcacataaaagtatctgtacaaaagtaataaaaatataagctaaaataattacaaaatttcaatgtgcaattaacaaagccaaaagctggtctgcgaaaatatgtataaaagaggcatactttgttctacactgaaaaatacactgatatacttcctaaatctcaaggataaagagaaaatctttcaggctttttggcagaaaaactgaatcatctacaaagaaaaaaatggttttctcatctatatcgtggaagctagaagacagtggaatagcatctagaaatttctaagagaaaaagactgcaaaccaagtaacttaccatccagtcaaggtatcattcatccacttgggtcagagaaagatgtttgaggacatgtaagaattcaaaaagtatatcactctcatacaccagtgaaaaaatatttgagaaaaaactcaaactaaataataaatgaatcggaatggagacttcaagatgagagaagaaacaatgatgggcaatgaacctggctctctggaaaagtaattaaatctaaatggaaaggcagattgacttaaatatctaaaatagtatcatttcaacgtgtaatcaatataaaaagtattaatgaaatactttgcattcttcttttgtgctaagtcttaaaaatcccacatgtattttgtacttgcagtagatctcagttcagactagccacatttcaagtgtacaatagtcacatgtggctagtggctaccatatggacagcacaagcgtctaaataaatatactaaactatcccaacaaaacacaggagtgggagtgagaagaagggaggactaacaagatccagaagatctcatggggttaggaagagaagtgagaaggattataaaagtgacattgtagggttaacaatgacaacaaaagraagcaacttggatgtccagcaatagggcattagttaaataattaatggtacatttataacatataacatttartatttccagattttgaaacaatgagttagaagcatattctatcttaaggaaacatgcatgttatattgttatataaaacaaacaagtatagtataatacataaaatacccaattttcataaaaataaatggaaagttttttaatgtgtctgtttgtatatatttttatgggtctagagaaaggtatggaaagaccttcactctacaatgagtatcagttgccttgtgacaagattggagaagttagatagggagttatttattaattttgtctttatgaacaactgtattattttaattgtaataatgagaatttgggggggtaatttctaaaacatcttatacagtataaataagaatgataaagagaaataagcagcaatagctcttgatgtgtggaagggacttgacctctgttcataaagtcagacaaagcctgagttgatagcattatttggtcattaaaagaggggcgtgagatttaggggaaactagaggtaaggtctttaaaaaaaaaaaaaaaaaagtcttgttatataaagggacttcctaagtgaagcatgaaacccagaacccataaaggaaaaaaaaatgacagatttgataatgtaaaaattgaatgcccataaacaacagtaaggggggatgggaaaacaataggttgggagataatatctggtacatacaaaatgcaatgtatatggatagcacattccatataaaaatgaaagaattacacaataccaataaatatatgaaatgatgttcaaattaatagaaagtaagtataaatatatataaataaaaatgaagtaactttttcacctaatttggcaaaaggaaaaagaaaatgattcaaatatttactgtaagggtatgaggaagctggaactgtggggggaaatatgaactagaacaattttttatgagaatctaataaaattcaaaaagcacatgcattgtgacccagcaatcagactttcaggaatttatcttacagaaagaataaagcaagagtgcagaaaggtgtatatgcaaggatggccattgaacattgcttataatagtaaatacttggaaataagctaaatgtgtggttctggtcaaataaattatagtagcctcagacaaagaaattccttgcaaatatgaaaaaaagttaagtagatctacgtgttctaacacaggaaagatatccatgacatactattgagaggaaaattgcaaaacattacatataacattatctcagtcttgtaaaaacacaaaaaagtgtttrtgcttatgtgtttatgtatttatgtgttttctgcatttttcaaacaataaataaaaacaatgaaagtatagtaacctttcagtcagcatgatgtttagggaatgaggaattttcattaatccgtattttttttgttgattcagaattaatcatatatttttaaattcccatctttaattgttgaaaatctttctaaaatgactccttttctaccccagtgtgacatcgaggaagcatttttgaaccttcattctatgactgatcatctttagtgacttatgttcattattttgagtatcggttctttttgcctgaagccctaataataatgacaattgctacatttatagagccaggattcaaacccagttctctgatgccaagttcttttcagtacagaaaagcccctggtagctaccctcattgattaaatccctgaaatgatgtgtttgcttttcattcacttttattttcttacagtagaaagctagagggaaaaaagtcatttggttgaaatttttggtttgagtttcaataattaaagttttatgtattcaccatgtagcttaagaaatagagcattactaattacctttttgcctctgctgtgtgatcttttcagatcccagccctcttccctcacttccctactagatgaccgtcatcctgaaatgtgtttatcattcccttgcttttccttatagttttgccatgtatgtatgcatccctaaaaatatgtttttcagtttcatatgtttacaaatttcttaaatataatcatattgtgtttctatgaattgctttttgtgctcaatgttacattactgacatgcatccatgttaatgtacatagctcatttattttcaaggttatataatattccattgtgtgactgaaccataatttatttatcctgtagtcttttttgtagactatcatggcacagctttcaattgatcgaaatatcacagatatcacaatctgccaagaacctacatggccattgtgatctgtctgttcagtgttgtagcgaaataaatagacaaatcagagtaccactataaggcattcaatgagtatcaaataaaagtttgaatagggcactgtgagactatggagagggccaggttaactttggctaaagcraggcttagaaaagagataatttgaagtaagccttgaaaaactgttacaactttcaagaggtagatatggggaagtatggctttctatgcaaagaatcactggagctgcaaaatgggaacataggacaatgttcagacaatgtttagcatagatgtggctggagtgtaggtacctgaaggtctggcttacccagtctaaatgggaacagatctgtaatcaaatcctagctccattttttaaaaaattgccaatattacttaacatggcaggttacttgacttgaccttgttctctcatctgtaaagtgaataatgcctacctctctgagtcattgtgatgactgtatctttaagtgcgaaatatatggataggtcttcgcacagtgtctggcacaaagtaggcactttcttaatgtcagttcccttctcttatttaacattgacttgaataaggcctctttcacttttgtttctcaaggaattgaatgggtagggcaatgaatagtatttttttttttttttttgtaatttctcttcaggctcagagcctcaccatgacattcctttgcttctgttagaaaactggttactatctggctcaaattttcagcctcggctgggcgcgatggctcaagcctgtaatcccaacactatgggaggccaaggcaggtggatcacctgaggtcaggagttcagtaccagcctggccagcatggtgaaaccccatccctattaaaaatacaaaaattagccagacgtggtggcacgcgcctgtagtcccagctactctggaggctgaagctggagaatcgcttgaacctgggaggcggagattgcaatgagtcgagatcatgccactgcactctagcctgggtgacagagccagacaccaactcaaaaaaaaaaaaaaattcagtatcttctttgtgttgtctccctctaattcctacttgcaaatatcaattcctgtactccagaaatagcccaagctaggatatgaagctcaggccagggagtctgggtagaaaaaggaagaatgtagagaaggtttctgtttgtttaacctgagctaagaaaccagcatcaaaaacagagcttcaaattgagtccacatcttatgagctagatgttccctttctatttcatttctagggacaaagctgatgtcagagcgtagagaattctaagcctatagattacctggctatcatggaagagtgatgagcaaataatagtcaagtggctttatttcatttgataaagttgagaaaagcamataacccagtgaatatactagkaaggagcagaaatttgcacagaaaatgaatgaattagacaggggtgttcagagtcaaattatatcaggaggcagcaaaaaagggaatgaccagctagcagagcaagcacataaacaaggcatattgtagttgaagagatgagaagattaaaaatctataggagaatttatcacaactcaattcagttcaatagataattatcaagcactgattgtgcaccaggctttctttggtcctgtggttgtggaggtgatatagtgaaggacagtttaaaatccaagtcaaaaaatgagaagcaggaagtctatgtggggttaaggaatgagctacaaacattcattagcagagacctgatcctgaagatactttgctaattcatctcyaggccaccacttctgatatttgtattagtcagaactccgacagtgaatggtggtagcccaactccaactagcttaagagaaaaaaaaagtttttttggctcaagtaaccaaacaacaaggtggaacatggtcttagcaaaaactggaacacaggttggagtcatggactggaaaactgtcaagactcccttgtattcctacctctctctgcaggccagctttattatgtacaagatggacagctggctactgctgactgctccgggctgtcaaccttacagcctagctaactaaaaggaaagagatcctcttctgcctgctttcagtaaacatttaaaaaattaagaaaacctgaaaatgaacctggattggactagcttatttcccatatcaatatctggactaatcagtggggacagggaggaggtgtcttggtccattcttggtttgttttatgctgctccaaaagaataccatagactggataatttataatgaacagaaatttattggctcacggttctgaaggctggggagtccagtggctaragatgtctttttgtgtcatcacatggcagaagggcaaagatgaggagtggaaaggtagaaagagagagagagagagagagagagagaaagggggtgaactcgccattttataatgagcctattcctgtggtaacaaattaacaaacccattcccacaataatggcattaatccagtcatgagggtgaagccctcatcatgacccaatcgtgttttaaaggtcctactttttaatactgttataatgrcaattaaatttcaacatgagaactgcctataatcacagcactttgggaggcccaggcaggaagattactttaatccaggagtttgagaccagcctggaaaacaaagtgagacccccatctctacaaaaatcttttaaaaaatttagttgggcatagtgatgtacacctgtggtcccagctacaaggaagactgagttgggagaatcacttgaacccaggaggtcgaggttacagtgagctatgatgatgctactgcactacagcctgagtgacaggacaagaccagatctcaaaaagaaaaaaaaattcagtatgagttttggagggggaaaacattcaaaccatagcaggtgggaaatatgattggcccagactggatcaggtgtccaccccttaaacaattataattgtggcaaagactgcaatacaaaggtaggagcttttcagatcacaagtctaaaatgggggtaaaacaatggttttttttcaaagaggtgagattgcagtatgtagatggtcactgggggaatcactgtaagccaaacattccaccatgtggcagttctgttgggtaggagtctctccaaacatgaatggtctagagatgctgaaagtagggacatgtatttggaagcaccaggctaaaatggagaatacatgtgcagttgggatagcagcagatttttgacaggcagttctgaaccacctcaagcctttggttgttctctattgcctgtagaataaatcctgagatgcttattaagaccttcaaaatcttttttccagtattttctcccttttttccatctgtatgaaccctttaaaccagccagacttgaatatttactgagcaaagcactccgtgctgaagctacactcatgcaatcatcagtcctccagatatggaatcatcattctttatggtgtgtttctactatcatccttgcttagaatgcttttgagatacactgctatattcaccaaatatttatttatgcttctatgtgtgcaaagttttttggatactggttatacaatgatgaacaagacagacatggtccctgccctcagagaatttactttttttctttttgagacaaagtctcactctgtcacataggctagagtgcagtggtgcgatatcggctcactacagcctctgcctcctgggttccagcgattctcctgcctcagcctcccgggtagctgggattacgggcatgcaccactatgcctggctaatttttgtaactttagtagagacagggtttcaccatgttggccaggctggtctcaaactcctaacctcaggtgatccgcctgcctcagccttccaaagtgttaggattacaggcgtgagccaccacatccagccgagaatttacattttagtaggagtagagagtttttatgtaattataaaactgatcctaaaattatgatgtgatgactgtgataagtactccagagaaagaaggacctaatctggtctggagggtcaaggaagtgagatgaaatcaaatataagaaagaattaaccaaatgaagagatggaaaggggcaggaaggagaagaggaacaacatgcacaaatgtcatgaggtgaaaagtaggatggcgtatttgagaaactggaagaagtacatgttgcagaagcaagagagtgagtggccagagaagtagacagggaaccaaataacataagactttgtaaagcatgttaaagattttgatatttatcctaaatgtaatgggaatatactgaagggaggtgatgtgattagtttttagcattctgtctggtagcattgcaaacaatagattagagggtaacaagattggatggaagggtaccagttaggtcattgcagtcatctaggccagagattattgaatgtgaaaatggaaaaaactgtattggctcaagatataattagaagataaaaatgatggtatgggggatgcctakgtttctggcctgtgcaaatgaatggatgatacttatattcacaaaaaggcaatggtaaaggaggatcaatttgaaggcagtgataataaagttagctgtggacatttttaaaaatgtaaggcgtcttttaaatatctatatgacaaatgaatagttggatatacaacctggacaacagtactggagtctaaactctaycctctttcattcaagccttacccattcatcaaatcctagcttaatctaccaactccacaagagtcactgacccatttttctcattctattcttcctctcctctgtgccctctcctagtgtttattgcctgaaccaatcattaggttccagttatatactctacaatatatatggggatatatgttgtttccattaccagacattaagtttgttgaaattagagatccatattagattacattatacctccttaccaccagcagatatacatgtagtaagagatcattttacctgtaacgaagtgaatgcatagcctttctgccactaaagcaatattagaagcaaaaggtgttaaatmcaaacaaaattggatttgaattttgacttcacctcttactaggaatggtgaccatggtcaagtattttaacccttcagagtcagtttccttgcttatcaatacaagataataatacatgcctcaggaagctattgttcagtattaaatgcagaatgtatgtaaagtgtatagcacagtgtttgccacaggacaagcactagaataaccattatttgttgttgctgttatgactattattacttttgtggagatcaaaaaataccataattacatatgacaagcagtggctatggtgaggtgacaagttagtgaatacaaaaattggtataagcatatgcctgtttctccatactttatagtatagtaagattttccattattctctacttcagaaagcagtcataattttgttgtctttatttttggctggaggttggcctctggttttatagaatattccactggagccagtctcttgtgttacataaagcataaattaaggtatggctaaattcacaatgtgagaattgtgtgcacatgtgtatatatgtatagacctatatacctattaatcatttttatcaagaaggcccattgctcacagtgygtaccatatattggtcattatgttgctggcaagcaaaaagaaatcacccacttaacaggagagaaacacattaactcttcaaactagtagggggtgcttttactaaattacctcctccagttgctttaatggtaccctagtctccacacactaatgcatgtctgagcagtaagtagttttctgtcaccttactaggagaactaggatatttcttttttaatatgaagagcttggggagagggtgtggaagttcgtttttttctttatatttgtaaaatatttatttatggaatcactatgggaacgtatataaatgtatagtagatataaattgctasttctatttataaaaatccagtatctcttttaagtcaatggtattagtaagaaaaaaattatgatcaatgtttttccaacttttacattccagtgcatccaattttatatttttttactaattcttaatggaaagaggttcttattgaaaggtacccttggaatctagtgatatttttaatataccagtagatgatatatattttagttttatatatgaataattataattcaaaatggcctttccagttagctttcttttcacacctctcctaaggcccatttgaattttatgtagtttaagaaataaaactgatttcctagatgaatgaaagttgtctttttataattttagcccaatgctaaaatcaaactgttcgcaagtggactgtttttaaataaccctacccagatttggaattttcagagcaaatactatttggcatttatatagcacaccctttcaagactggacttttatttattgattatacgtcatgaagtgaacagtgttacacttataattttatagctacactgtagagtaattcaatttttcttcccccaaccccaccccagctccccatctctgaagtgcatggtgattatggtgttgcaggtgggctctgggttgactagaagagctcttccccccaacaaaataaaactctctccccaaccctttctccatccctctttcttgctccctctctccttatcccctctctcaggatattgagtttccaagtatttagccaaaaatattttgggaagaaaagtgaacacacagaacagggacaaatgtggcatatctcagcatagtctcccagggtcctcaacttccctcaaatggaggatactgtacagagaagccattgacatggttttcacctagtagatttcagttcgatggaagaagctaaattcctacttgtcactgctttcatatactcaattttgctgaccctctggaggaacctgagttaataccgagatgaaatgcacagacaataacatatagattaatatacagatgaaaatctgtgtgattctgatactaaattttgactgagcacagttattacaaatttatttccgctagaatatgagttccatgacggcagggatttttgcctgttttgttcattgctttatctctgatacctggaacaatgcttgctacgttaggtggttaataaatattttctagttaaatgaattttcttacattctggattaaaactcacagctagcgaatttccaggctgctttgtagatgtatgcaaaaaaattgtaaactcggttatttgtgttcagattaatgattctggagccctagcacacaggaatagtaagcagcatgagatataatctaaggcaaacaaggcccaattccttagtatggtatataaggccctttacaaactggctccatcccactttactggttcttctacccctacacttatagtacagatgcagaaaattgtttgctgttctttaatttcattattcccttacacttgtctttgcccttgaacacacacttctctgtgctagaaatgctcttatccactttttaacctaccagaagtgcattcatcctttaagatgaaactcaaagtatcacttctctggagcctgtctcagtctttcaggcagagtgagtccctcactttgcttagactccacagccctttatgtatagatctatcacggcacttacttacctccttgtcctatcatcatttccatgtctgcaatagattgtcagcccttcgagggaagaggacgtatctttttccttctctctaatctgcctggatcctaccacagtgtctgtcacaccataggtgctccgtgagtgcttattgaataacatatggactgagggcatgaaaactaagggttgaagtgctctattaaaaattataggccaagtgccgtagcttatgtgtgtaatcccagcactttgggaggtggaggcaggaagatcacctgagctcaggagttcgacaacagcctgggcaacatagtaaggccccatctgtataaaaaattaaaaaattagccgggtgtggtggcacacacctgtagtcccagctacttgggagactgaggcagaaggatggcttaagcccacgaggtcaaagctgcagtgagctgtgatcgcaccactgcactccaaagcctgggtgacagagcaagaccctgtctcaaaaaaaaaaaaaattataatatataatttggcattagtcagggaagagaaagtataccaaacctagcttaactttttcagattcgctaacatactgctgtgctgttaggcaactggccaagaaatgagaacatttgaacaagaaagggggaaaaaacaaatggagctagaattctggaaaaggaagtgaaaacggccaaagtaattgatgctgaatatggggagggagagggtgacagacagtggatggacaaaaggaacagatctaccttaaattgtgcctaggagaaaccttggaaccagtgacaaagccaagtaactatgtcaaaagtgaacatttagccaagcatgtgttttgtcaatatactatcaaatcactatttggctctttgtgctttttccccccaaggtgatgatttggggaccaaatggagtcaactgttccaggcatcrtgtagactcatattacatctatcctgtatatcattaatgtccttgggcaatcctcatagattgttttacctgcacatccttccaaaatgtgtaaaaggaacatgcattcatgtatatagattgtccattgttttttaaatgcctgaaacattaatttgattgttcagattaagtgtttggggcaatgataataaggatttggataatataagtttccagttcaaaagcactaatgtcattgttgctgtttgcatttgctttctagctttgagaggttttggaaaatgcattttgcaagaattgcctgcagtgttagcactaaatgatagtgtggaggtaaagagaagcatgcctttatctaatttcatacctccttgataaatttcaaataaagaaaaatgttcctaaacattttaccataaactgtagaatattttcaactcaaagcctttctctgtgtactgtgatacgtgtaaaactctgaatgtagatcacagatataggcttagtctatttagcatgagatgataatactaccttgtaaacaggaactgcccccaaaatttgatctgattgcttcctctagttgggtgataacatgctgaagtaataccccaacacacatttctcagtgaatattattcctctcatctttgttaatgttgttaaataatttcaaaactctcctcaaggcagctgctctgtgctagggagctaaacacaagagaggccaatgttttcttttatttgtccgcctgcagacacagatgttgtttgtgttgtctggaagcacagaatatgctctaaaatatcattgttgttttcaatgagtcaaagtgacaagttgcgggtaaagtgaatccataagaattagtacagagtggaataatacttcaaaaggaggtacaaaaatgcattaaactcatatagaacaataagctattaatgatatatgcatagtttaagggtctatttttatattgtcagtgacaaaagaagtgcccattgtctcctggctgctatatccctcaaagtattttggcggctggctgtggaaatccagatggagacagcagtgaactgaatgaaacctgggagacaagaagcaggaagttctagcatccgccacattcacattgcacaaatgaggactaagctgtgaatttgaatgtgctgcttataatatgctgcatgaggtcattaggatggtgttaaaatggttccaagttagcattgccagttggtatctgtgtgactttggacaatttatttaatctgtcattgaatgttggttgctttatttgaaaaacaggactaataagctgggcacagtggctcaagcctgtaatcccagcactttgggaggccgaggcgggcatatcacctgaggtcaggagttcgagaccagcctggccaatatggcgaaaccacgtctctactaaaagtacaaaaattagccaagcatggtggcgggtgcctataatctcagctactcaggagcctgaggcaggagactcacttgaacccgggaggtggaggttgcagtgagccaagatcgcatcactgcactccagcctgggagacaagagcgagactccatctaaaaaaaaaaaaaaattggaataataacaacctttctctcagggctactctgaggattaaatgaaataatatatgtttcagggcttggtacatagaaaatgctaaattcatggaggtcaagctaccaaggaacatgcagttttacatattaaaaaagaggaagaagaaagtaaatccaaacattaatttagcatcttcttttttaaaaaaatttactttaagttctgagaacatgcacaygtatgtttattgcaacactatgtacaataggaaagacttggaaccaacccaaatgcccatcagtgatgggcactggataacgaaaatgtggtacatatatatcatggaatactatgtagccataaaaaaggatgagttcatgtcctttgcagggacatggatgaggctggaaaccatcatccttggcaaactaacacaggaacagaaaaccaaacactgtgtgttctcactcataagtgggagttgaacaatgagaacacatggacacagggaggggaacgtcatacactggggcctgtcaggaggtagggggctagaggagggagagcattagggcaaatacctaatgcatgcagggcttaaaacctaggtgacgggttgataggtgcagcaaaccaccatggcacatgtatacctatgtaacaaacctgcacatttggcacatgaacttaaagtaaaataaaatttaaaaaagaagatgctaaattcatgtttggatttactttcttctttttttgatatgtaaaactgcatgctttttgctagcttgacctccattcatttctgccccaggactagggaatgcgtgctttgaaatcagaactacctagaagtggttaaattaaaaatcttgtgcttagtcagttgcaagtgaattttctgataactgagataagttagttttccaacttccacagctaatagagaatggcctttctttctaaataaaagtttgtaatgataggactgtaatgtaaataccactctcaaaaataattgtgttggttcagatctactatacttcagaatgaggttgactgaccctgattataagagtatatgactactatgttagtgtttgcatataataacccattctgccattgactatatatgctatgccactaaagagtctttgtagaaattaatggtaaacaaagggtacattatcaacctcttattgttgagaagtagattctgagggttttttaaatartagggcttcatttgcgctgagttaaccatatcctctcatctagttcttggaaataaatgacatgcattcaaccagaatgaatagccaggattatgagagaaatttgtagctatgggacaaaacaaaggcaactagactgttaaggtggaaatggcaaatgtgtcaccgatatcattgagtctacctaatctgtcatggtactttatcattgagcccagattggcccatgaatctttcctgccagattaggaataaacctcatttgttggtcatgtttgcattagtctgtaccaatctagccattcaggattttggtatccagaatttaagcccttcggattcccctggagtaaaagtaaaatggcagacaagttgagagaaattgatctgtccatttccctcattgatgacagtgtgtgaacacagattggtttttctgttttatcagccttgctgctttgtttcattgttcccagtgttcttcttggccatttaaattaggcaagcagagtacattcttgtcttccccctgtattttctagaaacatctttattgaggtaaaattgacatacaataaactatatatagagtatacgagttggtaaattttacatatgtatatatccatgaaaacatcaccacaatcatcacagtgaacctacctaccacccctaaaagtttcctttcactgctttataatgcctatatcctccactccccacacaccccagtccaggcaactactgatctgctttccctcactatatattagtttgcattttctggatacttacatacctggaagcacacagtatgtagactttttatttggcctctttaactcagcataattatcttgatatttgtttatgtcgttatattatttatattaatagatcattcctttttatgtctcagtagtattccattgtatggatgtaccagagtttgcattcatttgcctattgatgttctttatttccagctttggctcttacaaataaagcttctatgagcatttgtgtacaaatctttgtaaggacatgtgattttatttatctttggtaaatattgagggttggaatagttagatcatatggtaagtgtacatataactttataagacatgaagatatctagggccaacattgctctgcacccacctaacaaagcttaatagcaagacccaaaaggataaaaatgttgccaagtaatttaagcacacactagaacaaagctttatacgcaaatatatacagacagtccccaacttacaatggttcaacttataatgattcaacttaatttttttttactttatgatggtttaaaagcaatacacattcagcagaaaaaatactttgagtacccatacaaccattctgtttttcatttttggtatagcattctataaattacatgagatagtcagcactttattataaagatagcctctgtgttagatgcttttgctcatctgtaagctaatgtaagtgttctgagcacatttaaggtaggctagactaagttatgatgttcagtggattaggtgtattaaaggcatttttgacttacaatattttcaggttacaatgggtttatcagaatgttaccccattgtaagtcgaggaacatctatctatgaattcaaaatctgttttgagtattctattcaatgcccatgaattatgaggttttccactgtggatgttggaaacagtgactatttccagccctgtttcagattcagaagttgtttcttttattcctttctgatggctctttctccattctcagatggttttcttgcacgcatgtgctgtccagagtgcaggtgaatatgcaggggggaccctctgaagatctatggaattctttttctgtgcagttctctcctctctggtactccgtactgcaaactctagctatcttggccttcccgcactaccagcttagtcttctcaactcaaagagactaccaggctctacctgtgatccccctccttgtcctgaggcctggaaactcttacagggtttacctaatttgtttctcatatctcagggattgttgtccttcattatctgttgtccaatgcctgaaaactgttgtttcatacattttgtgtggctttcgttgttgtcatttaaggcaggagaataaatttggttgctgtcactccatcttgtttgcaagtggaagtcttctccagaatttaatgttttcctctgaatggaattcaaatttgcaagttcctgatgagtgtccaaaaagttattttctcaatctttcccaacttagaaaatttattcattcattcattcatttatttatttatttatgatgaggtctcacactgtcacctaggcttgagtaacagtggtgcagcctcaaactcaggggctcaagtgatcctcccagtctctcaagtagctgggactacaagcacatgccaccacacctggctaattttttttttaattgagacagagtctcactttgttactcagcctggtttcaaactcctggctcaagcaatcctcccaccttggcttcccaaagtggtgggattatagtcaagagccacccacatccagccagaatttcttttttctatccctgacttattttttttagtaacattctctgagttcctgaaaacaggctgtcagaagagctacatacccactccagggcattctacaaacttactgagatgataaattctatctgggatatggcatgaaactggttgatgagaatgacaaaagaagtttctattcaagccagcttaaagatggtcttttaccaaggctttgtgactagtttcagtaaaatttccccagttctacaccctagagtacatttctgaagaattttaacaggcaattatttcccagttcattatgccaaaaagtatagtgtagaaagcttcctttgtgtgactatttcagtcagaagatgatactgagtacttgttctccattagtctaatattataaattgtattttcctgaattcacagccagtgggctgctgtctttctcctcttgccaaatttgtggaacatctgttatttgaaacagacagctaatttaccaaaataacaatttttcaatttgcattggtaggcattgttttatgttaagctaaaccacctcaaatgtgtcagaattgggttcaagttgttaaccctttcaagagtggttccatgttaactactaatttttaaactttggtgtttagggtcactctttgcctagaagtagtctaagttctgaggggatggcaataccaccttagaatgtaatttattctgtagttgatgatggacgctgactctgttgtaccattctatcttggcatctttactcattcatcacaaagtaaatgcttacagagaagtatagaatgttacagaaataatattgcttgcctctatgagtatgtatttgaagcactcacaagtgtttttaatggttatttaactctagctcattgatctcacttctctagatagaattgtgcagcagattgatgtagtttaaaatttcagacacacacacacacgcacacacacacgcacccattgaccaaaaagctgcacatacttagtgaacataatggaaatacacaagtatacctggaagaccacaatgggcaacaaggattcaggttccaacgagttatgaccagccagaaaattgggccagcacatgtaagaaatgagaaatttttagggccattgagcaccatgcattttcagtgttcagtagccctgaaaatttctcatttaggccaggaagtctctgtctcattcaaaatgttgaaataaagggaacatgcacaggttctcattgatctaaatttctgttgaagtccaggacctcccaccatcttttctagtccctgattctttttccagactcttattacaaatattgtagagcaagcatccaatttttgtcattgtagtggtaactgctgagttagcttcaaaacaagtgctcccatcttatgtgaatacagtctaaatggagccgttcactaaggtgaaaattagtttaaggaaatagttagcatttgcttattcccacatcaaattttcttcctcttcttagattgctgaaggatattttaatctctctctaaatatgattggagttgttttgatttcttccaggtttctacctcgtcttctttccttttgagtcctgatacaattctgtgtcctctgatttgagccatttttacagatttttaattcattgtactcctgagagcatcctttttttgatattaacatagccttttaactgcattctgggatgtctccagttagctaatattggtcacaaagcatgaatgtttctacttcaggcttttaactctgcccagatttgttgccatgcttttccgtatactgacagatggagaaatcttgaaaattaaataaggcataattagtaggtcctgagtgccgagataatgggtgcatttggaactgtcaaggggagattaggctccaggaagcttagttattttatttaagtcmtcttataaccacaggctccagtcttgcacatgggagcattccatctctcactcctgtgccccagaaaaagctgatgagccctcagcagaaaaataaaagtcaggtttagacaatgtgcctttattaccttgttatcattaggggcttaaaaaggctctgtgtggaacttcccaaaggacatgacaaggtcctgttaactcactctgctcactgcctagtatagcactgtacatttgataaaacattttcatgaagaaaggaggaarttaaattgaactaattttctaagactaagagaaatcagaggagactattttgttttgatttctttactttaaattgagtgggtgttcagtgaagctgtgtttaagtaaatttacttgaactgatttggttgacaatttgataccgttttctttttaaagccctcaaactgagaaatagaaaatggtacccagtagtgaaaattatttgcctcttatctggtgttacttacttctttgtctctgtatttcttgcttaagattgtaataatccattgcatttttccctggagccagtaatgaattattagtgggtcagtaatatttttaattgtgtgaattttattcattatgtttccaatagccatgttgtaaatggatacttttatatttgatgagtaacaatttactcagttgctttttacattttaagttgtagattctctgtttctctatcaataatcttgcaattcatagtaggtacataggctgtatcaatactttaatatagcaggaattataattatggcacaagatcttatttaactaatatgtactatatccttcacaaagaagtataaatggctccttgattcatgaaactactaactcttttcccatttgaacacattgaccattacatatgttggataacaggttcgggttataattatagaattttagaacaaggcagttacgtagagatttatttctagttggatccatacatcttacaaatgagaaaactagcccccaaaatgttaagtgacttatccaaaaaccaaatggataattaataacacttgcttctgcatgtaatctataagggttgttatgagtcacagtaattaaactaataattctatcccctcccccctctcctttattttggaaatgggctatactctttaaaagttatatcccaaatttctcaggtcatggttaaaattaatcacacttcttgacttccaattacttatttggagcataatgccttaaagctcactttttagaggaagcatggggaggtagaattttagaaaaaatagtcttgagcttatcagaaacacagaaattggccrggtatggtggctaatacttgtaatgcttgagtccaggagttcaagaccagcctgggcaacactggggggagctcttctctacaaataattttaaaattatctgtgtgtggtggtgcatgcctgtagtcccagctactcaagaggctgaggtgggaggaggatcacctgaacctgggaggtcgaggctgcagtragccaagatcgtgccactgcactccagcctgagtgacagagtgaaaccctgtctcaaacaaacaaaacaaaacacagaaatggcatttctagaaaaacactgatacrgatagctataactttccttctcaagttttgataaatggcttctttaggctgaacacctgatgatcaacccctagattcagaaagtagagtcatttatttttttttcagtgcttcatagcatttaaaaaaaaattattaatttgttagcattagtagatgtctaaggtggtcctatgtgccagaccagctmtactcaatctcatgatcctcaaccataaatgtttccctagctgctgaaagcttagcagtgatgagtttcatccttagtttccctcctaaatttgatgttcaactcttatgtgtctaggacaaaagtacaccctagaagatcactgagaaatcatgcatcagtcgggcatagtggctcatgcctgtaatcccagtactttgggaggctgaagcagatggatcgcctgaggtcaggagttcgagaccagcctggccaacatggtgaaaccccgtctctactaaaaatacaaaaattagctgggcatggtggcaggcacctgtaatcccagctacttgggagggtgaggcaggagaatcacttgaacccgggaagtggaggttgcagtgagccgagaccacaccattgtgctccagcctgaacaacaagagcaaaactcaatctcaagaaaaaaaaaaaaaagaagaagaagaagaaagaaagaaaaaataaatcatgcatcagttagtcttcatggcctcttggcttagatataagcaagatgacattttgactacctttttgttcgtgttacatttactttattccactagagagaaaagagcaagacctccttctagctgtgaaaattgattcaaaagtctccttgttgttttaatatctggtggtgtacaatcaactaaaaatctttgtaggggtataattgaagtataataaactacacttactacgtatacttaaggtgtgcaatatgataaactttggcatgtatacacctgtgaaactatcaccacaatcaaggtaacggacatttagatcaccccaaagtttttttgtgtcccttgttatccatctctccctccacccttttccccaggcaaccacgtattggctttatgtcacagtagattagtctgaattttctagaattttatataaatggaagcataccatatgtagatttttgtctgtcttctttcacttagcagagtcattttgaagtccataacattgttatgcatcaatagtccattcctttttaggactgagtaatattccattatgtaaatataccacaggtggattatccattcatgtgttcatagatacttgggacatttgtactttttagctatttttgaataaagctggtatgaacaactttgtacagttttggacagaagttttcatttctttgtgataaatgtccaagagtccaattgctcttttggtaagtatggctttaacttttcagaaaactgccacacttttttcttatgtggttgcacagttttactttctcaccaccagtgtatgagaattgcaattgctccacattctttctcaacacttcttgtgggcagaattttttttagccatagtagtgggtatgtagtggtatctcattgtggctttagtttgcattttcmtggtaacagtgatgttgagcatcttttcatttgcttattggccacctctattgtttgttgtgaagtgtctctttaaactttttgcccacttaaaaaattgaatttcaaccattgcggaaagcagtagggcaataccttaaagagctagaagcagaactaccattcgacccagcaatcccattactggttatatactcagaggaatataaatcattctaccataaagacgtatgcactcagatgttcattgcagcactattcataatagcaaagacatggaatcaacctaaatgcccatcaatgacagattggataaagaaaatgtggtacagactaggtgtggtggctcacacctgtaatcccagcattttgaaaggccaaggcaggaagatcgcttgagtccaggagttcgagaccaacctgggcaacatgaagaaaccctatctctataaaaaatatgaaaaattagccaggtgtgatggcatgtgcctgtaatcccagctactcaggaggcagaggtgggagaatcacctgagcccagaagtcagggctgcagtgagccctgatcacgctgctgaactttatcttctctagagaatatgtagtactttaggtaacaaggttatatgtacaaggctagaaaacaactacttgtggtgcgttgtaagtgctttatagataatgcatcttttgggaattttgagcaccaccaagacgtttgtgtatttaggaaaatattttacaatggtgacattgatttcaagaaaaggaaatgaggcatttcaataaacatcggttactataagtaagtgaaactttttctcttttctttttttatgctttaccacttaaaaaagaagagcaactgatagctaatttggattgttactttttctaattatagattgacaagaaagtgtacttttatctgactgtatttaattagagaatttatgagtcagtctttgtaggcaaagcaggatatagttacaatagaaaataaattgtttattctatgtaatttttaatcagattacacagcattttcttagaagggagcaaatccatgttctaatttccttttgaatgggaaaaatatctctttaataaaaaagaaatctgcttacatctgtcagtgctttttaaaaaactttatctggtgttttattaatctggaatgacaaattggacctacatttatttttatttgctcaaccttttccaacgaatgccatgactcagatgctcatattaaaatctttggaaagccacatctcatatgccgttgtatgagtgaaactaaatgcaagtctgtgctcttggaagtaaattttctagttagtgccctgaatccaggggaaataaatggagacacttcacagcaattcagagcaaaaactccctttcttgtatctttaaacagaattaaagatgatgcagcaaaatctgtggtaatgccatgataagtttgcaccctcactactacccattccctggatcccatccacttcaagtaaatctctagggcagtcgatttcaaagtatgatccctggaccaacagcatgggtctcaccagggaagtcattcgaaatgcagattctttggccctactccacacctgctgaatcagaaacttaaattggaaggcacggatgggagtggggtgcagcaatctatgttttaacaagccttctaggtgattctgaagcagccaagtttgagagccactgttctaggggagtgaagtaagttgttacagacctatataaaattcatttcttgcagcttcaagctgaaaggtttattaccaggttgctgtagcaacaactgcacagtaggattggataatgaaacattgtgaaattaagaggcatgaatattagctgatcccaatattctagattgctaaaatttatattgggcaaaatggatttttacttttagccttatggcaggaagaagcatggtttcataaaatgttatgtttgacaagtggaaaccacgactattttttgaatactactcctttggaatttagccaagtttttgtagaaaaagggaattactcttaaatacattcatcatggaaatcaaaaggtaacatactcagcagtgacttataaccctgaaagagttaatttttaattgaatatttctaatacattatagtagctttatttgcctactatatgtttcacaaagcacagtgctatgcacctagtggtattaagtaaacaataagaattttttgttaaacccttatttggtaattatatgccccaaaaatagttattttaaaaatatattcatattctgcttgctttcctctagtgtatggtctaaaatccagtactttctgtattcagagaattaaattcatgttagagtttgcattttattgatatgtgctaaggattagatgcactcagttaagctccttcccagccaaatgacatatcctgtctctgatgtcagtctgagaaaatcctgtatggtgtactacatctccggattaccttatctaagtattacatggacatttcagatgatatgtcttggcatgtggtcatttttcattaacttattagcaattgttaaatcatcttttcccctttttgacaccttgctataactgaatgtaaaattgactgtaagactgaatgcctgatattcatgcagtaagttgatggggcatcgttgttgtataccagaaaccatgcctacatgggtgttttaggaaaaagggctctgttgctatctgatgtgagctatgaaaaaataatatctatcctctggagtttattttcctcaactataaaaagaaggaattcgttgcatcatctttaaggttctgaaaattttataactstaagatctagggggaaaggagaggaaatccaatccatgaaccactgccaaggtacaatatatgactaaatttttgtgtgtatttattggaaaaaaatgaattacatagaataattagcataaagtcagccttgaactccgttaaaatcaatggaaaataatgatattaggtactgatgatttagagtttaaattaacatgttttaggaaaaatactttagaaaagtgcatttgaacttaatgcttttttctcagagttttcacattgaattatttattcttaaatccaatgtgtatggaatacttagaaaagcaaatcattttaatattttaagcataggtacactctgcagatcatatatattcttcctagaaaagaaatatcttttaaaggacacctctctacactttatactcctctgcactcacttatttcattacattttgtgaaacctaaaattgtagctatagaactattttgggcgcgctttttccagaaccttgtaagaatcaacaggagcataattttaagctacagaagtgcaaaataagcacagagtcctagctaccatgaataaaaggccagaattctaacttgcaaaaacacgtaattactaccaatgggggagaggggaatgagaacaaaaagtagaattttctgggggatttcttcatacttctaaacgttttctctgaactttgtttcttctcagagatggaattctgtgaaacctctcacactctgtgctctggctaccaaacagacatgcacagygtttctcggcatggctaccagctagagatgggatctgatgtggacacrgagacagaaggtgctgcctcacctgaccatgcactaagaatgtggataaggggaatgaaatcagagcatagttcctgtttgtccagccgggccaactctgcattatccttgactgacactgaccatgaaaggaagtctgatggggaaaatggtaataaactacttgaattgtttaagtaaaacacagaaagaatgcagtttttagcctttgctttgttctccttccctatatctgcccttctttcatttaatatgcagaatggaaatacaagttagcagggactcatggacaaggcatgcacctaagtatctggcaaatagacatttatttataataacagacaaaatacttttcattttcggtgagcccccaagggaaataatctcatgtaatccataatatcgtgcatgttttgtttattactcaccttttattttcatctttattttccacggcaatactagtagaatttattatagaatgtccaaatttcatgtattttggctttatatcaataaatgaacagtgagatgaacagttgtgtagcaagcatattctgtatgtgcttactatttggattcagattaacctgttgaatgtacaaacgcaaattaaccaggttggactgaagtggtttaaaaaaccagaaggtgaatgaacatcatccatttgcttgacaataaggactagcagcagtatcattatgtcrtaatcatatatgattttcttgcaacttttataaaaggaaaattttgtctttttgatttgttggaaaggggttaatttattttatttctgttcttttgctcctaccagagaacaaaatcttttcataaaaagcacattactgcttattaaacacattagtctctccatcattctgtttgtgtacattttataagtccccattaccatgaccacaaggcttactctgttaacagtggtaattagtactttttcaggtggcagagagatagccagctgccctgtacctgcagtttgttttttctattttgtcctcttctgcctcctttaatccaaaggtgatactggccatataatcaggaattagaggttgcctactagttagaatatcacgtcctaaatagtagaccataacactttacaatatcaccaagtatccttggggtcttgattttttttagattattttcatatatgtatgtgttcatgtatgcattgttgactttggccaagagtataggaagtaacgtacggaaatgagargggaacatatttgacatatgtagcatattcatgtaagtgaaaggcattaggatagaagttaggagacctttgactggtcactacagttttctgggtttcgtctttcagttgggaaaaacaatgatcaaaattatatgaaatggggtggtaggtgatctcttatattggcaagacatcttctccttcatctcactctggacatattcactgggttgaaacattaaaatgaaagaagtttccccactgggctctgctattcttctacctttgcaagtctcttgttatgaggtatcttttggggtgatgaaaatattctagacttagatagatgtgatggttgtgcaactctgcaaaaatactaaaaaccactgaattgtatgctttaaaaggatgaatattacatatgtgaattatattgcaataaagctgggttttttttaagcaccactagatgaagggtaagggttgaagtttgaggaattgcagatgacttggacaaggcttaactagtraaatgtttactgttacaggtttcaaattctctcctgtttgttgtgacatggaggctcaagctgggtctactcaaggcaagtgttttcaaatatttgatcacaaattatttttacttcaccccatccctggcaccctacccccacaaaatggaaccctgcttctctgacaaacaacatacaagcctgctcaatgaacctgtcagagaatacagtggcagcttatttgtttgttttcttcttgaaaatttcatgtgaaaatgttggtggtgaagaggaggtgaagggggagctagggagaaggataaaacaggattccaggtaggatgagaaaacatttatttamcctgggaggagagactgaaatcaggttgggttggatttggcttcatgactttctacaaatctaccatgttttacatggctctcataattaactcagtatagtttaggtattgtcataactttcagatgttgcctagcagttggccttggtctcttcctccaggtgttcatgcttggctttagcatcacactttatccatgtcatcaatcataaataacactttcaaatgaaaaaaaaatgttcattctcttctgtaaacctatatttacactgtgtcattccttagtaagggggcattggtgtatatttttacttttgccttcattgtgttcattgggttttgcccctttggagagggatactactgaaagtaacatttataaatggttttcacaactgggcctgtgctgggcccttctctaacacctcgtggtagggtccaagcatcccaccacagggcagtgactcaaaaatgggatgaaactagtatataaggatttagaacagtgtttttaacatgtaggaagaatatgaatgttcactgttattattggattagcatttcaaaatttccaaacacacttttcatatctttatcccatttcatccttatgaccactctgtgaaacaaattctattatttccattttacatatgaggaagtattaaaacagcaattcagaaacaatctagttgaatgcaatggattattttccaagtatgctttgctttctcctttggatcatgtgtgtatgcaatatgtaaacttgaacaacttttccctgctctgttctgtatgtcttactttgactcctactaataktttcaataaggagtatataatttgggtccttatttatcacctatggtaagattttaccaatgtggattccacagattttaattgatgacaaccatgcctggcctgccttcagcatttccatagatccttgaggagttggtttgagttaasataagagtgtaaatggcttttccaaaagcatgttaatttgaggaaacaagttatttccaatgaatgaacttggtgtttgtgtggaaatgttgctatttatttcccattgactttatccattcatgaaagcatgcttatcaaggcatctattttattaatttgagtttatacatgttatatctgaaaaagtaaaactacttagaatattttttatgtatatgttttgctacctcagactccatgccagcccatccctgtggctcaattaatgttaatgacattttgttttgtttctgtcttcatatactttctgaattttagattatcgatgaggcagtgggcatgatatcatggatcagcttaggaacatttgagcctcacttgctctgaatgttagaaaaagtgaagatggaggaaattgttaatttaggtgaattgtccaactgagaaatattctgagaagtaatttcaaagatgcttactattctattcatcctaggagaatattactttggttttctacttacatttccaaaatcatgtttataaggacttgtttcttttatttcattaattggccaagcctttcagaatttttttcctcatttccttaactctgtttggttgcccttaattgaatttatgtctctgacattttataactcatgaaggattataagaaataacccttaatttcaacactaaaacacttgaacttaaaggcctgaagtactggaagggaaatcatcaggtgacagaaggggatctggagcctttcacaggggtatcagagcactaatgcattatgtttccattctctcaaatttgtcctaagtaaacccttcatcatctgttgatgctgaattgtctgtcaagaaagatgcagattcattcaagttagcttcattctgggacctgtgaacagtcaatacctaggtgatactttgatatcaaccatcatgctttattctatgtcatttttattcccatttcaccttactaacaacattactactcttcatagactaatactagagttgtgtattttatatcctaacaatcattgttaataagcactagactggaagctacttgaagaaagggtctaatttattcacttttgtagcttcagtacttagcaaggggacctagagcacagtaggcactaaataaatgaaaaatatgcattgttctaagggtaaaatatattttttgttgatcttgtcttgtgtgactctcataaggataaaagtgctacagtgtgtcagacctctggtcatctaatatacaactctgtctctgacaggtgatctaatggtcatttaatttttttatctttagttatgggtacataataggtgtacatatttatgggtacatgtgatttttttttttttttgacagagtcttgctctgtagccaggctggagtgcagtggtgcgatcgtggctcactgcaacctctgcctcctgggttcaaatgattctcctgcctcagcctcccaagtaactgggactacaggtgcacaccaccacatccagctaactttcgtatttttagtttagacaaggtttcaccacgttggccaggatggtctcaatctcttgacctcgtgatctgcctgcctcggcctcccaaagtgctggggttacaacatgtgatgttttgatacaggcatacaatgtgtaatcagggtaattagggtatccatcacctcaagcatttatcatttctttgttaggaacattcctattccaatattttagttattttaaaatatatgatgttaacattgactacagtcaccctgttgtgctatcaaatgctagatcttattcattctatcttactatatttttgcacctattaaccttccccaccttttcccccacttccctctacccttttcagcccctggtaaccatccttctactctctatctccgtaagtacaattgttttgatttttagttcccacaaatcagtaagaagatgacgtttgtctttctgtgcctgacttatttcacttgacataatatcttccaattccattcatgttgttgcaaatgacaagatttcattcttttaatggctgaataatattatattatgtatatgtactacgttttctttatctattcatctgttgatggacatttaggttgcttccatgtcttggctattgtaaatagtgctatgatatgtttcctttcttttgcatgtatacatagtagtgggattgctagagcatatggtagttctatttttagttttttttagggtacctccatactgctcttcatggtgactgtactaaattacattcccaccgacagtatataagtgttcccatttctccacatccttgccagcatttgttattgcctgtcttttgggtaaaagccattgtaactggggtgagatgctatctcattgtagttttgatttgcaggtctctgatggttaatgatgttgagcattttgtcatatacctgttggccattcatgtgtcttcttctgagaaatgtctattcttttgcccattttaaaatcagattatttaatttttgtttcctattgagttgtttgagcttcttatacattctggtattaatcccttgtcagatgggtagtttgcaaatattttctcccatctttactttctaataagcatttcttagaagactttgacagtcctacttaagtatcaacctcagtgattagggtacccctcagcagttacatttggctacacattgaactggaggaaaaaacagtatcaacagctaaatttgaataatcaatttccaagaatgtgtttttcacatgtggcctgaatggaacagttgaactataaaatgtgaaaataaaaattgtttatcaagaagctaaatggaaacacattttctaggtagtgaaaaagtattgtaatctttaataaaatataaattgcaaataaattatttatagttatagccttgatgataatgatatttctgttcaagaaatatttattaagcaccttctctttgccaaactgtgtactagagattgggaatatatgaaagatgaataacacacattccccaatgtcaaggaatttaccgtctactgggagagattgatgccytattagttaagatcgcctattatgggtaacaggaatcaacttgagctagcttaaactgaaaacaattgtattaaaagtacataagaatacaaggtgactgtagtcagtaatagtctgattgtacattttaatataactaaaatagtgaaatatgatcagttgtaatacaaaggataaatgcttgagaggatggatacctcattttatatgatgtgattaatatgcattgcaggcctatatcaaaacatctcatgtaccccataartatatatacctactaggtacccacaagaaatacaatttaaaaaaataaagtacgtgagaatgctccattggactcagggcaagagtgtggctataccacaagaagggacttgttgcagtcccttaacaattctcagaagaattgttaagaccttgctttttgttttgaaacccatctccttcaacactgtctctgcaggttgagtttctctaagtttccatctacaggacaggtataaaaaccccataccccataaaaccttagttcatatttcttctattcaggaaagaagctaagattaaccagattttttttagtgccatttctaaattccaaggagacagaataattttctcaacttgagtcagctgtctaccactggtctcatcagctacaatgaggggtaaggtcagtaatacaaatgttgctttctggaagcctacccaattgattctcgaagcaattcccaatgcagggctgtcagtgtcaaatggatatgtatacccaaagaggtctactagagaggattgaaagctaattttaatacactttagttaataccatgataaagatacggtagcttgctctgagagcacaagggatgtgaaaccatttagtaacgtaaaagtggtaatattaatacaatataaataaacaacgttttctgtatagtaagtggttaagaataaccacgatgtaagacagacctaggtttttgcactagttctgccatttacctgctatatgtccttggacaggtaactaaagatctccaagtcttagtttctttatctgtcaaatggtgactgcaaagtcttgggagtttttgtggtgaggattaaatgagaaaatggatatatagcactttacagtgtgtctgttaaaatgaaatgctctataaatgtcagttgtggttgttgtttatcactattaatttattatgcacgtattatgggacagatgctatcaggtaaggtacctgttatcacgtattagacaaagaggcagcatagcttctgaaacacctaatatcccagggaactctttagcctagcagaacccagcctactttctgctcattttaaagtaggtaaaaatccttgcacttgtcttattttaaataatacaacattttattaataggcaacaaccttgttctgctaaacttagaagactgtgagaggaagttccctgaggcacttcagacctggctgcaggttaacttgtgctgttgtatttcccgttgtcattgtagtaaccctttaagggagaggtgggattttaattagtactcagaagtcctgttgatttccttgactgttgggcggctgagctccctatgttgttctgttcagcaactttacaggtaagggaatatctgatacaatctcataacagccaagaaatccattagtactgctccctgttgcttctgtactgcataccacagaacctaagtagtgcggtatgtgctaccaataaacataccatcatagccatgcatatgctgttctcagaccctaaattcattcaaggaaaccgctggagttgtgaaaaaaatggctagcctaatgcctgggtttcttgaatgacatgtaatagttatacccaaatgatgagttatttcttctgatatttgaccatgtacatttgatggagggaatttgtttgtttgttttccatttctttcctttgctttttttttgttttcccctggtagtgtaagttatataggacccttacatagcagtgataacaattcctcagaaaccatctgattgctaaaggaagtgtatgaaacaatgcaatgacttggtaatagcttcagcaggagccctgccatataactgacatcctaatggctctgttggacccattaggcgtgtgtgagacagtgcagttgactctgtaacagctcctttggagatgttacactatcagaggaagtgtggaagtgattgggattactttatgtgtgggtgagacacttctgtggtgactgtgatattcaaaattaaaaaccactttgatgatactgaatttcaagccattatcaaggtagatataacaagctcatattttctttttcagtaggtaattttagctactattatctttatgttaaagtaatattggccagtgatttaaaaattaatagtaaaaacaggtttaaagtgaataaagtgtatcatccccctccctctccatccttcaggtttcactcttgagacacagtcaggttaataatgtattatatataattccccaaattttccacgcatgtacaaatgggatcacatactacaaaaagtctcataattttttccagttcatattatcttggatatttccccatatttgtagtacaaatctgcctcgtcatttttaatgactgcataggattctgtttatatatgtgttattttttttagccagtcccttgttgatggacatctagatttccagtgttttgatattaaaaacagtgctgcacttaatatccttgtacacatcttttacacacctcttgtataatttattagaagtagaaatgatgggttgaaaatatatgcatttaatgtttgtttagatattaccaaatttcccccttaaaaaagacctaccaatttatttacctactaaagctatataaaagtgcctgttttcccatatacttatcaacactggcaatgatgagaaagatttctaatacccaatctgcaatatgaaatacagtatttcttcttgctattatttgttctatttatgggtgaccttggtcatctttttaatgttaatggcccatttccatctcttctctcaatttcctgttgacatactttgcccactttcccatatgaatttttatattttcttattagttctctagagtacttcctatattaagggtaaaaaaaaaaaaaaaaaaaaaccttcactacatattatgcatttttcctagtgtgatatttgtctttttaagtaggtgcattgtgtgtgtgttgtgtgtgtgtgtatatgataagatttacatttttaagtggtaaaagtcaactatttgtactttatagctggkggatctctctctctctctctctctctctctctctctmtatatatatatatatatatatatatatgtatatgtttttgctagcagtactataatttccacaatttgaaaaataaattgcttaaaaatttaatttaaaaacagaatataaatatctacacataaataataaatgtgaatgtatggtatgcatatgtgtaatatataatacatacatatggatatatttacatgaaagcaaacttgaatgtagaagttaaatacagtacaaataacgtagctattaaaattaattagtattttagaagttagtctttggagttgatcttgatatattatttactctcttacttctttagtatattactgtgaaagaagccaaaakgagttaaagtgctcttatcaacagagttttaaaaaagagcttagaaaatgaaggaaaaaaatatggctgagcctatattcaccagaaataaaatgacaacattgtcatctgaatttgaaaataatgtttcaattgccatagttaggacttatgcttttggttgttcttttctggtttgggaatgggctcatgttaagtcattcgtgttaccttgcactgtccatcttttcacttttgatagatattcatgagattgctggtcagagttaattttttgggtaggtatttaaagtggaatgcagaatagctcacaatttgaatgtgtgcagttgaatttkttttcatatatcctagttgatcattttttgaaataattgaaataatatctttagagaaaaggggaatcatcttggctacttcagaggcaagttgactatcttttcagtagtttttttgttataaaagtaatattttttaataaatagattattaaagaaaattgggaaattactgaaaaacaggaaaaaatccttaaggttctctccaaaataaaatattagtcatattctctcatgaattagcatcttacctttttctttccgtgcatcatgtgtccttatcaggatccatacaacctgatatttcacttaaattaaaatgtgagcaatttccaatattactaagtcttaattaaatgttattttaaatatattaattaggtagatgtaacataattaactatacactatttttgaatattaacatttccagtatttcactagagcaaaaagactaaaatagacatctttgtaatcaaagataggtctctttctgatctattcattattagtagagttctacaaataaaattactgggttctaaaatattttcattaaagttcaagatatatattatcaaattatatcaagattcatactcccccattagtaaagcatgatagtggccattttagtgtaccctcactgatactagataatttactttaaaatatttttcaccaatttgaaatgtgaaaaatataactacagtcatgtgctgtataagagtgttttggtcaatgacagaccatatatatgagaatggtcccataatataataataccatatttttactgtaccttttctacatttagatatatttagatgcataaatacttagcattgtgttataattgcctacaatattcggtgaagtattaataacatgcttacaggtttgtagcctagcaacaataggctacacctatggcctaggtgtgtagtaggctataccatccaggtttgtgtaagtacaatctgtgatgtttgcacaatgacaaaatcccctaacgacacatttctcaaattgtatccgtgtcgttaagaaatgcatgactgtatgttgtttaaaattacatgtcattagagagagaaaggaagctagctgactagaggcatctggtacttacctcctccacaaagaagaaccaaaatagctagtaatcacacttcaaatacatcatctatgggagaatgctagaattcagcaaagaagtgacaggaagtacctaaggcaaggaaaaagagggaagcaaggcagcctgctcagctggaatgggctggggacctggaaaagatccccaatatgatgaaaggataagtgagagaccccagcagtctcactgtgaactcctgcagtcctagctatggagaacccttgatccatgtgggccctgagactaacatagggaatatgcctggagattatgtgacggcattgctccagagagagatgtcacattgggtctcaccccccacccacccccaaatcctaaacagctacagcatgacaccattttgagagctcggtctccaatagacagcatcctgccctgggggtcaacatcctctgcctctacacatccctggagtacaatgaacatcctctgcctacagccaccaccgcagctggctgctgctaccagggtcaaagtatgagccattggaagcaaccccactgcccccagcagtggagcctcttgcatttgcaagcaccctaatgacaggctaccctgctgtagctactacccagggcaaaagtgcacactccctacctgcctgacaattgctgctgccactgaaaacaacctgtggctccctgatatcagggacacagtgcagccactgatacccctacccaagcattccaccagaggtctgggatcaccctacccctgccgaccacagtcagcacctgcatgcaccacaagaggaggcccttaatacagatctgcctggcccagcaccaccactaccagtgtccaagctcattgtccaggagagtgaggattgcctgctcagtccaccagtgttgacaactgagcactcctcccagaagcctcaagttgggccaacacaaccagttgataccaccaaagcttgtacccgtcagcatgcaccacctacagacctgggaattggcctgtccaacctgccacagccactgccaacacaagcacagatcacttggaaaatagaaggttgtcttgtcactgctactgctactgtccatgccacacctgctggccagcagcccaagggcccacccactcacttggtccactgctgcaattgccagcacttgagcaagctttctggaaacccaatgatcaacctgcctggacccactaagactggtgccagcatgcactgccttgaatgggcccaagaacaggcacacttggcctgccactgccaccactgcagctcaaggaggggcccagctggcatcctcatctgcagcaaaactttgctttagccttcactaaaaactgcacactaagccactgaggacatcatagacactactgatgttgtttacagctaaaggagtcacacagagatgacactacggcacggcacccagaagcaaagcaaaaattttctacccaaccaacatataggtatgtgttcaggaaaaagtcctcccctaccaaagcaaatacaaaaaaattagaaggagcaactgttatacctgatgcacaaatatcaatgttaaggacaaaagaaacattaaaaagcaagaaaatatgatacctcaaaagaacacaataattatctatcaacagattctaatgaaaaaataatttatgaaatcctgggaaaawaatgatattaaattcagtgagacaaaaaattaaattaaattaaaaacccaggaatacagctaaacaaggaggtgaaagatctctacaatgagaattaaaaacactgctgaaagaaatcagagatgacacaaacaaatggaaaaatgttccatgctcatggataggaagaatcaatattgttaaaatggccatactgcccaaagcagttttacagattcagtgctgttcctgtcaaactaccaatgacatgtttcacagaattaggaaaaaaactatgccaaaatttatatggaaccaaaaaagagccagagtagccaaagcaatcctaatgaagctggaggcatcacattactcatatcagagaaaatagatttatgtcaaaaatactaaaaatagacaaaaatgtcatcatataatgataaagcaatcactttagcgagaattatgtaacaattctaaacatatatgccgccaataccaaagcactcagatgtataaagcaaatattattagacctaagaagggagatagactacatagattaatagttgatagactacatatgttaatagttgacttagacaccccactctcagcattagacagatcatctagagagaaaattaacaaagaaacatgggacttaaacttccctttacaccaaataggcctaacagacatctacagaacatttcatccaacagatacagaatacacattcttcttatcagcacatgtaacattctccaggatagaccacatgttaggacacaaaacacgactcaacaagtttttaaaaatcaacatcatatcaagtatcttcttatactacartggaattaaactagaaatcagtaacaaaaggaactttggaaattgtacaaatatatggaaattaaatatcctccttaatgaccattgagtcaaacaagaaattaaggaggaaattttaaaaaatctcttcacacaaatgaaaactaaaacacaatatagcaaaacctaaggggttgctgggcttggtggttcacacctgtaatcccagcacttcgggaggccgaagtgggcgggtcacctgaggtccggagtttgaggccagcctggccgacacagtgaaaccctgtctctgctaaaaatacaaaaattagccgggcatggtggcaggtgcctgtaatcccagctactccagagactgaggcagaataactgcttgaacctgggaggcagaggttgcaatgagccaagattgagccattgcactccagcctaagtgacagaacaaaactctgtctaaaaaaaaaaaacaaaacaaaacaacaacaacaacaacaacaacaaaaactatgggatacagcaaaagcagtgttaagaaggaagtttatggraaaaaaatgcgcacatcaaaaaagtagaaagatgtcaaacaacctaatcaggcaccccaaagaattagaaaagcaagaacatactaaaccccaaattagtagaaagaacacaataataaagatcagaacagaactaaatgaaatatggactataaaaagtaatacaaaggaacaacaaatgaaaagtaggttcagcagataaacaaaatcaataaaccattaaccaaaaaaaaagagagtagacccaagtaaataaaaccagaagtgaaaaaagagacataacaaaaactgatatcatagaaatgcaaaaggtcatcagagactgtcatgaacaactatacactaacaaactggataacgttgaggaaatggataaattcctggccacatacaccctaccaagattgaatcaggaaaatatagaaaacctgaacagatcaaaaatgagtaatgagattgaatcagtaataaaatgtttcccaacagagaaaagttcaggacagaatggtttcactgacaatttttaccgaaccttctaagaactaacaccaattctcctcaaactatttcaaaaagttgaagaaggtggaattctccctaactcatcctacaaggccagcattaccctgatactaaaaccacgaaagtcacaatttaaaaagaaagctataggccaatatccctgatgaatatacatgcaaaaatcatcaagaaaacatcaacaaaacaagtctaataccacatcaaaacataatataccatgattcagtgggatttatcccagaggtgcaaagatggttcaatatatgcaaatcaataaacataatacatcacatcaacagaatgaaggacaaaaaccatatggacatctcaatagatgtagaaaagcatttgataaaattcaacattcccctcatgataaaaaattaaaaacctctcaaaaaacaaggcatagaaggaacacacctcaacataataaaggttatatatgacagacccacagctgacatcatactgaatagggaaaagctgaaagccttttctttaagaactggaagaagacaaagatacccagtttcaccactcctgtttatcatagtactggaagtcctagccagaacaatcaggcaagagaaagaaataaaaggcatctaatttgaaaaagaagtagtcaaatgttctgtctttgcagatgatattatcttatacttagaaaatccttaagacgtcaacaaaaaactcttagatttgataaattcagtaaagttgcaggatacagaatcagtttgcaaaaattagtagcattgttatacatcagtaatgaactagctgaggaaaaatcaagaaaacaatttcatttgcaatagctccaaaaaaataagtacctagaaataaattgaaccaaggcactgaaagaccactaccaagaaaactaccaaatcactgatgaaagaaattgaagaggacacaaacaggtggaaagacatcygatgctcatgaataggaagaattaatatagtgcccaacacaatctacagattcaatgcaatccttatgaaaatgccactgtcatttttcacagaaatagaaaaaatcctaaaattcttaagtaaccaaaaaaagcctgagtagccaaagcaagtttgagcaaaaagaacaaagctggaagcatcacacttcctgacttcaaaatttattacaagaccatagtaaccaaaacagcatggtattggtataaaaacagacacatagaccaattgaaaagaatagagaacccagacataaatccacatatcatcaggtagatacaaatcaaaatgaaatataatcttatcccacttatcacagctgttattaaaaagacaaaaaatagcagatgctgacaaggtcgaggagaaaagggaactcttacacactgttggtgggaatgttaattagtataaccactattgaaagcaatatggagatttctcaacaaactaaaaatagaactactataggatccagcattcccactcttgggcatttatccacaggaaaagaaatcggtatatcaaagggacacctgcactcccatgattattgcagcactattcacaatagccaagatgtggaatcaacctaagtgtccatcagtggatgagtggataaagaaaatgtggtacatatatatgatggaatattattcagccataaaaagaataaaatcctgtcatctgcagcaacatggaactggacatcattatgctaagtgaaataagccagacacagaataaaaaatgatatatgttctcacccatatgtggaggtttaaaagttgatctcatggagatggagtttagaatgatagataccagaggatgggaaggagatatggggaaagatcaagaaaggtttattaacggttacaaagatactgttagatagaaggaaaaatttctaatgttcaatagcagagtaggatgattacagttaacagcaatgtattgtatatttcaaaatacctggaagagaggacttgaaatgttcccaacacatagaaatgataaatactcaacatgatggatacccccaaatacactgattggatcactgcacattctatgcatgtaacaacatatcacatgtatcccataaatatgaaaattttatttctcaataaaaacatttaaaaaaataaatgtcatccagaagaaaattcagaagctataaaaatattaatcaagcctggcagccttgaggaacactttaagaggacagaaaggcttagattgtttagttgtttctggtcttccgtgagccagccttcactctgcagctcatccttggccatgaggggatgacaacttgtagggttaggcacctaggacactagccccatctaaatcagttatatttgtctgtgtgtctgtttttgttgctataaagatacctgaggctgggtaatttacaaagaaaagaggtttatttgacatatggttcttcaggctgtacatgcatggcatctgcatctgcttggcttctcatgaggcctcaggaagcttttagtcatggcaaagtggaaggggagctagagtgtcacatgccagaagagagtaagagagggatgcctggctcattaaaataaccagatctcatgtgaactcatgaccaccgggagggcaccaagccattcgtgagagatccactctcataacccaaatacctccctataggcaccacctccaacactggggatcacattttaacatgagatttggaggggacaaatatgcaaaactatatgatcagttctccagtttgactctggatccccaccctcagacctctggatgagattgttcctcctctatagttctgtggttctctggactagcctcgtcatagctgcatcacactgggctttaattgtaagtatcccccaactagattgaaataaaacaagctgatcacagatgtatgtaaagaaattttggcccaaggtaaaaactcattaaatgtgtgaagcatgaacatatagttggcccttgaacaacaaagttttgaactgcacaggggtccacttatacatacattttcttctgccttggccatccctgagacagcaagatcagttcctcctctttctcctcagcatactcaacatgaagatgaagatgaagacctttatgatgattcacttccacttaattaatagtaaatatattttatcttccttatgattttcttgataacattttcttttttstagcttactttattgtaagaattaagtatataatacatataacatacaaaatatgtgttaatcaattgtttgttattggcaagtcttccactcaacagcagaccactagtagttatgtttttggggagtcaaaaattatgcatggatttctgactgtgtggtagtcggcatctctaacccctgcactgctcaagcgtcagctgtactaataaacctataaataaatcagttccaagaagttctatgaatgggtttcagagagtctgtgaatgcctcaaattgcatgtaatattgaatgcactctgatagatatgcagtcctctggcaaggatccatgtccttcattagattataaagtagtccatgactacctccaaatacccccaaattatcttaaattccttgaatgagtatgtgggccaagctttgaggtaccagtcactttcagaagtcacaacttatattctagagagagtttattttgttttggaaaaataagcactgttaggaaccaatggaaaatgattaacctctttcaagtcaggggttgaaagttaaaagagcagaatatcattacttaccaactgcagccaaaaaattacaaatgaaaatcaactgccactgcaattaatactttgtctctatgaatgggtaacatggtcacctctgtggaggaaagtggaaatctgaagatctgcagtgcgttaattgaacaaatattctttctctgaatgctatattgtataatttggaattttttcctctgtatgatcacctatttcaaaataaataattataattttttaactggatgtcctttattgattctggaatttaacaatttttataatgactttaaattttcgtttgaactggaatgattttttaaggaaactatgataaaatctgagaactaactaataaattcaagaaccaattcttataggcataagcagtaaaatagcagaatcaggaaaagaagagaaaataagacgtgagtatgtcgaaataactaaagagacagaggatattgaatgattcataagagaccaatttgtgcacctcttttaaggtacccttgaaaaccatgttggaatggataatctcatagaaaaaatacaaatgactaaaactggtctcagaagggagagaaaattttctcagtagagaaagaaatctgatttgtaaaatagaaataaaacttccaaagaactacttaaaccaaaagaagtagcgtaattaggcagtgtcacaggcaaaatttgctacatctttaaggaacacattatttcaatgctacttaaatgttttaacagcataattaaatgaaagcttccaaatcttttaaagatttttttggaagcaaaaaaaattgatatctaaaagttaaaaaaggaaagtacgaaataaatcttcaaatcaattttacttctgaataccgaagcaaaattcttaaataaaatactagcccacaaggtccagcaatataacagaaaaataatacactacaagtaagtgcagttcatactaagaatgcaaggattattcaatattaaaaactctgttactctaacataccatatgagtacatcaatgtagataaaccaaatttaaaaacggcggagattttcaaaagggttttgataaaaaccaacattttatttaacaaatgtgtttattctgtgccaaacattgctctaagtattttacaaatattgagtttaatattcataaccgctccataactgaggtacaaatgatattcccatttacgatgagaaaactaaggcacaataaggatacataaaatgatttggctggtaagtggtaaagtcagtatttacaccaggcagttcaatccttgcatttacccatgatattatactgtctgwcatgcatcaatttttgatagacatacatacaaacgtatatatatatatataatttcttagaataagatcatgtaaaatcacaaaatccagtkttwtttgaagtgaggaagcactagaaggattttttttttttttttttttgagacagtctcactcagtttctcrggttggagtacagtcatgagatcatggctcactgcagctttgacctcctaagctcaagtgatcctcccactttagcctccggagtagctgaggctaaaggtgtatgccaccatgccatggctgtttaaaaaaaaattttgtagagaatggatgtcccctttgttgaccaggctggtgagctcctgagctcaagccattctcccaccttggcctcccaaagtgctgggattacagttgtgagccaccacacctggctctagaaggatttctattagagacaagaacaaaacaaggatatccgctctaattaactactttaaacttatgaagtagcaactgtccacattagaaaatagaagaggaataaaattagaaaaatgaggtataattttattatttttaggttatataattgtatatctaaaaaaaaaaaatctaagaccaaacatgaaactaatacaagaaataagagaatttagtaagctagttgggtataaaattagcacaccaaattaatagtttccttccatacaaacaatacttacttagaaaatatagttgaataaatgattacagtagcaacaacagcaatcaaaatgcctgagaataaacaagcaaaaagtacaacacacacacacaaaaatcataatgctattgaggaatatagaaaagaacataaataagtagaaagccatacttttttcttaaataagtctcagaaccataaaaattccccttaatctatcattttaacatgccttcaataacaaaatatcaattggtcttataaaaagcctaacataccagctctaatattcaactgggaaaaacaaacataagaatactttgaaaatatatggggaaaaacataatataatgatgatagatttgccagatattaaaatatatttaagttcattgtaaataaattagcggggtgctattatatgaataaacaaagtgttaggatggaagaagactggaaatggttccaaatacaaacaggagtacagtatatgataaagatgacctttcaaataagtctggaaggcataaattgtttatgaaaagtgttgagacaattatgtagccatgcagaaaacaataaagttgcttccctccgtacctcactccctacaccagaataaattctaggtgacccaaaattaaatgtgaaaataagtactataaagcaatatgggagaatttcttccaaccttaaagtaggaaaaccttttctagatatagcccaaaaaactagaagccataaataaaactgctgtcaaatttgactacacaaaattatatacatatgtatatatatgtatattaaaatatgtgtagcatacagagacagtcaatttcctcctatataaagagtgcttataatcaataagaaaaaaatccaaataatgtaatagaaaaaaattgatatatgccatagtaaaggaaatgagaatggttcttggacatatgaaaaaaaatgtttaaactcactcctaagagaaatgcatattaaaactgaactaaattttatcatttatcacctataatattggcaataattaaaattttataacatacatttttggaaaatgtgtatgaaatattgattatggaagtaaaaatagatacagtcgatatgaaaagatatttgacaatatctagcaaagacaaattatcttctttgatccagcagtttctcttcttgaaatttatcctacagatattgaatgagcatgcagtggtatgtatgaagatattcacttagcactgtttgaaatatcaaaaaatcagtgatatcaatcaagatgtttatcaataggaagccacttgaataatttatggtataataatttgagtaatttatgcagtggaatactctgcagccttaaagagaataagacatataagtaggaagaaaagttgggtggctcaagcggaattgcacagggggttttaactccattgacactatttgtatatgtatttatttatgatattttatttcttaagctcagtaatggggtacatggtgattataatattgctctttatacccttttatgggtgtctgaaatttttaaaataaatctagcacaaacaaaatgagacaactctgtatttattgaagttgaacagtcttcaagatgcatcattaaacaaaagccacagggtttgaatcgttgtcgatagtagtggattttcttgtctatgacccagttgaagaaatatattttacattctaacccagttcacaatgaatccataaataaagaacaaaaacaaaaatttcataagacgatatctacccttactatgaaacaacatgctctgacattttctcttctattcgattccatttcatatctatgtaatgttaattgtgatccagtaaattcattttataactaatagatcacaacctgaagtttgaaaatgatgatgtccactgtgctacactttatgtgtgatttttaatgaagctatatgcttgcatgcttacattatcatagaatttctctgaaaatattcacaataaatgaataattttgattgcatttgtggagaggaagtaagtggctgtgggacagggattggagggagatttttttttcctgcatgctcttttgtcccgtttgtactttgataatgtgctattaaattttttaatttaacataatttttcaaaataaaaggaaaatgatgtcatagattaatgaatccaattcacctgctttcttggccactttttaaaatagccaatacttgctgcttaaagggctccttccaatgttttaaattttaaatttaacataaatagaaatttaaaatttctttaacgtagctttgtatgtgtatattccttctgaaaataaagtgggaaacaaatctattatactgcaaataatattttgctctttacattactattatgtcacctgctcatattgattgtcctaatgaaattacagccccatgtatagaggggatatactttcttgtttgcttgaaagaactatgtttggagatcaagtttctgtcttacagaggaagcaaggcatggaagtattgttatctagtggacaagcagttttatgtttcaaaattgtttgccaaaattagcagctgtaaaacaagaacacagctgcaaatttcaaacttttcatattaatatataccatgctattttcctttgaaaccaaaaacatgtatttttcatttaacaatttcagcagtgtacacatcattgtgtttccctgaacaaatgactattatgctaaatggttgattttaaatagagtttccttattcaccaaagttgatacttttaacgttttgttttcaattggaaatttctgcttaaataattttcatttattttgatgtttgtaagtgaaaagttagtttgttggtaaaaaattgtcccgtattttcattgttccttcaaagtttatatttgctgaaataattcttctgaagttggagagattgtgtagcctgcacaaaaatgctgtgtaattgtttgatccattttaccatgcgaaaatttgtagccttgtgaaataatccaagaattttccttataccacatgttttataatcccaggttactagtgctaaacatggaccaaaacaaaattagtataaaactaaggtcatatcccattccatgaagaaattctgagttctctacactgttttcacctggcttacaggatatcatgctctctcagttttcttcttatctcagtggtcacttctctgtcttatttgctgattcttttccttccttctattttttttttttttttttttgagacagagtctcgctctgtcgccaggctggagtgcagtggcacgatctctgctcactgcaacctcggcctcctgggttcaagcgattctcctgcctcagcctccccagtagctgggattacaggcacacactaccacacccagctaatttttgtatttttagtagagacggggtttcaccatggtggccaggatggtctcgatttcctgacatcatgattcgcctgcctcagcctcccaaagtgctgggattacaggcctgactctctaaccttttaatttggtgtacaccagtgctcagcttttgtcttcaagtcttcaccatttatacccactcagtgacctcttatagtcctgaggcttaaaccatctaatacactaatgactctcaaatttatttctcagccaagacttctcttctgacatccattttcaattacttatttggtaatttcatttggatgtttaatagatatcttaaactcaacttgcccaaaactaaactcctgatctttccctcctacccaaaacttgcagacttcccatttcagttgacggaagctccatcctaccacttgctcaagtcaaaaaccttggagtcatcctgaaagctctcttccttgcaataccttacatccactgtattagcaaactctgttcactgtacctccagctccacagctaccacccttgtccaagccaccatcatctctcatctgggttaaatcatacagccttgtaacaggtctctatgcttctcagagtgatctttttaaaatattttcttattacaggttagcatccttttctttcagattggtatcatagaagtagaaagtggaatagtggttaccaaagaccaaacaggggaggaggaagggggaaaagggagaagatggtcagtgggtacaaagttacaattaaataggaaacataaattctggtgttctcttgcacagtagagggaccatagctggttaagaaaaatgtattgcatatttcaagataaatagaatagaggatcttgcaagatatcaccacaaaaaaaagataaagatttgagattatgaacatgccaactatcctgatttgatcattatataaaatatgcatgtattgaaacatcacactaccccataaacatgcaattataatgtgtcaattatttaaaaataataaaagagtagacaaaatatatgagtcgactctgctaaaaatattgcaaatggcttctcatttcactcagagtagaatatttacagtgatctaaaataccctccatgatctagctccttgttacctcacctccttctacattttttcttaactctgcagcattgttactgacatctttgtcaatctccaaaaaaaaaaaatacttgaggcacacttctgccttaggtacttcactgtggctgactcctctacttggaatcttcttcctccaagtattgcatgttttcactcttacacctccatcaagcttttgcttaaatgtctgcttctcagtgaggtctactttgacccattctacacactactgmagtttgcaccataatccctgaactcttaatacctttaccctgctctaccttgtctttatttccatagcatgtatgaacctctatataatttacttatatactatgcttattgtttattgtctgtttccatctacattaattgtaaattctgaggactaggatccttgtgtgttttgttcactgaagtccttaaaggccctagaatagtttctaggacttagcaggtgttcaacaagtacttttgaaagaatgaatatagaatgtaacttttggtatatgatttatgtctatgtctttacacagaactgaataactggttttgattgatatgaactattatttcttgcacaattagtatttttaatttttgtgggtacatagtaggtgtgtatatttagagggtacatgagattttttgatacaggcacgcaatgtgaaataagtccatcatggagaatggggtatccatcccctcaagcatttatcctttgagttacaaacactccaattacactcttaagctattttaacatgtakaattaagttattattgactatagtcaccctgttgtgctgtcgtatagtaggtctcatttgttctttctattttttgtatacattaaccacccccacctccccccacagccccctactacccttctcagcttctgataaccattcatctactctctgtgtctgcgagttcaattattttgatttttagatcctacaaacaagtgagaagttgcaatgcttgtctttctgtgactggcttatttcacttaacataatgatctccagttccatccatgttgtcgcaaatgactggatctcattcttttttatggctgaacagtactccatggtgtatattaccacattttatttattcattcaccagttgatagacgcttaggttgcttcaaaattttacctattgtaaacactgctgcaacaaacacaggcatgcagctatctcttctatataatgatttcctttattttgggtatactgctactatatactatacaatatatacccatcagtgggattgctggatcatatggtagctcaatttttaggtttttgaagaatctccaaactgttctccatagtggttgtgctattttacattctcacaaacagtgtgcaagtattcccttttctgcacattctcaccagcatttgttattgtctctcttttggataaaagccatttttgctagggtaaaatcatctttttttttttccttgaaacagggtctcgctctgtggcccaggctggagtgcagtggcatgatctcggctcactgcaacctccgcctcccaggttcaagcaattcttatgcctcagcttctagagtagttgggattacaggtgcacatcaccatgcctggctaatttttttttttttttttttttggtagagacggtatttcaccatgttggccaggctggtctcgagctcctgacgtcaagtgatccacctgcctcggcctcccaaagtgctgggattacaggcgtgagccaccacgcccagccgggtgagatcacatcttactatagttttaatttgcatttctctgatgattaatgatactgagccttttcatatgcctgcttgccatttgtatgtctgggtttgagaaatgtctattcaaatcttttgcccatgttttgataggattattaggttttttcttatagagttgtttgagcttcttatatattctggttattaatcctgtgggagattagtagtttgcagatattttctcctattctgtgggttgtctcttcactttgttgattgtatcttttaccgtacagaagctttttaacttgatgtgatcccattttcccatttttgctgtggttgcctgtgcttgtggagtattgcttaagaaattttttgcccagagtaatatcctggagagtttccccaatgttttcttgtagtagtttcgtaggctgaggtcttagatttaagtctttagttcattttgatttcatttttgtatatggcaagatataggggtctagtttcattcttctgcatatggatatccagttttcccagcaccatttattgacgtgcctgtcctttccccagtgtatgttactggcacccttgtcaaaaatgagtttactgtaggtgtgtggatttgtttctgggttctctattctgttccactgtctatctgtctgtttttatgccagtgccatgctgttttggttactatagctctgtagtataatttgaagtcaggtaatgttattcctccagttttgttctttttgcttagatagctttagctattctggctcttttatcgttccatataaattttaggattttttttctgtttctgtgaagaatgtcattgggattttaatagggattgcatcaaatctgtagattgctttggatagtatggtcattttaacaatattgtttcctccagtccatgaacatggaatatttttccrttttttggtgtcctcttcaatttctttcatcagtgttttatagtttttcattatagagatctttcacttctttgattaattcctgggtattttattttctgtgtggctattgtaaatgggattactttgtgatttctatttaggaatgttcactgttggcatatagaagtgctactgattttttatgttgattttgtatcctgcaactttactgaatttgtttatcagttctgatagttttcttgtggagtctttatgtttttccaaataagattacatcatctgcaaacaatgataatttcacttcrtcctttccaatttaggtgtcctttatatcattctcttatatgattactctagctaggacttccaatactatgttgaataacagtggtaacagtggacatatttgtcacgttccaggtcttaaaggaaaggctttgagtttttccgcatttagtatgatgccagctgcaggtctgccaaatacgacttttataatgttgggatatctttcttctatccccagtgttctcagggtttttatcatgaagtggtgttgaattttatcaaatgctttttcagcatcaattgaaatgatcacatggtttttattcttcattctgtttgtatgatgtatcacattgattgatttgtgtatggtgagccatccttgcatctcagggataaatccctctggtcatgatgaatgatctttataatatactgttgaattcagtttgctattattttgttgaagatttttgcatcaatattcatcagaaatattggcctatagttttctttttttgatatgtctttatctggttttggtatcagggtaatattggacctatagaatgagtttggaggtattgtctcctcctgtattttttggaatagtttgagtaggattcatattagttcttctttaaatgtttggtagaattcagcagtgaaaccaccaggcttttcttttctgggagattttttattacagcatccattttgttattcattattggtctgtttaggttttggattttttcctagttcaatcttggtaggttatatgtatctaggaatttgtccatttcttctagatttttttgatttattagcatatagttgcagatattacactaatgatactttgattttctgcagcataagttgtaacgtgtcctttttcatttctgattttatttatttggatcgtctctctttttttctttgtctgtcaatcttgtttaacttaaaaaaacttttgtttcattaatcttttgtattgtttttcatttcagtttcattgaaattaaatgaaatgtatgctctgatctttattatttcttttcttctactgattttgggtttggcttgctcttgcttttctaattccttaaaatgcatggttagattgttaatttgaagtttctcctcttttttgatgtaggcattatagctataaacctccttcttagtactacttttgctgtgtcccataggttttggtatgttgtgtttccatcattatttgtttcaagaaatgttttaatttctttattaatttctccattgacccactggtcattcaggaacatattgtttaatttctatgtatttttatagtttccaaaattcctcttgttattaatttctagttttatcccattgtggtagagaagatgcttgatattatttcaactttttgaatgttttgaagacttgttttgtgaactaaaatatggcctatccttgagaatgatccatgtgctgaggaaaataatgtgtattctgcagctcttggatgaaatgttctgtaaatatctattacatccatgtggtctatagtgcagattaagtctgatgtttctttgttgattttctgtctggaagatctgtccaatgctgaaagtggggtgttgaagtctgcagctattattgtattggggcctatctctctctttagctccaacaatatctgttttatatatctgggtgctccagtgttggctgcatatatgtattcaaaattatgtcctcctgctgagttgacccctttatcattaaacagtgaccttcttttctcttcttatagtttttgtcttgaaatctattttgtctgatataagtatcgcaaatcctgctcttttttttggttttcattggcatgtaatatctttttccattcctttattttcagtctatgtgtgctttacaggtgaggtgtttttattgtaggcaacagatcaatatttttttcacccattcagccagtctgtgtcttttgattggagagtttagtccatttacattcagttattattgataagtaaggacttactcctgccattttgttatttgtcttttagttgttaagtggtcttctctttcttctttcctttctgtcttcttctagtgaagatgatattctctggtgatatgagttactatcttgcttttcattttttgtgtattcattgtatgtttttggtttgaggttactatgaggcttgcaaatactaccttataacccattattttaacctgataacaatcaacactatttgcataaacacacaagcaaaatgaaaaataataaaaactctacacattaatcttgttcctctgctttttaactttttgttgtttctatttatatcttattgtacttactatgtcttaaaaagttgttgtagttattctttttattggttcattatttagtctttctacttagaataagagtagtttacacaccacagttacagtgttacgatattttgtgtttttctgtatacttactattaccagtgagatttgtgccttcaggtcattattgctcattaatgtcctcttctttctgattgaagtactccctttagcatttcttgtagaacaggtctggtattgattaaatccctcaggttttgttagtctggggaagcctttgtttctccttcgtgcttgaaggatatttttactgaatatactattctatggtaaacttttttttcctttagcactttaaacatgtcatgccattctctcctgacctgtacaatttccactgaaaactctgctgccagacatattggagtttcattatatgttgtatgtttcttttctcttttctcttttaggatcctttttttcccttgacctttgagagttgtattattaataaatgccttgaaatagtcttctttgatttaaatctgcttggtgttctataatcttcttgtacttcattattgatatgtttctctaggtttgggaagttctctgttattattcctttgaataaactttctacccctttgtccttctctacctcctctttaaggccaataactcttagatttgcccctttaaggttattttctagatcctgtagtcatgctttattgttcttgtttttgttcttgttatttttgcctcctctgactatgtattttcaagaagactgtcttcaacctcaccagttctttctttgcttgatccgttctgctgttagattctgatacattcttcagtatttcagttgcatttttcagctccagaatttctgcttgactctattgaattattccaatctctttgttaaatttatctgatagatttctgaattccttctttttgttatcttgaatttctttgagtttcctcaacacagctattttggatcctctgtctgaaaggtcacagatctgtgtttctccaagattggtctctggtaccttatgtagttcatttggtgaggccgtgttttcctagatagtgttgatgctaatcaatattcttcgttgtctgggcattgaagagttaggtgtttattgtagtcttcactgtctgggtttatttgtagccaaccttcttgggaaggctttccagacatttaaaaagacttgtgtgttgtgatatatgctttagggggcattctaagcccagtaatactgtggttcttgcagactcgtagaggtaccactttgatggtcttggacaagatatgggagagttctctggattatcacgcagagattcttgttctgttcccttactttctctcaaagaaacagagtctatctctctgttctgaaccacataaagctgggaatggagtgacacaggcacctctgtggccaccaccactatgactgtgctgtttcagacctaatgccagcacaacactggttttacccaaggctggctttaaccattccctggctactgcctatgtttgctcaaggcctgggggctctacaattggctggtgtctaagccagccagctctgtgtccttcccttcaggtcagcaaggtccagaagtgttgtccaggagtcagggactagaggtaaaaaaaagcctttgaagaatacctggcgttctattgtattgtagctgagctggtactcagaacacgagagacagtccttcccactcttctttcccctttcaaaagacagaggaacctcgcctggtagttaccgccaccccaggccacagggagtactgccagactactgctgatgttcatttaaggcagagggtcttttaaatcagctttttgtgaatactgcctggcttggaactcaacctttagagcagtgggctcctctctggcccagggcaggtccagaaatgctgttcaatagtcaaatcctggaactggggaccccaagagcccgcttggtgttctagccccacttcaccatactggtatataaggtgcaagaaaatgtcccctttgcttttccctctgcttttctcaagcagaagttttgccccattgccaccacagctgatcatgtgctgagtctcacctgaaaccagcaagtctcagaggctcactcaaggcttttgatgggtatcattgctgtttatttggggtccaaaggctcttcaattagcaggtgatgactgttggcaggactgggtgctttccttgaaggcagcaggttcccttctggcccagggtttgtccagtaatgtcatctggaagctagggcctggaacaggggcctcatgactctgaccagagccctatcctgccttggctgagctggtatacaagatgcaagacaaaggcctcttcattattgcctctcctctcctcaagcagaaggaaggggtctcttttggagctgtgatctgtgcagcctggggttaggggagttttgctgccaacactcccttggctgccccagctggtgtctcaagtatgttacatgcccctcccagtccactgtctctaggcctacttcagcactaggactcaactaagagttgcagtccttatggcctagattgtcattcaggtttacttggaggcacagaatgctgtagccctcagtggtgaggtttgtacccactcaagtttggacctctgagatcagtgattccctccctggctagggctggtttaaatgctccctctatgggtggttgtctgctgagtttggtccggttatcctttttgctctaacaaacagttcagcactgagttcagtgtctcataattgctgtgttctccctcccccagcgcccagagatactctctacaccacacagctgctgccacgggcaatggggggaggggggtattggtaattcaggactgttttttctatctcttcagtgccgctttcagcaatatgaagttaaaaccaggtactatgagtgctcacctgatttttggttcttatggtgttttttctacatagatagctgttaasttggtgccttttgcggggcaatgggtggaactttctattctgcttcctccacatcctccccctatttcttgcacaattgatttttaaaggctttgtttatatgtgtaagccagtttggtttctgaaagacttggtcaatcagctcgatgaagtcagtagtttttaaactcttaatagttgaatcagtgaaacctattttctggtttcctggatttgttccgtttcagtttatgatgactatactggcccttatggtaatatattcaagctaacttgtgcatggagaaatagttgcaattgatatgccaaatcaatgcatgtagacacaaccacattcaatcacaattagtcaaatgagtgttgtagaagaactttatactcagcatagttcattttaagacaaggaaatagcaaataccaattgattgaatgtccataaataaataaataaataagcacatgcatgtattgttttgagtgatttatgaaaataagcaagttgatcaaaattgtcaaataggtcgattcatataagacattgcctaaattaatatgtcatctgactaaattccctagtaattccagtaaaaactattgaaattttagtttatgaagatataatcatattttatccaataatgcatcaattgattttttagaaagcattccaattagaatgatcaatcaatcccatcaaagtttttaataaatgtggatctatagggtagtcacacctaaagtaagactagaataagaaagaataaggtgttaaagtgagattttactaatcctgaatcatgtcggagtttgaggaaatatctgtagaggttgaaaagtgtggcaaatggaagttcagcacttcagccttaaaagaatcataaacccataaactcatgacatttttaccagtcctcccatatttatttgcagtcaaaacaatgccacagctgacatttaggtaccccaggaagcaaaaacaaaacataacagaacaaaacaaaaacaaccaaaaaacagaaagataaggaaggtagacagacaatgctagctccatggattaagtacttgatatatatttttactcgccctcaatacataaattattttaacctttagttgcttttgttttatttctggatgttataggatactgtttgctcatttgtataacttgcatagggagaagtaaggatttgggaagtaattttatcttgtgcctcagtgtagttttgtccctaagctctgtcatttgtatatcaaactaatactgtcatttttatcagcttcagccacaagaaggtttatcaagatgtttctgttttacttctcgtttctaagcagctgcctagaactagagtcacgagtctgctaaattgggcaggcattcagaatttttttttatcacgttctcccaagaatcataattttataaaaagaaattagcccaaggtaaatctcaggagaaaagtggttttctctaataacttgcctccaacgaagcggttggtctttacccacaagaactagaaataataatttttttgtactttataccttgggtctgggagatttaaagaaatatcttgctttccaacaacttgggtttcagttgttccagattgaattagtgtaaataacataggaagaaggaccctagcaaatcaatactgcattggtagtaaactggaaaatactgacaaattatccttttagtccttagcgaggtttaatctaaacatcgttttctcctgacagcatgagagagaagagagtaatttattacaccatcctgatatggatgagaaaagactgctgcatgttcttcagtgttctggctctctccttctttatgccagttcaatttttgttttgctccagaaaagcactctccaataatatggttacaggtcttgtaactttaatgcygtagcactactctcttccattgtacatttgagaacttgccagctggtataagaatgtgggttaagtgctcagttgagattcagctgtctctcattacatacatggggtatgttcctaaagtcctgtacgcaaataattttatagctttacctaatgtgtgaggtcactatgtagaggagtcttttagaaaatcttgtcacattataatgtgaataattaccctgcccctaaatttcacgattttcataactcgagatttttgcttgttgggtttatttaaggtggactctctctcttattcagttaaagcttacttcatttataggaaagggggaatttgtgtttactgaaggaaaaatatttagcattatttctttcctaatttcctgtggtttttgtttcatcaaacaactcttattccatgtgataggtgtgtaatacaaatatgtgaaatatgactcacaaatattaggtcagcaatttgttcatctttttctgttaaataaattggtcatgttaaatgtcacattttccaacttggatatgataaaatagcacttttaattaacccaagagggatatggacataagaaaaccataaacacttgctccaggcaggatcctttctcaaggaactgcattatgaatatgacttaaattactggttatatgtatcccgtgtattttgcaaaacctaaaatgttattatattgtcattacacttccacagttatcatcaggataataaagaaataaactcaaactttctttttgttttttttttttttttgagacagggtctcaccctgtcacccaggctggagtgcagtggcactatcttggctcaccgcaacctctgccacccaggttcaagtgattctcctacctcagcctcctgagtagctgggattacaggcgcctgccaccgtgcctggctaatttttgtagtttttagtagagatggggtttcaccatcttggccaggctggtcttgaactcctgacctcatgatccacctgcctcggcctcccaaagtgctgggattacaggcttgagccaccgygcctggccaaccwcaaacatttttaacacattttgagaatagtgtacatactaaatagcaataaatgtttccctacatactcttccccatatcaaatccaagccttaaaatgtttaattgctcatctagactccaaaaatatttaaattaccaggtacctctagccaaaggataaaaacattaaattggaaatgattaacatatttacaaaaaagaggaatttttctaagaaattcggttaaacttagttccactgactcagaagaggaaggaatttcttctggaaaacattttctaaaatagcaaaattcatcataaatatatgattgggactattaaatataaatgttgcagtcttaatcatctatagamcaagccattatgacaagatttccctgtataaatgtgcagcatgtttcatatgccagtgtgttaaaaaaaaaaagaatcatttgatgacttaaaaataactaactgaaatatttgaatttgctttgcttcagatatcgtatgaaatatcattaccattttgtgagaccttttaggttattaaacatttaaaaattccttctgtgaacaaggcacttttataggagagagacagtgggaagataaggggaatgtaaggattacagatgtgctcacagcttagcagcttgcttacttggacttaatgatactgataagagtaattctgatgacattattaacctatctctatataactcagccaattgaccagaataagatcaatattttttcccagttgtcaagacagccaatcaccatggctttgattggatcatggcatggtcaatccaattcattaggtaagattactgaaataaaccacactgagagaaaccaaatgccagttaggtagtgagcaagtgccaagtggtggaagagttctataagagcaagctcatcagatgatttcttcaagtcgttattcatgtccagaattgattcagtgagtaaagtcatttgaagggtctggaagatataaagtcgaaaaaaatgctttctaaaatttaaagtgaaaacatctgttagcatgtattagaatttgtttcaaaactacaattttttattgtacaaacatttgtcaaaggactaagaatccagaaataaataattagacattttccttgaccttgagaagttcataatcagtgggcagagtaagggagtagacatataaatagataattatagtgcaatgtagtaagccttgtaataggtgtatgtaaaatgcatgcattagaagcacaaagaaaataagctggagaaatctaggaggatttcacagagaatgtaatrtttgaattttatcttgaagtatggatatgaatattttgtctttttctttattttcttctatatttgtgcatgtgtatacacacatgcacatgcattagtatgtatatcagttactaccctttcatttgtgagtgactaggaaaaggtaaatatttgattgcttctggttttgggttttttttttaacagctttattgagatagatttcacacatcatacaattcactcatttaaaatgtaaaattaaatggtttttattatatttacagagtggtgcaactatcaccacaatcaattttagaacatcttcatcacctcacaaaaaccctttacactcagctgtcatcttcctactcctttatcccccaactgtaagtagcactaatctacattttgtctctacagattttcctattctggagatgtcatacaaattaaatcatataatatttgtcaatttgtgtctggcttttatcgctttgcatgttttcaaaatttgtctatgtcataacacatcagttaaattccttttaattgccagataatggctcattgcgtggagatatcacatttgtttgttcattcaccagttgatggacatttggattgtttccacttttgcccttctgatttcacagagagtgttctatttgttttcttttaattttctaatgttccatcttgtcaatttttttatcatcttggataaaaattatttttccccgctgataattatatgttctactgagaatatgataaatgtggttttccctcagatgaaaataatctgatcatatctgtggtcctaagaaaaatttttctctactatctgtgagatgtagaggcagctcataagacagtgacttccgaccttttatggccagggctcataagaaatacatttttcatcacaacccagtacatacataatttatgtgtatgtattaaacaaaagtttcacaaaacagtgtttatgcttactatatgcagtgcactgtgatagcctatcctattctagtctatcctaaccttttctgttctattctaccctatccartctaccctgtcatattatagtctattgttttaaatgtacattacatgacccatacattgatttcacaacccactaccacgtcactatctgaaattttgtaaacttcagatttcaaatctgaagttctgttataggagagagaccagaacacattctgtgtccagaaatattcatctcatctttctgaggcaatgactaaagaatggtattttattttattggttgatacccatcaaatgttggtgaataataaaaagcccctatgttgacacctccattcttaacctactgacctttagaagcaaaagaataattactggtatagttcattaccttcagaacagtaagagtaactgtgctatgaatattattcccttctcttgggaattaactttcctattatgactcataacatttcttttgtactaggaatgtaaaatgtaccacttaaatataaggcattataaggaatttagggcattttaatataatgtttaagttttttgatctaatgttttcatctaatagtttaaggtcttttaatctaatgtatataacttaaatggacctttccctctgtattttaaaggatgccttaaggtgacatgatttctctagaatgacaagtcccaaggaagtataagcaaaatattcccatggagagtgatagaataacatgaaagacagttcagactcatttctcatatgactcacttctctaaatttggctttaacagcttatattctagaaggaaggaaaattggcagtcggaattgaaatgccagtgaataaaatgtgtctataggacacaatatgataatattacatgtgttggtgacctattaaaaaaaaacaaactgaaactcccaccaccgtacccaacactccttcataactcctaaatagaagggtactcttattctcttcctatggtgacttcattgctgactttcttcctttttctcttcccacacttctccacaaacacatacaagttgggaaaactcctccaaagtatcttcctaccttctatacacaaatcttcctttcctcttttctttatttttccacttccacaatcttcctgtctcttttgtacttgtggctgtcatttccagaagaatccaagatgtacaattgacaggaaacaccaaactgaattatagagacgggcagaaacttcaactttgcttctttcctctttacctgttaccctgcactttcagagaacttaattgtagattgcaaaatgaagatcaagcaataaccacacacaatgaaggattcaaggaaccctaaaaaggaagaaagtgaaagtagtagaacctttcttgttacacatctctattttatttattcaaatgctattcttttttaagtctatgtttccagcctggttaatcataaaagctcaatcaagcacttcattttrgtcttttttgtgtgggattattaatgccgtgggtggagaatttcacacaaagtagtacacttaagtcatgcccaataatggctcagaaaattggttttgtgtatatactttgtaaatagataattcccaaatcaggtaagaaaagagaaaagacagaaaaattataaataaaagtgtagaatatacttctatagtgaaggcttatccttatttcaattaagaattatgacttatgaaagtaaatacataaaagcttagatccctgttgtcaaatgcgaaacatatgaaagtatcacagacctatgaaatgccaaatacacttgcacttattcacgggcactaataactttaattaagccagaacatctcaaaataacaataatgaaaattatataggtaataagactataaactggacttgaataaatgattttgttttctttagaggatgttggctaccattcagtctccaagtataaaatatttattacatgtccatttgcgaaaaagrtaatttttaatccaattcaattttacatttttctattatcctaccaggcagagtttaatgcagtacagttgaactcatgtttattgaataagtttttcctacttgcctggagtaagtgcatttttctattttgaaaatctttacttaaacttaaatgttttccactatttttccaaacaacagtttagagtattgtgtttacttgaagttatgtcttaagattttgaaatttctttcccagatagtatttatgaaatatattttctgttgtcctgttgcagtaaactttttataattggtattttaatgtttcttaagccaaaagaatgatactatatgtgctagacttatactcatccttatttttggtttggactgataaatctacttttctgttaggaaaaatatctgtctgaaataatctgcctccattttctttctttttaatttcagtagttttgagggaacacgtggtgtttggttacatggataagttcttcagcggtgatttctgagattttggtgcacctgtcacctgagcagtgtaccctgtacccaatgtcttttatccttcacccacctcctaccctttcccctgagtccccaaagtccattatatcattcttatgcctttcaatcctcatagcttagctcccacctrtaagtgagaacatactatatttggttttccattcctgagttacttcacttagaataatggtctccaactccatccaagttgttgcaaataccattatttctttccattttatctgcctctattttctgacaggcagctcatctgaaaccctaacttcatagtttcttgacctctctctggccaataatcattgccttcactccatttccacaattcatttcctcttctccccctccttcactctcactgaatcacttctggtctcatcaaggccctcatacctccctagctacctatctatttcgtaaaccttttcaggctctctctcttaccctatttcaaccgtgaactcattgacactcttgtagttgcaccatcttgccaatcctcaaccattaatcagctttccttgatgttttctttcatttttccttcttcttctttctttcattatactgcttctgccaaagaaaatcacatacctgattgactggtgccagtgcaaattcataatatccaacttcagccaagcccttaaaactgcccagctgtctcgatttttgttcttaagtcagttyccattctagttccccattcttactgcactaatgatattgtctctgaaatatttactccacgcacaccttcgcagacagcagaaaatgttgctttctacctcatagaaaaataaaggccatcaatcatgaagtcccctctattccctgccaccctacactaaatatacctctatttatacttagtcttaccacatgtttcacagtaagaaatgtcctttccccttttcattgtcaactctcattctgtgtttttgatcccatacactccccacctcctctggagcttacactttcaatgccttctcgcttgcattattaatctctctattccctcataaatacttcctcatttaccatttagtcctcagttttcatgggttgctactaatttttttccggccctttgcccaaatatgacgtactctgtgaggccttccatgatcacattatttaaaatcacagcttcagatactgtatccacacaattacttccttttctcttttcttgctttaactttctctttagcccttgtcaatatctaacatgctttgacttatttttcttattaaktatctgccttctccaatagaatataaactccatagggcaaggattttgcctgaattcttatcaactaaaacgaagtttgacacatagcaggaacaaaatgagtatttgttgaataaattaaatgtaatttgacttctatttccaccaggctattacagtcctaaagatcatcgttgagattatggctaaatccagtcctcattttaggtctcatcctacttttagtagaagtttgtgtaattgtacaattgttcccttaagaaaaatgatttatctgggctatccagtctttttagactccttcactgatgttttctcttcattccacccttgaaaggtatcagtgttcaccagatatctgtcctcggaccttttcttccttgcactctttttctgagaagtatcatccgtatctatgttttttaaacactgccagtggcttcccagtctagatttctagtccctacttttttccagaacgtttctaactgcatattggatrtctactagatggcttgtatgtttttcaaactcaacacaaccagcattaattcagtaccctctcttcttcctgaatgccttgttttagttaatggcatcaacatctactcagtctctcaagatatatacatttttttatttattctaggcttcttcttctcccctgcctccaattctgttccaaattctaataactctacttcctaattccatttctaacatattcctttttctccatcttcttcacctctgccttacctccagccctcataatttttcacatgtgatataataatagttacctgattttttttctaccttcagtcctgcccaaatccaatcaagcttttatactgtcaccataaataccttagccaatgcaaatctttccatacttgtcccctcttgaaactcaacgactatcctttgtactctcagataaactttttactccataaagcctagcttcaacctacctttccaacatcttaaaactctacaggtaactttattcatttttctccaactacaccacacactttctcaactccagaccgacagcttcttttacccagaatgtcaatttctttcctttgtatctggcaaacttstaagcactattcaatagccagttcagatagcagctcctctgtagatctctaaatctcacaaggtaagtcaccttggttttttaccttagagcattctgtatcgtttatctctatgaaaaaaacatatttacattgtgtttcaaaaactttgttggcatgtttatcttttcactgaactgtgagctcccagccctcaagtaattaagatagtctagctaaggagatagcacacttacttaaaagagtaaatagtgcaaggtatgatatgatgatcatatgatagaaatggactgtgaatggagaaatggaagcaatcaggattacttcatggggttggatcatcagggaaggctgcacagaggaagcagctctcaaggttaaatggtttttggataagtcaagaagcaaggacccagtatttcacttgaggattatgctctgagccaatatgaaaagatagctcaagtagaatagtgagatggacattgggacagggagatttgagcttgattgtggatttcctaaatgtcataagtttgctattgtgttgtgtatttatatgcatatgcacatacatgccccttagatacttttcttttctacccattcttatcctaaaattaccaagtctaaactgaaagttttctaattcctcaagaataatctgatttatactcttgtattatcctatatcattcaaaggacttctcctggagccctgtaaataaggactgagataagggatgtaaatgcatagggcagtgcccaacatacagagagtgatttataaaggtcaagattttcctcttgacctcagtctctgatctcaggggccaaattagatattgtactgattcagacaggaaaacagaaaagaagagagaaagtcatagatgggataaaactttgatcacagagatcgttttgttgatgtgtcaacaatttttggctgataaagtgaagaggcaataaaaacagcagtgcatatgattctgcagtttgaacagcaaattgcagcaaattgtagctatagcattggaagttcttcttgctctctggctgtctctttattcagaagtttaagttaattaaacttggctctcatagtgtttgaatgccaattctaaatgcctgtggttagaaaaatcacactctataaaatcggtcaaaatgcatattctagaagagtcatcacaattgatagtgatatttcctaacatccattcatcctagtattcttgtttttttttcttctattgtgttttttctaattattatccgctgagattagtggtttgccctttgctttctggcatggcacattgtacaaatgctttgtggtaggactttaatttgttcatcatgacaccgtttctgcctttgcccatgggaaaaataaaatcgagtcattcctcctctggccttcttcagcacatatcctgtcagtatgatgtttatctcaacctgcctattgatgattacattgatagtrccatatcctagtgtgcggctctgtgctcctggctttttagttttgtagagtttacttccttaatagaaagcctgtatgaacttaaaaagtcaccaatcttctcatattaaggaacagaactacctataacatgggtttccagccactaccttattcaggtataaatcaaaaaggaaattatgtgaatggcagaatatataaagctgtgtgataatgagccacattgtagtgaggctctagcataataactctgaactgggtttttattttaagtcactgaaaatgagggctggaaaatgtaacagatttgggggaaaagaggtagaattagatctactatatttttgaagtattttctgaaagggaagtgggatttaaaatattggattgtttctttttcagtcttttttatcccattaaacacaggctttgggtataaatcctggtatagctgactaccagccttgccaccttgggcaaattttgtaccctcttaaagccacaatatcctaatctatggccacttcacaggagtagtgtgaggataagttgtgtgagtaagaactgtaaatgtataggatgatgcctaacatatagaaagtgatttatagagttcaggtgtctgcatttggtggtagtttagtatcagaaagtagtaaacaaaatagctgattgagtgctttctcttatcttccactggttagtatgacatcagacagaatattagaacaaggtacttgtattagtttttcactgccgtgtaaaaaattatcacaaacttaaggacttaaaacagcaatttattatctcacagttgctatgaatcagaagtctggacacatctactgggtcctctgctcagggtctcactggactgaaatcatgatgccagctgggactgaggtctcatctgatgatgctcttcttggcagaattcagttcccttgattataggactgaagtttctattttcttgttggctgtcagccaggggtcactctcaactactagagactgttctccagtttttgtcacgtggccctttccataggtctactcacagcatggcagctttgtctaagccagcaacagagagagagagagagagaaaaaaagaaagagagaggcagaattttactacatactagtaaaatgagtcctatatgtatatggtaatataattgtgagagtgatatcccaccacctttgctgtattctattgattataatgaagttacaggttgtactcaaactaaaagggaggggattataaaatggcataaatatggtggccatcttagggtctttgtgccacaatactcaaagaaataatagacaattcactggcctaagtcttaagagaaataatgggtagtatcccttgataatagtttaacatgcctaattcaacatgcaaatacctcatgtttctttttsctgaatctatgactcttgaaactaatattttggagattattgaaggataattttactttaaaaatattaattacgtaagtaacacatgattatattctttttgtaaaacaagaaaaattaaaccatacaacaatataaaatgaaaaagtaatttattctgcacctcctccttacctttaccccttcccctatccagaggtgctcaaggatgatagtttgatacttattcttctgtaatatttttaaaacataaatgagatcatgttatatgtgcgttctgtaacttgctttattcttttttaaacaatgtttcttgaatatctatgacagtatagatagatctgcctctgttgcttgatttttttttactatgtgtgagcaattaggagatttcccattttttacttttatgagcaacactacaatgaattctatgtatgtacatatttatgtacctgtgggaattatcctgcagtaatagattccctagaaatggaattgatgggtcaaagggtatacacatttaatttttgacaggaaaacaatggaagctatctgatatttaaatactggtaaaatgtcctccaaaaagaccagatacatttacaatcctagcaacagtgtttattcaagagtctcatttttgtccacattaaggtcttttccaaaatcagcaatgtgttactcttaggaacgtgataggaggtgcaatagaggtcgttgcagatggggatgagtaggagtgaaagatccctggaaactattgacaggggcagtatccatttggctgaccacagaaaatttagatacactaaaaaatttggaaactacttccaaggctgtatgatatcaagagatgtataaattagagtagtcattcagatttagcccacattatgcacacatacctgcatgtgtggggagggaggaagaaagagagaatgagaatagctcatttagagagtgaacattttagaagtataaaaatatagcagggaatgttgataatgcgtgttattaactcaacagctctaagagtccttcttcaaagccatttccaaagcacctgtgattacatgattagagaccccttaaaacaagtaaaataggtctgtaaactaggttatctatcagattactaaaaagcccgctgatagctgtcataaaataagtcaccattcatacccctgccaaagaaatacaattgtcttgataatatataataatgccaaaggatattttgtagaatgccactgctggagctgcatggagattcttcaatttgctgattacaaagcctactcagaatcttaaggctcaatcctaaccattgtgatttgtggagacttgcatttcttgtccagtcttctgaaagtaattacaaatgctgcagaaatactcagttttatccaatttctgacagatatattctgagtactcccatttatttattctcttttgaatgagaatacatgagaggaagacaacaagaagatagaccttactccatgctttctgttttgcacacacacacacacattcaattaattatgtctacaatttatggatcgatcatgtaaagtggtaatcttggcttagaccaattggtttaatcaccctgaattgcatgtccaatacagaagttacagacacactacactgccactgctgaaagttgctgattatagaacatcagtagtgttttgaaagattcgaaggtattttgtacacaagcaatttttaaagggaatgattaaacaagatttatattatttcttacgtttagaagtaaattattatttcaaatatgttataatttcccaaaatatgttatagtgaagccctagttttgtactagactccaaagcaaaatagcccatatattcaggaagtgctgattaccacagcccactcttggtgactgagagtacatactagcatatttaaaggctctgagaagtcctttaataaagaaacctgtacagatatgttcaacacaaagttctccaaatttatttgtattgagaactcttttctcttaaaactctcactgacatttccacacataaagaaatgtaaatttaagagatatcattcctagcattagcattacttagctgtaaaatacttatttcartgtttaccgtgctaatgttatatcgttccttttaattaatttgatgaaaattttaattcctcttaaaaatacacatgtatctcaaaaatattgaaagaatacacttggctggcaaactgatggcagctttatttataaaactcatcattaaaaacttattaagattgtggaattagtcatgcagtggggaagaagataattctggataaccagatctcttttttcaaaagattatttgaatcatgtttaatgaaaaaaaatgcagccctcagaagatggcatttgataaagcttcatctttgaattaatttatttttcctgttatcattgttaattttgcttgtgaaagataatctaaggacatctcaggaattagataaagaaggactgctgggtcaccttcatccaggtgatgaactgataactgtgattgaaaattgtagtcaacttaaaacaaaacaaaataaaaaaggaaattactgtcaaatggaagtgtagttttggaagctgaacccttataaattgtattgatggggaacctgcacctgagccacrgtgaatcacttcacttggattatatttaatggcaattggaaatatccttgttccttatccttttattatatggcagtttttttgcggttcagctcagaaagtcaagtttattgggaaataaattttcagtgtttcatatgttgtctttaaagaaacagtggtcaccacctgctgcttgacacccaccgatgtcgtttttcttcccaatcaaagaaaagcaggtcagcaatttcctagcaggacaaaagtactaaaggttacttttttccctgcgttgtatcatgggcaaggcttatacctagcatgatgtggggcatatctcttcctaacctccttccaactaccccactccccctaagaagaaatatttgtactactgccacgaagcctgaaattccatagtagcctcccctctggatctgaataaattaaatatattctctatgaaggctacaatttggccaggtgcatattcacgcaaagcttttattacttctaagcctttgtataacctgttcctggtgcctggaacattgtactctcctctcttctccctgacccccaccctatccactcacccataaccctcccagcctgccagacttttctctaggatatctaccctacccgcttccgtacatgccccatcacaccctgtaatttccctaccttatcttaaaaagtgggagggaggtaagtcctggtgtattttccttgctttgctctaaggtcctatatatattttgtaatccttaatcactcagggcattcaaggcaatgtacgtctctctaggttacttgtgttagagaaagacaaaaccaagggacttatctgatgctcggaatacaggaccttaatgcagctttttgtttgcagaaaataatgttactacacattacatattgcagagtttctgcaaatttacacaacctaaaagcccaaagagtccccttacatgctacatgatcttgttactcaaaggatggtccacagactagcagcatctgtatcatctgagaccttgttagaaatacaaaatctagggcccactgaagacttactgaatcaaagtcgggattttaacaagagtcccaggtgatttgtgtgcacattaaaatttgagaagcagcagtctagaaaaaatgctggcactgtgctggatatgtgtcttagttaaaagtgtgaaagactgaaagggaattaccttttatttatttggcatagcattacttttttagaacctcaagtccaaaattaatctaagtgttttgaaaattagagaatatgtaatttttaaattttagaataattaaatgtgtttcttttgtttttrccccatctcctccaaggatgcagtgattctccagtaataatggccctactagtcacctggggtgcttcttatacatacaaatctctaggccacagccccagaaattgtatattacatggcctgtgataggtctatgaatctgtagttttaacaagcttcacaagtgattctgatgtaggtggtccatggacctcattttgagaaacagtagggggtcaggagtgacagggagacagaatgaaatgtaaatatattaaaataaataccatctgcatcaacttaactgaaggtacgtccctaaaaatacaacaccagttgacagtctttttcagggaaccaggtgaatagcatattttaccttcagtgcaacttttattcatgtttgccgagtttccacaatcagtgacatattatttctcaacatgaaatattagttctgtggaagggcctgtggttaaaagccttacctatcattagctatcaatgtacataatcttctactggaagcactcaaaacatagcacaaaaatatgatcaccccttcccctccaccatgattaccacccccgtcaaccacacagtccatcaagaccaagagactactgctgggagcaccaaaggcagtgttacggaaggggaacttcctcttagggatcaaatgtagctctctagactgtagcccatgcatttataagaacttgagaatgacttgggtctattatgtgtctatttgcctggcaatagattctggaattgattaattaaatacattggaaatgataaactggamtacaaggtaacaatagtttgtgtgctataaataggaaaacacttatttttatgcccttgaaaattgctttctacttggctaaaaaagatctagtgccatcaactctagagaaagcactaaaggagtggctttgcctgtatctaactaacgattccacacagcactgaagtagaaaaagatgagtctcttacataaagtgtgcatctagagaggagggtgagaggagccactcatgcataatgtggctcccctgtgaacaaaacaaggaagccgagaagtagatgaagttcttgatttcaccctggctgttaatgataatgaatcattgaatgcatctgttccttgcattcctacggcatagaaggaggaaaggaacataaaatataaaacctcaacgcagttaaactacacaaaatgaagaaaacactaaagaaagtaggcccctcagttaatggaactacaagcaccaaatgatactctttaagaggtagtgaagcccagctgaaatctgcatcaggaattctgtggggttatgaagaagaacacaaacaagtttggacccctcctttaaaacaacagcaattttcctgggaaagaaaaggtgctaaaactctgcatttcctcccaatggactgttgcagtattttatgaaatacgtgaagaataaatgtattaattctactcataaatgaacaactccatgcattgttcaaactggctaaagaaccactaaggaggattcctgaggtgaggaacagatctcttaaatgagtgatctggtgaaaggagtagggagggggggaggcaaygggaatcagctgtagttaatatacttctaggctctgaatagagtggcaagcagcacattctgtaaactctcaagtactgaagctattgcaaatagcagtaacaacaagtggctctagatgagcagaatgcttggcaaagctgctcaggaggttaatgaagttgacatgggtttgaaaaagtggaaaataatgcatcttgaatgacaggatctcattttgaaagaaacagtgcttaaagagaacaagtttaattttttattacaggtgcactgttgattatctaattcaaacatgggtgatgtgccaataaaaatacccagtacatgatcgctttttacagcttgcattcaagctcggacaaggcaaaaatgatactctgaatgacagcagaaagtacatttaaggcgttcatcactgygggtttgttcatgcttgatgaaaggacctgagatttgagagaagaggtaggatgatgtaggaaatcgcatcatttgatctaagggaccatgaatggaatgactaacggtataatgtcaaggacttctgtacagttcaatgcagaggaatatagtccccttgtactctgacctttgggctagaaatccttggtaattagcttaaaaatgaaaccagtatgctatggactaaattatgtccctcccaaaactcatatgttgaagtcctaacccttcatgtgatggtatttggagatggggtgtttgggaagtcattaggtttagatgaggtcatgatggtatggccctcatgatggaattcgtatccctataaaaagggacaccagagagcttgctccctccctctccaccctgtgaatacgcagtaaaaaggtggctatctgcatgccagaagagaccccacacaaaaaacttgatcatgttggtaccctgatgtcagacttccagcctcaaaaacggtgagaaagtaaatgtctgttatttaagccacccagtctgtggtgttttcttgtggcatccyaagctaaggcccagtggaattgtcattcaacttccagcttggtttccttttcataaatagagcatcagcaaaggaacctgctgcttgtgagtaaaggtgggtgacatgcgcatattgactttgattgtttcaagcacaggaattcatctgatttctcctgtcatttagcagagccctgaggaattctgtcagtcttcaggggtttttcatttgttcatttactcatttcagaaatatttattgagcatatactttgtatcagaaggtacactaggtattgggccatggtaatatggagttctaggcagtagactgagagcacagaaatcccaaggggtgatgaggaagaaataccagaagagacatagaaaactaagggaaaatgaagggaaagacttgtcatgattttgcctakacccagtcctggtaacactataagtatgagattaaatgctgcaaactttggaatatttctagggaatcaattcgactttctagaggccaaccattcaattacaaacataacttgcwattgaaaaaccacaaaaaaagccaacctacrgtgattatgcatgagagacaaagttactcaacatgttcttaatgtgtcctgtagtcttcgtttagagatcttccagaattcgtataatccccaggaggggcctctatttctgttaagatgatgctggcatcacatgccttcctgtttagtaagtggacagtggtttgagagcatctgaggtgataaagacatagtgaacattgaccacaggtaaaaggaccagtaggtggtatgctgattccatgtctatcaaattatctccaagtccattccttttttttttttttttttaatcattcacagaaagaggcagccacaacactcacctgctagccaagatgggtcacaaactaagctgtgcatgcagagcttttgagaaaccccaggttaccaggaatagtacagaagcaattgtgcatgattggtactcctctgcgccttgttttgtccactttttcctaataacagggaacacatgttgcatgccgaggaaatctttttgcctttgcaggagtccttgctttcatttacagaatccaagctccctaagtattgtagctgggtttaggtttagtttaaattctattgctgatccatttgctccctgttttgcctttctttaaccaaaaggacaaaagatgatgtgtttatctaagtgtgtgtgttttccactgaaggagaaaggcatgggggagaaaacactttttccacccaactgaaggtaatgtttagagagtactgttttctgactatttttgttgcctgttgttttagtaaaaagtatcgagttacatgacaaggttttactcttctgagccctcaagtacaaactttctgaaggtaattttaggcatagaaatatcttttccatggcaactatgtgcctattttgatcaacagaaaagtgtaaatcaccttgaaataagcacagcaaatcatgttctaacttcattcctgttctgctagagaaattgaactgaaatgtaaaagtaaaatggcatattaactttgctgtaacatattaatgtctaagtaaaattataatgtatattataaaatgatatatttatatatgtgggtatttttaagcttttctttggcaaactttcattagtaatgagsacctagagcttcacctaaggtggccaactaggcagttgagtactgattagcacatattttaagcaggatctgattaacctaacgaaaacagatcagcagctttttggaacataaggcatttcagagatgttgtgctatgtacatttgcagattcatgtagcttctaaactatgcataagcagcctcctctctttatttttttgtgcatttatctgtaaatgtgctctcaaggggttagtcttgagctgtttctaaaattaaccatctaacacaatatgtacccataatttgtactcagatacctgagcagtcattctcaaagtgaaataaatgattgaatttttcccaatgtttctgccatgtttattactaagtctcattgcaaattgaatagctaatgctccaagctaggtgatgatcaatcttaaaatataatcaatactttaaaattatattatgctttcagaattttcattatgaagcagatcagtcttgagcctctcccaagagactttagttgatgggtgtatcaaaagaacttatataagtggtttttgcccrtaagagaatctcatgttataagttccaatgacatcattattataagcttattgtgtagcaccttgaatttatctaatggtgggcatctaagaaaagaagtatattttaaaagtagtgttaggttaatcagatcctgcttaaaatacgtgcaaataatatttggtggtcaatattattatcgtcatttgaaagacgaaagaacagaggtccagagaagtcaagccacatgtccaacttataagaagtcattgccggaggttgaattctcaaggatccaatcctgtgccctatccactcctgtcactcagctgtgaagccatcaaggatttactataagcaaaactaaaagcagcaggatctccttcatttgtgatgtaccaaagagataaggtccaatcacttaacaaaatgaactgaagctgattgcatctgaaggacagggaccagacgatttaaaataacttttttttggttcatgcctaaatgaccattgatgtacttcacttagaaaaaaatactgtaaagataatgcttcgttaatttccctcatcttaatatagtaacttttatgactagctaataaacattttcatcagaagaacagagctaatgatgacacttctgtttaatcagggacttttcatcacccttttgtacactgagtattccattttctttccctagtcttttctaaacacacacacgcacacatacactttttctgtatgaaacattttaaacatacaagaacagtgcagaaaatatggcatttatgtgcacacaaccaatattaaactcatattaacatttggccacatttgcttcatagcactctttcttttcaaaggtagaaaatttaaaagacctaggtaaaacttcacttccttctttccttcccagagttaactgctctcctaaagtcgatatagtttgkatcattccttgcatgtatagtataatgktactatatatgtaagtacccataactataaattactaaaactctttttrctcctaaaatttgcataaatattttacatgttttacaaatagattttttcaaacagctttgtttttgagatttttttcaggtcgataaaggcagatctagataatttgttcctgtgtaatattccrttgtatgaataaaccgcagattatctatttcctctgctgagagacattcaaattatcttttttttaaccacacaaacagggcttcaatgaacttccttatgcctatttcctgataaacacaaatgggagtttctttgggatagatacctggaagtggaattcggtttttatcttcaaatacattagatattccagatggccttccaaagtaattgtattcatttccgtatatccatatatatgtgtgtgtatatatgcatatacatatatgtatatgtgtgtatatatgtgtgtttatgtgtatgtgtatatatagagagagagggagagacagagagagaacacttttttcccatatcatcaccaacacgtcacttggtgttaacagagttattattttctttcagtctaatgggtgtggtggttttaatttgtactgccttgcgtaacaggtgggattgagtatcttttcagtattggacattggagtctcttcctcttttaattgcatcactttgtccttttcttgattttctttggagcagtttttatttttctaatcgactcataggaattctttatatattacagatattgatccttasttatatacattgaaaatatcttgtctcagtctgtgtcttgccttttcactttatcttttctaatctatttcaatatttttattttatttcagttttcaaaataaaaacaaattatggaaaactgagttttatgccttattaataggcaaagtcagatagtttctgtaaatataattgttgtgctcttcctttcttccatataacttccacacttgttaaaactcaagcccaaattctaaaaatatcactgcatttctatgattacagggcaagataagatttatttgggatcatactgatgtgggacacatttcttttcctcttagtcttctttctgcttcagcagaaaagctaattgcttatgcgtttcccaagcccatctgcccagttgagggaagaatctctgtctagctagaggactgctcttctcacaagtctgagagctggtatgcctgggggacatgtctgaaacctctctgctcatgttttatcctgtttgatttcattttctttaagtgygagcaatgtattttctgtttgtgaataagattagggaggatgcttttccaatacatgttcataaaatgaaaaatgtttggcaatgcagttttggttttttacacctaactaggcagcaggtaacatctatctctgcaatattgcaaaactctttctacctgttttttttttctgtctaacctagaattaaaatagtgctgcatttaaaatattttttcattgtcaatatctttgtgagtttcagtaattccttttcgtcatcccataggcccagtggacattttagatgtggaggaggccatgtcacattcactcagatgtcaatgtttaaggttcctggatggatggtaatatgaaatgtttagaggcagtgtttatatggtttgaacataaaccattttacacttcactgattttcaccaaacagagaacatttctgcctttgtttcctatgctgatgaagccatattcacctctttagacataattgccttaaagtgaaagaagtcattttttaaactctgttttctagaagtctgtgtcactgaactaactgattagggaatgatagagaaaaaaaggctgggcgtcgtagctcacacctrtaatcccaacactttgggaggccgagtcgggtggatcacytgaagttaggagttygagaccagcctgaccaacttggtgaaaccctgtctctactaaaaatacagaaattagccgggcatggtggtgcatgcctgtaatcccagctacttgggaggctgaggcaggagaatcacttgaacccgggaggcacaggttgcagtgagccragaccrygccattgcactgttgcctgggcaacaagagtgaaactctgtctcaaaagaaaaaagagacagagaaaataagatctgtatgtaatagttggatgacaaaacccagggctcagacaagaatctagrttataccagcttgaagcagatgagaagcccaggaacataacctgaatgacatcataagtcatggggttaacaaactgacattggtagtgtaagagtccaaatccagataaagagccaagatccaaaacatatactgtgagagcgacagtaaagaaccaaactcaaaaaaacaaagccgtgggaggaaagcaaagatcaagtagtagcaaaccaagaaatgatgtggaggctgtttgttttcttaagcaggtaatttygtttctctgaatctcaatttcatcatctawgaatgtagagattcagttatttgcaagggctcttccagctttaacatgttttgattctgattctagaaagtgaaaacacagaggactaatgttaaatcccgctatcgggagctgtctagtctcatgagaaaggcagaccagcagtcaggcaaataagacactggtatagaatatttaggtggttgtactgcattttcaatctttataaattttctaggtcttggacatacaagaggtagaaaagtacaagtaaactttcccttctaaaaaatcaagactttattttgcctataatatacagataaaagatagtggtcagactggtaaagagtacttaagtgagcagtgtaggaaggaagaaagaggtgagagaatgagaaggaagatataaagtttttaaagtaagagttgttaggaaacaacttctcctacttcaaagagaggtttagacactaacagcaaaaggggacctgggagtgggggaagatagatggtactttaaaaatgggggtagacttattttcctgcataataacaaatatatttctcatccatgcatatatgtactctcccatagaattgatgtagacatagggaatgatatagcatattttagacagcagttcttggtatcaaattatgttgaacatgctttaatggtatgacatgaaattgtaattaattctcacctgcttattccttaagccaaaaatcactaagccacctgtggtccacggaaaattattttattggcaatgctgtcatgagcctttccatagcccacccttacatattttaaacccaacttcatcccctcgaaaagcattcctattgggcctgaaacagctacacctcttccctatgtccttgaagctacttttaacgaatagctaagtgggatgactcccctgtggagtgatattccaatgatcatttttcacttatggagtcctgtttttgctgtaatttctttcattttaatatttcccattaacttgaatcatttatgaaggtaactctatgccaactctcagtgaccagacaaactgaaaacaaatcagtgacctcttagaagctaatgtgggaaatgtgtcctattgctcccaataggatgggaaatattaacacttagggtaagaggttaataaaagctagaacctaacgttgtaacaaattcattcatagagcagaaatgtattttaacattttgtaatacatatataaaacatttataaatatcaactaatrtatatttaatgaatacagcaaggattctactgcctaatatctaaatattatatttcataattatgatctgctcactgggcagcatttcacagatgagaggtcaaggctgggaaaacaatttctagaagcgtaagccccaaatgtactttttatagcattttagcaaatcagattactgtatttacccatgttcatctctatcccttaattttacaaaggaggtagtcttataaatgttttagtcaaaagatgtctactgagtacctcctgtgtgctgagaagttttaaaggacagacagaagttggccaggtcacaaaatgaggttgaccttttcaggcagtgggaatcacatatgcaaaaacccagaggcatgagagagcgtggaattattgaagaaactaaggctagtttagtttaaccagagtgaaaggtgcctgttggggagktgagggcagagaagtaggcagagaccactttatgaagggccctcttatattatctgtagaattcagactttcttctgaaggcagtggggagcatataagtgacatgattacatttgcatttcagcaagctaaatctaacagcatcctgaaataaagattgattgaggaatggttaaatctggagacaaggtagttgattaagaggttatttcattggctcaaatgagaaatattggtttactaaaattgtggaagatgaaacaagatgacgggggagaagctgcatcaccagtgtgagcatgaactttagagtctcccagaaataacttttaattccagtattgacctaaaatgaaaaagctgaggcaaaattaatattagtaaagagttcttttgggccagtaaagagtttatttgggccaagcttgagggttgcacttgggagcatagatccaagttgccctgaatatacactccccttagcagcagttacaagtggatttttttaaagggaaagtagaggcagttcctgagctgtttaccaataatttatattaaaataacatactctggccagtgcagtggctcatgcctgtaatcccagcactttgggaggccgaggcaggtggatcactttgagctcaggagtttgagactaacctgggccatgtggcgaaaccccatctctactaaacctacaaaaattagccgggcgtggtggcaggcacctgtaatcctagctactcggaaggctgaggcaggagaattgcttgaactcaggagacagaggttgcagtgagctgagatcgcaccactgctctccagcctgggcaacagagcactccatctcaaaattaattaattaatttaataacataaaatacactatggattgactatatatttttctttgcatcaaaattccaggaatacgaatatattggttgaggcagctagtgagaaacaaaatgacaacaattgccccaggcatggcggggggcatgactgaagtctcatacttatgtctttctggacctgcagacctcacagagctcagattggtcggagctgtttttcttttctcaccagcaataccatttactatctatctctgtggctttagcaagttattaacttccttgaggctacagtgatgtggcacagtccctgacatgagtgtgtatttagcatgctattatgatggtccgatatacgagattggtgaccacttatatgcaggggttgatagaaaggacataatctacagtaactcccataatttcccttcagataaagtggtcagtggcagccaaagcccctgataagttgaagagtgatataaatggcttgtttctcagtaataagagaaaaagtatacaatattatttgtgtacttatttatatttggggatatggtttagaaataggaggagaagctgtgactgtgaggtagagaactagggaaaaaagaaaagctaagcaaggttaatgagacagttggaggttaggagttactctttgtaggttctaactgaaagctaatgaacgatttcaaggatgcaagtaatgtaataaaatatgagaaatataatgagtcaaaaaatcataggatgctaaagctgaaatggactacagagtccattatgttcagttaacactatggctccagtatcttgcaaagaacgtaagcattgctgcacaaaacctaccttgttgttcactcaactcattatctttctgggcagaaactttttgaaagtatggtggtgattttccacgaaatgcttctacagagctagagggatcatttgataaccwattgtagakccatcattaaagaatgttagtaaacacctcttgaactgatttagcttatgtttagaagttcaactttctcctgtataaatctctcagtttaacttatactgcatacctaacttttagctgttggcttttgttaatttccacctgtcattacaggacataatttccattgaacyttcctttggctctttttagttattttttattaaaaaaagatgtgccttaatggtcaaaatgcacgcaaccatttgttttcctcttacatcgactaatgaccaataataataacatctaaggtttattgcatacttactatttgctagacattgtttcaaaggctttctggctggctgtggtggctcacagttgtaatccctgcactttgggaggccaaggcgggaggatctcttgagcccgaaagttcaagaccagccagggcaatatggcaaaaccccgtctttacaaaaaatacaaaaattagcccagcgtggtaatgaaggcccatagtcctttctactcaggaggctgaggtgggaggatcgcttgagcccgggaggtagaggctgctgtgagccgagactgctgcactccagcctgggtgacagagccagaccctgtctcaagaaagggctttctatatgtaaattcctgtaatctttacatgagatagatactgtttttattcctattttatgaaagaagaaaccaaagccagaagacttaagtactttatgggtgatcagacagcaagtgaattacagagcctgtactcaaacacaggcagtggcagtctgagtctggagcccaagctcttaaccacctcatcagactaacctctaacttttgctggctaagaaactgacactatattgaacattacacaacactggtctattcagatataattatgattcccttaacaatatttatttatctcattttgcctctactaaagccttcatacaggcagttatttttgttttgacaattgccttaagatgcatatgttttcatttgcccaaattttgtttaagtttttgttatgaacatacacccacggcaatggcaagagttgcattaaaagagggggaggagggataaataaataaataaggcctcccccacttcttgtatctcgagggactctgggatgtgataaaacaaaacactgttaaaaattcatactagtaacttgcattgtatattatgcactgcaactaaactttttagtgtctcggcaaagccctagagcagccgagaggtacctcagagcacagaaagcacatttgaaatggtaatgagaagcgagccccgtgacaaagtgctagtcggtgaaatatttctctgagacaaacatatatttggagagggtagaaagtcattgactgctgccataccatgacctattttaatgttttcttttttttttgtccacactatactcagttgacttcacagagggcacaattttaataatgcaataaatgccaggacatttgaagtttgagagtaacgtgttacgttattagttctcaggatgtcaactttgggtttcattgtttggaaacagcagcagatcctctattaaagtacttccaaggtttagaatccttgaagtaccactctgttttaaagataattccgaagttcttcttcatcatgccttaatagactgtaaacttgctttttctctggaccattggataaacagtgagtgaatttccttacataacaccattttgctggtacaaagtttgttaaagtctcagtcttctgtttgctaatgaataaaataaaataatgaaaaagaagccgcttccaaatttgcaagagtcattgagtaccgtttctcatcacacacatacatgcttcaatatttagtgcagcccgtgggatgcttgtacaatgagctcccttaaatcagctgaactttcaggtgctcgaggttttgttcagaacttttgagtaagagattcagagagagaggatgcctaggaagctcttagtttgagccctgagaagaaatttaggctagggaaagaggaagggtgcagtgggttgtgaaactaaagaaacactctccagagatagagcactcaagacacagaaaataaagtcgtgagagtgttgctttcgggataaggtaaaaagacaagggaaatgcagatcttcaaaaattgtccttgactaaggcaaaaacaactctggactggccctgcactaaatcatcacagcccattacccccaggagctaaaaacgaaaatacctaaaaacgtggaacataagcaaacaaaagccagcatggaactccagtggcttatgacatatatgtgatgctcttagcccccctgcagaggttttgtggagttcagtgtccaaactttgtaaaaatctttgtgtgtataagaggtgggaatggtggtagataggctccacaacctgtttagaaaaagctttgattttttttcttcattatacgaataccatagcccttcattaatttgggaacaaatgagttcacacgcagacttacctagcatcccagtaaacagtctttcccctgcaatttgcaggatcacagcctcttgcaacctgagtcgacccaattatttctgagatcaccaagtatctcacatgttcaagatcaatcttttcatgatttccattctaaaaattatgttgatgatcactacatggcaagaaatccaggtggccattgccataactaatgataccctctttgagtgaaccctttcctattcaggactcccaaagccacccatctctcaatgcacgacgttgctactgcttctcagttctcactgtgttgccagagccatactatgtaccaggcagaaatggggagactgcccctctcccctgttctgtgtcaaatgttttcgctcagtttctgaagcagcaccacttatgctcctttcttcatgaactccttcaacctttgtcagctgcacttatcaatgtatggactcagggagccaggcagaggacatgtgtcatgccaagccacgtccttatttcttcatttctagccccacacatttcccaccacaaatttgcatatgacacatgtcctcaaacacctcttcctgctactttctattcaattaactaatgcaaataaactcccctgggagatgttatatttccccatgcccactcttagtttacactaagccgggaccacctaactacacaggtgtcccaagtgccaccgatagtactatgtttgaggtacgggggctgaataatttttcccaggttttatgaactatcaaaaggcacacaatgaataaatatttatgaagatgttttaattttgggagggatggggtagacgtagatagggtttgtgatgaatattgcccacagattataaatacagataacatacaactaagagcctaagcaggtctaacttttaagtttagagtgagaacacttacaggaaatagtgaagttgtccaaactaagctctcttttgtccttcatttgaatctctcacccactaccttttgttgccttggtcccttttaaagtagaggccactagtctatgtatactatgcccctgagatgaggaatatggtggcttgaagaatgtaatatcttagaggacacagagtgtgtttcatgtgtatctttccatcatctagcatgtgtgtactcccaacgaatattaaaaaatagggtgtgaccctcttaaccataagagatgattcctcattttgagatgacgtgctctgggaataaagaatgcttccttcattttccgtgactgtcaaactggcatctttcatcagcactaaattcccttttaagtagtcaaatgccttacacagttttaacaggaaatctctcagcacctctagctatttgttgaaaagaaaacaactcttttttttagatacatcttgcagaaaaccatttcccaaataaaaatttaaaagtgttatcatatttagagggaaagaaataagcccctgaatcatagtgccagtttcatgttttccttaatgttgcaaaggtgattatttttgccataatcttcttctggctgttagcccaggatggcaggctgcatagctgccttgttaaataaaagagaggggagactttcttgaagccattttttagaggatttgtacatatgtgtgtgggaagagtgtgggtgaaatcctcaggacaaaaatttcccatctactacttccataataattcatgaaaaaatgagttctaccacttgttattaattcaagtcctggaaatatactctaatcatcaatatcgtttccaaagaacatataaatatagtggtgtgtttcaaactaccaaagaacttacactcaggatgcattttgcatctttctttcttttgttttctttctttctttcttgtgtttagctggaagtcagtgttgttaaataaggagagatacaggcatatacaggatggattagttccttgccctcagccgctttaataatgattttttacattttttgatctattcaaatgtgtacagtgctaaaaagaaatttatttgaaaaggatctaattggcatgagctgccattgctgtcacactgaagtcctgctgacaaggctgaggttggcagagaaataaaagcaactgttaatgtcagaaatgagttgtggtaaaacatactgtttgtttaatgttgataaaagggcaggtggaaagtacatgaaattatcttctcagagagttcttgactcataaactgcaaatgctcactagaaaataaatttatgttttatttagttgtggctaaaacaatataataacaactatactaggagtatagcatagagcgggcactgctattatccgtgcttgtgccaaatagatctaagaattgtaaagaaatgtgtttcaataagatgatattctcatgtatcctatgactattataaatacttaggtattaatatcagagcagaaggattgtggtatttctgaaactaaccctagattaagatcatttactgttagaaatgaaaacattgttgaaaaactgtaaatgtttgttaaaacctgtttttaaatttttttatattcagttttaacatctgttacatttctttctgattactcttaaattggccatgactcctgattgtttatcataagttttaattctctactttccttatgtcatctgaaaattgtagcactggggcccttcatattttaaaggttgtcttctgttgaaatatatacwtataaaggattgacctgcagtgtaaataataatttacctctttttatttattctttaagcctgtgttaaatatattgagttttcttaaagagggaaaacctgtgaatagttaactcaggccaaaggtattttaagttgtatgttaatttctttatgcagtaaagctatgaagctctgacttggcattataactatgctcttcttggaataataagggtacacgctgcttatccgattgacacttctttcaaaagcagaagatatttttattgactttggtggcaatcccatattcagggcttcctccatataaaaaawaataataatgtgaaccttgaccacagggaaggtcacagaccttggatagaagccaaatatctgtgttttgtttagggccctcaagcaaaattttcacacaggatttcctcagattcacttcactgcaaaataaaggcattttcactccctgccaggtttagcatgagaagcccctttgttgtggggctgcttgagcagtatttacacttccttattgagtacytgcaaatgtctcagctagaaaagtgaaagtaatccaggtaggcttgataaaaaattttaaaaaccaactgggcgcagtgactcatgcctgtaatcccagcactttgggaagccgaggcgggcagatcatgaggtcaggagttcgagaccagcctggccaacatggtgaaaccccgtctctactaaaaatacaaaaattagccaggtgtagtggtgcactcctgtaatcccagctactcaggaggctgaggcaggagaattgcttgaaccagggaggcggaggctgcagtgagctgagatcgcgccactgcactccagcctgggcaacagagcaagactctgtctcagaaaaaacaaacaaacaaaaatttaaaaacctgcctaaaagttttagcaagttcatctttcttggcttgctttactcttgcaaagaatctgtaatttggagagaactgactcatttttgctattagaaacatttttttttaaacaccagtaatggaagaaacaaccaagggatgaggaagtgagcaaaaagtgtgaccttcccaaatattggtcctgttaataaaactcagattctaaactgttgatgtcaagtcatttttaaatgttatttttcctaatttttgagaaaatagatgatcattttagaaaatgtagaaagtacagacaagtgcatttcaaaagtacagaaaaatataaaaatgcaaggggggaaactattctgtcacaacccagaaagaacaactgctaacattttggcttatttgcttgcagatttctgaattttttacataatttggatcatattatttatgtaatgttacatcttgcctttcgtttaacacttgccacatgtaagttctaacatctgtaaataattttttggaaatcattttaatgactctattatggctcataatttacttaaatattcccctaacagtggatatttagggtgtcttcaattttttggcactctaaataatttttttttttttttgagacagggtctcactctgttacccaggctagattgcagtggcaccatcacagctcactatagccttgatatccctggctcaggtgattttctcacctcagcctcttgagtagctagaaatacaggtgtctgccaacacgccaggctaatttttcaatttttaatagagacgggtttctccatgttgctcaggctggtctcgaactcctgggttcaagcgatctgcccacctaggcctcccaaagtgctgggattacagttttgagccactgtgcccaggctctaaataattctacattgagcacttcttgcatgtatctttgcctacatttcaaattatttcagcagtagagcttccagcagtaaaataataggtcagacagaatagacatttaaaaattttctgctatatggtttcaaattaatttacagaaaaacttaactaaattatgttacaaccgatagtgtatgagaggacctattactcactttcaccagcactgaattttatttttttaactgtgttaatttggtgagcataattaccatttctttctttgaataattttcaaactaatgtaaactcaatggcacacctgacggctacatcctacaccacaggcccttctgaaggagacaaggccctttctttacagtaagaatcacctattaagtatcgatgcatgtttgaaataatatttttaaagtatattatgcaaacatatataagttaaatgcaaagagtggttaattggggattagaaagaatcaaaaggaaaaacatttgcataattaatgcttgcttcttttctttattttcaatcatggatattatagcccacaggattaaaacttaaaatgtgcagaagtagcatatctgaattgtttacatcttttgaaattgatatgtcctatccagttttccacctaaaaggagacaaagaagctgggcacgatggctccagcctgtaatcccagcactttgggagactgaagcgggtggatcacttgaggtcaggagttcaagaccagcttggccaacatgatgaaaccctgtctctactaaatatatatattatatatataaaataactgggagtggtgctgggcgcctgtaatcccagctacttggggtgctgaggtgggagaatcactggaacccgggaggcggaggttgcagatcttaccactgcactctagcctgggtgacaaagtgagactccgtcaaaaaaaaaaaaaaaaaaaaaaaagaaagtcagcttatgtatgaaaaagaaatttgttgatttctactaatagaatatcatacaatccaaaatcaatatataagataatgttattttccttactttcctgtgtctcgtcacgttcccatttcatcatttttacttcagtgtaagttacctttgtgtaatgaggaagaaatctctgtcctttttaaaattttatttttggtaaggcaagatttaggatgtggggttaatttatttctggaaatcctcaagttggccaacatcccaccctaaagaggaacatgaatctgacattaaagtgtgaaaaggtaagaagtaatattgcacattagtagtactacacagtatatggattgtgtttttaatattcaaaatgatatcctcctctgattttatctggacatggtaagaacaactttgcagtggttaagagtggttagattttgaagccaaacactcatgattccaattttgctgctgccttttaccagctatatgatcttagacagtttaacatcttggaaactaaatgtgttttaatctgtaaaatggaaaatgttattacctctcaagctggatgcaaagatcataaaattattgggaattaggtatagcacacttttcatcgcagactgcctgagtacaggcatgtatgtggcactccttcttttacttaagctgtttggttcttccttccatcaggtggctactaaccacacttagtgttgtctttttgtggctgtctatgaagtgcataaagaaaatgtgtaaagtgaatagagcagttaagaaaaatagatgctgacagatccatgacatttgcttcatttaccattaatcagctgagttaaataaacagcaattatttttctttttttcctttcctgtcaccagacagttaatcaaactgatttcagtttggagtttgcaattttctcttaaaagtttttaggaaaaattttgtcaaaaaagcaaattcctcataaaatattttattaaatattgataactatttcaccctaacattttgtgcagttaaatgtaaatgaaataaatgtgaaggcatgaagacaaataaagaaaggaaggaagtcctataatgtaggtctggttaaataaatcatggtgtacctataccatacagcattatgcagtattagctgaaatgctttagaaaactggcatggggtgtttttcatgatatgttaagtggaaaaaagctggtaataaaacagtatctatgtgatgatcataatttcttgaaaaacatagttatgttttaaatcaatgagaagaatatccactcaattgttatgattatgattgcttatgattgttacctctggatgacaagattttttttcattcattacagaattttatctttagtatagcattttaatattgtttctaaattttatctttagtatagcattttaatattgtttctaaatttgtgtgtgaaacctatattacttttgtaaattttaaatttttttcacgaggaaaaactaaatctataagagtagtatactcacatactactcttttggggtccatagttaaaagctactttttagtatttcgacttctgtattttaattttctcctttgccgggcaaaaggaattaagaaatgttaatgataatgatatatcaaaacacaaagacaaaaaaacttaagtagtctgctttgctccaattttcctattttacattgatttagaatgatatgcaaaaaataataataaatcccagcccaagatcccatgtgcaaatttgtcagtatatttatttgtttctacataatttatttgaggatcagctttagctcaaatgatcactgcctcatgccagactctgttataacacatccgtctaattaatttctctgaaaatttcacttgaatttccgtttttaccaatgcctattgccctttagtaccaaatataacatgtagatgtctaccatattataggaatagttgtgagatatgaagacaagtaaaagaaaagcaagcagcttagtataacagtgtaggtgttagactcaaaatagtacttagcctattagcatttgactctagcaagactttgcaagaggacaaaagttgttaccaatgagcgttttcccacaacccagttaggacttggtcataagtagaatgtaagctcttcagctatcatccattactttcctatatcttcttggttactatgaaattctggaaacataagacataagatagcaggattgtaggtaaaagttttttgcattcaacctgttaccgattctgggtcctagattcttttctgcttctgttgcccatgacaaatgtgtgcttgctccaggcttattcagctgcaacactggattatagacaaacagcatgaagctcaaatgtcccagtccttcgctcggtcaataagcacttcttgagagaggcacagtaccagcactttacaggttacacaggagaataagatatgaacttactctctggaagcttgctctgctagaagaaataagatatataaaaacagggcttataatatgaggttagaaaatcagaagtcctttgagaaaggggcaaataagttcaagtgcagtggaagcttgaaggtaaattggaaaggatttgtggagaagttccatttcagttatgacctacagtacaaggagtactttggcacaagtgaatggatgcaacagacacatgtaataaactctttaaacagtctctggtatataataagcattagctacatttgttagagtaaaaagcttagttgctgtaacgaaatgacacaacaaagattgtttcatgtaacagtccatgaggtgtgagcagacactgctgcacacagtctgtcactatgcagggaccaggattcatctcttcatgttcttccatcatcctctaaaaccattgttatcatctgagtatttgaaacgattcctaccacatcctaattctagcaaggagaaaggggaaaaagtgttaggagtatacttgtgatgtgttaaggcttccattggtgagcacgtagttgcctacctgaactggggctggaaagtgtgttctctggctgagcagtcatgtgatttctataactccattaccaaggaagaaaaagaaaacagattttggtggatagctaatagtctctgccccagctattattattatcattcttgaacaatttgttactatcatcaggccataattgtaccstagtaatctgtgatggctagttcatctccccaaacagtgaattttctactgtacaagtggcttaagcccaagatattcttgtcactattcccatggaatagaattcaaaccattcccaaagcctagctaaagctatcactgagtaaaactctcttagcttcttaaagttcatatatttgtccttaagtgacctaggctgtgaagaaatgggtgataaaagtgtgaattacrgaaccagtgcttccacctgcactgaattctctgctcttctgaagaatatttctcacaatagagtgtcaagggaagattggttgaackgttttattctatactaaattcttctcttttgcttttaaagagtcatttgccagaagaaaacctcttcagcaagttcatttcaacatttcaaataatagttctcttttcatgaactattttgtagaaaattacatgggtaataatatcatgggaagagtatagctttcatgatgtgtattttttctaatcgttctaatttttcatggtaatctgaagtgccatatcatcttacccaagctcaggaattgtaccaattggggattttgagtgcttggaagaaatgtctatttttaagcaacttttcattctctatcctgttaacatagtgatttatttgtgactcagaaatggaaggacaagccacctstctgtagtgatcacctgtcttatggaatcttaattgcaatgctaattcagtcttggagttagtgagatagtcaactaaatgataagtacaagatattgataaatgacaagggaagtatttagtaagtcattggtaagtctgttttatcttaatgtgttgagaaatttgaaaattaggagaaggaaataagagcatatttatgaaattttctaaagtactgctctgtcccagatcttgtggtagatgctgtggagggttacgtaaagaagggagattgagctcagcctttggttaacctttgccttcatctaatagaagacaacatgtacttaacaaaaggggaagcaatactggtaaggcaatatgttaagtgtaggttacatcagaaggcaagaactggcctgcaaggcagaagatctggttctcaggaaggatatcaccaactgaatatgtgaccctgagtaggtttcttcttctctctaggccttagtttacccacctgcactatgagggagttcaattaagtggattatggcccctaacagattatgtgattatttgaactatgtaaccatatacatagtataaaatgcttacttacattgagagaatgcagagtactgagactaaacagtacaagtgtgaggagttcacattctcactgatgacaagccttaatggacaaagattacataagatttttgagtgattgcattcaatgaacttcaaggacccttctaatgctgggactttgtgattcttggtaaaatgtgagatcccacttgctcactaaaaatccccagaagatctaaattggatgctattttcatgtctgtctctactcatcagttgaattggagagaacccaaatgaaatgaataaaaatggaagatctgtggtgggggggcggctgggaggaaggatttctttcactttaggtaagataaaactgtataaggaaagacatgaaagtaatgtatgacttactgaaaagtgtaagtaaaagccagtaaggaagcaaaatgggttgtctgagaccgggaagaattgaaatgaaaatgatgggctgcatgttggagaactgaaattaaggcaaaatactaggacaaaaacacattgacccatacgtgaaaagggaacagagccaggcggggcagctcactcctgtaatcccagcacccagcgctttgggaggccgaggtaggtggatcacttgaggtcaggagttctagaccagcctggccaacatggtgaaaccctgtctctactaagattagcctggcgtgatggtacacacctatgatcccagctactagggaggctggggcatgagaatcacttgaacccaggaggcagaggttgcagcgagcccagatcatgccactgcgctccaaccagggaaacagagggagattctgtctccaaaaaaaaaaaaggaaaggaaaggaaatgttactggaatattttaaagtcatatagcccagtatcattcagattaattaaaaatcttggagcttgacaatttcgtggtgctgatgagtgagagagggctaagattagcagtagctaaagaagggaagtttcctacaattatgtaggccagaaacagtttcccccaccctctcacgccgtatgttctcttgcctcttgcctgaggaagagccactattggtaaagtttgatttgcacaattttgtagtaaagaaataattagagtttaagactgtagatgtcacaccactgagaccgtatgatctagtgccaattctagattctggtctatactctgccaatgataggccaagtcactaaacctctcccacataagttttctcatttaatcaatgaggacagtcacttcatggggtaaaatcactttggaatttttaaggtgcaatagaaactcactaatttcttgtaccttctttctgttcttcctcttattttaagtgacttggttcataagactgtgcaatgaaaatatttttaaatttaggacttattcaagcacccagatggtttgaaattcagatgaatttcaataattattttcatgctagccattcttgattttgctgtcaataataacacatagtcaatttaaattacactgaaatttgtggttgaacttttaaatctttgttggattatatgaaatttatattttctccccagaatcatgtcatcattgtcttattttgcctgacattggcctggggtgcatacccttgcaataaccttactctgggtttactatgcttgctcttaggcaaattgtttagtttgtttttaatgtttaatgttacacaacccaacagctttctgttgtgtactgacctgaaccaattttatcatgcagaatgcttaggttctttttgataaataatggtaacctccaaagaagtcttacggtggttgagggtgactctctccaaaatctcactatggggttatagtcaaagaaaatctcaaaccaaatcctaccacaaatgtttattatttaaacatttattagcatttcagtacataaaacagttcatgtaacctgttctgtaatctcaagaaaatcctagttcactatcctttcaggtatcctttcaggtgctttagagattaagagagacaacttctctaaaggagaattataaagagtgtatgtcctgccatataatagattttcctaatagtgagagaagatatatatagccatggtattaagttcagagatggtgtatccttggacattggtttattgagaaataattatgatgacaatgataatgattttgaaaataacaataaaatagcaaccgcattaccgcctcacatttatacctccaaaagataaatttcgcaagggcaggaatgttgttttatataccactctatctccagcacatagcattttgcctggaacatagtaggcatttagtaaacttttgttacatgaaccagtgaacaacagttacggmaaacagtttgacaaactgatgagtcaggcagtgctctaagctctttacatgcattatcacattcagtacaaatctgtgaaagagccaagctaaataaagctttcactaatatcagttttcaggaaatgaagtatactaattaattgaattttctggttaacagagcgttacatttcaattttttaaattttaatccttttaattgcaattaaaaaaaaaaatcagtgacagccctgcctcagtaaatagaatctagaagacattcttgaattttaggatagctgattgaagattttctcagggccccagatgaaactccaagcatcaattgttttatgcagtatcttaaacagaaaatgtgtaatataatacattagactaaatgtataaataatgccataacattctctagaagttgtttttcttttcttttcttctttcctgggggtatgggtgggattatgttgttgaagctttaatattatcttgttttcctctgccaactctctcattcccttgtacatattttatggagagccagtaaatagagcatagtggagaaagcgaaggctttgaagcaggaaatgactgcattagaatctttgttctgtcatttaactgctgtgtaatttgggcaagtttcttaacatctcagagccttagtttcctctcctgtgaaatggaggtaaaaccacttagtataagatttcctatggcgattgaataaggtcctgtatgtaagggtcctctgacatagctgctgccactactgtgagaatcccaggatatagggtctgaaggcaacttaaaaatatataacttgcttcaggaatacatgaaatatgatgcacaagtaaaagaatattgtttgaaaatggcaaattttaattttactataaagacacatgcacacgtatgtttattgtggcactattcacaatagcaaagacttggaaccaacccaaatgtccatcaataatagactggataaagaaaatgtagcgcatatacaccatggaatactatgcagccataaaaaatgatgagttcatgtcctttgcagggacatggatgaagctggaaaccatgattctcagcaaactatcacaagtacagaaagccaaacaccgcatgttctcactcataagtgggagttgaacaatgagaacacatggacacagggaggggaacatcacacattggggcctgttgggggttgggaggctaggggaggaataacattagaagaaatacctaatgtagatgacaggttgatgggtgcagcaaaccaccatggcacgtatatacctatgtaacaaaactgcatgttctgcacatgcaccccagaacttaaagtataattttttttaaattttaaaaaaagaaataggaacattgtttgaaaaaataaattaagctattattaaaaataataataaaaataaaaagaggaaaatggcagattttatatggaatgtatacaaatgattaattagaaaggtactttgttccatttgtagaaaatgacaatgataaaatactaatctaaggtaatttttttgaatcttagagcaaatggtccattttataagttttctacaggaaaatgtattaattctgaaaccattaattatttatgattatgagtacagtggctgggctgcatctccttgttctgtttaagctgtggattgataagcaaattcagacatgaaataagatgccagagagtataaaatgtttgagagaaactaaagtgttttcaaacactttataagcactcatttacatataaataacatgcaaattatgagtcattcttctgtatttccaaaagcaagtgcttaaagatattttattagcctatgttgaactattgtatactttgaatatggtgtgagtacacacacaaatgcatgcattcatatacacatacatgcattcatacatattatgcatttattttttaatgatctgtagttcttacaaactttttttgcaaattggtctgagaaaagtttattttgtgtattttgttttatcaacacctattttatcatctcctttcttcccagtgatgctgatataactaccattttatgcccaatgattgattttgtctttatggcagctatatgattatctttgtgatcatctcttgaatatattcacaaatcaaataatttccaaaatattcaagaagaaacacaaacgttttctattcattttcaaacttcaaacccaattctttttcatcaacacacttttacaatattttaaaattcttttacttacttccaaatctacttaacccctaaagaaactttctttaaaactgcttaaaattggaaacaaataccatttttcatacagaggaatccttctctcagctattttaccttattttgttgcatagaagtctttctattctatctaatatttaaataaatatttacagagtctcttcagattgtttcattcaataattctgtttcactgaaccattcgcaatgttttaaatcagctttattttctagagtacagtgtttaattttttttctttattcaactaaagtactcttttttaatgaacagagattctgttattattgaaaattgactctaaaatatgaaatgctgtatacatactgagggtattttaaagaaaaaaatagaatctgttttgcttctgcccataatttttctggcaactatttcaaaggacaatcgttatttaaaatttaatattgtctagtgttttagaaagtcccaattagaacattaaaatttgttgtataatgaaatcaatgttggaaaaaaactccctagttttagcagagcaagtcagttgtgtcttggttttaggtaagcttctttaatgcaatgttttattccataaaactgaaaattgtcttttggatgctgaagaacactatgacttccattgttttgttttataatatgtttgcaattgagctacagcatataatttgatagaggataaatagagaataaaccttttattttatgcacattggtttcatgaagtatataaataagcatttctaaaaccctgagctgactctgacagacccaagatattgatgcagtagcctaccagctatccacagccatgcatagcctcttgaactcctcattaggaaataatgagggaacagtcataaatacatgcaattgattatgcattactactgatgcttacatttgctttcagtactgtttaggccaactctaaactttaaattaatagtttgcagcatttactgatgaaaacattggatatacaccatctagacagaaataacttgtttgtttgatttagtgaaaatgttaaatactgttaggacttagttaccacaaacctggcattggaggctactttcagctttagcttatacccaaagggctgttaaataaggcaggtcaggaactggaattattcctggccaatcatatcctgcccctcccttttcctttatcacacccctttgtgtttaccctactctatcagtaaaggtctamccaggaaagtggaaatataaattaaaacagggagactaatggaacttggttacgcaggccatggaagaactgagaagctgaatatgggacattgcagccacctaactataagcaacaacagggagcaacaccaatgcatctagggtggagggacaagggaagagtcagctgatatggaaaccttggaatggggagctaggataaggagcagagaaggagaaatatgatctaaggacatggatctgaggacaatcagacccaaaacaagcacagttgtagtgggctactgtaaggaaaatgagagaacaaaagtgtgaaaatgagtttgaacccctaagaagtgaataagccatgttaataataataaacaatagcaataataatggtgatgacgataacagcagttaacactcatggagcactctgtatcaggcattgttccaaacacattatccattatgtctattttgtcctaacatagcctagtaagttaggcactatcttcattgtgcagatgaaactggggtatagttatttagcatgtccaaggtcacatagcaaggattcagacctaggcagcctgactctagaaatgaagctgttaacttctgcactacaactgcctcccaaaaggtaaactatgctgtctccctcttggccattctatccttcagccatctatacaattgactaggtcttaaattcatttgatgacactatactaattctgttaagaaataataaaatcattctcatgcaatgcagctttcattaagacacttctttttttttgtaataggtagcacatgcacgtggtagaaattattctggtattttttgaaccatatggaattgctgcttttttatgtcaaaaaagttgcatattggcatttttttatagttcaacctaatgtagagggcatgcagtaaaggcaaatatctccctcaccccagtttctctgaaagccaccactccctccggtttctaaagtacctttagagagatattctgtaaatatacaatcacatatgcagatatttgcctcttttctgcccaaatagaagcaaactgtattcactattcaacatcttgcattttgtcacttaacagctgctgagtttccagttgcacaactgtactataatgtatttaaccagtacttctcaatggaaatttaagttggcttcattgatttgttattacaaaaacatactgtagttaatatatttatgtgtgtgcctttacacatgtaaattactagaagtggaatttcttcctaggtatctgtgcattttttattttgataaatattaatgatattggacaaatattgtcaaattgccctccatagaagtttgataaattggaattcccattatcagtttgtgagagtacttgtttcttcaaatacttgtaaacataaggtgttatcaaactttttaatcctgcccatctgataaacactaaatccaatattgctgtatttttattttgcatttattttattatgaaggagaggcagccatttttcatatgttcaaaagtcagtaatattacattttctgtaaatcattcagattgcttactatgttggattgttggtcttttattattgatttgtagatactatttatatattaagtaaagtagtagtcatttatttgggatttgatttacaaagacttttcccagtttgttatttgtcttttatcatttctgtgggtatgtgtgagtgtgtataattgtttttttaaatgttccatgtaatttaaaaatgcccctcctggaaaaagcaagctatacctgttaatcaagaaatctaaagaaaaaaaagttctatttttaagaatttctaaattggctggctcatttgggctgtagttgagaaagttctagtggttttacttattttaatccaaactactttcttacatcatgtatttccatttttaatttacattttttaattctaaagatgattttatatatgtgctcattgtatacttggaaaactggcatatgaggaaggaaaaacatttttccttgttaccacagtctattcatataaaggtaaaaatagaataagaaggatcaatgaagtccttcagcattttttttattgtgatctctgtttctgatttgtagaaacaatttgaaagtcttttcccaaaagtgatttataaaaagttatcaagttttgtgataatgatactatcactaatcatactgacaaattcatgacatttgctagatagacgttagagttgcatggatctataggaatgtaaaataaatcttcatatttagcaataattgagattacttgtttcttttctttcctgacacatatcaatattttaacaaattattcataatgatacattaaatgctatcttattttagcttgttcaaatttttattattcatttattttcaaattgacagacaaaattatatttatcatgtacaacatgagattttgaaggatatacacattgtggaatggctaaatctagctagttaacatatgcattaccccacatagtcatcatttttgtggtaaaaacaccatatccattctcttagcatttttcaagaatacaagatactgtcattaactgtaatcaccatgcttcataatagatctcttgaacttattcctcctatctaactgtaagtttttatcctttgaccaacatctgctcagaaaatacaattttcacttctggaaaaaccattctcaacctcacagactttggtagtcttcattctattatactctctacttctatgagatcaacttttttagattccacacatttcgtttaacataatgtcctgcaggctcatccatgttgtctcaaatgacaggatttcctttttcatggcttaattgtattctattgtgtatatatgccacattttctttatcaattcatctgttagtgtacrcttaggttgatttcatatcttgactattgtgaatagtgctgcaatgaacatgggagtgtagatatctctttgccatactgattttatttcccttggatatataccccatagtgggattgctggattatatgacagtcttatttttaattttttgagaaatctccatactggttttcataatgactgtactaatttgcattcacaccaatagtttgtcagggttttcttttctccacgtccttgccaacactcgttatcttttgtctttttttataatagccatcataacaggagtgaggtgatatctcattgtggttttaatttgcatttccctgatgattagtgatgttcagcatcttgctatatacttgttggccatttgtgtgactttttgagaaacactgattcagaccttttgccaattttttaatcaggtaatttgttttcttgctattgagttgtttgtgtttcttagatattttagatattaaccccttatcagatctataatttgcaaatattttctcccattctataggttgtatattcattctgttgattggttcctttgctatgcagaagctttttagtttgatgtaatctcatttttctattattgctttgattgcctgtgcttttgaggtcaaatcattgcccaagccaatattatggagatttttccctgtgttttatcctggtcattttatagtttatccactttgaatttatttccctatatggtatgaggtaaggccctaatttcattcctctgcatgtggataccagatttcttaacaactttattgaagagattgtcttttccccgttgtgtgcccttgttgcctttgtcaaaaatcatttggctataaatccatgggtttatttctgggctctctattctgttatgttagtctatgtgtctttttgaaattgctggtgctgagctgttttggttactgtaactttgtaatatattttgaagtcaagtagggtgatgactccagttttgttcattttgctcaagattgctttgactaattggggtcttttgtgattccatatacattttagaattttttttctatttctgtaaagaatgtcattagtattttggtaggaattatattggatctgtatatcgcattgggtagaataaacattttaaagtattaagtctttgaatccatggacacaggctatctttccatttgtttgtgtcttccatttctttcatcaaggttttatagttttcattgtggagatctttcacctccttggttaaatttatttctaagtatttttttgtaactattgtagacaggattgtttttctttctctttcasataactcattaagttggagaaacactactgatttgtgtatgttgattttttatcctgcaactttactgaattcctttatttgttctaacagcttttargtggtggctttaggattttctatatataagatcatgtctacaaacaggaacaacataacttctttgttttcaatttggatgccttttatttatttctactgtctaattattctggatagaattttcagtactatgttgaatagaagagatgagagtgggcatccctgtcttcttccagatctcataggaagatatttcaatttttctgcattgagtatgatgtaaaggtgagtttgtcatatatggtctttcttctgttgaggtactgaaatggtttggctgtgtgtccccacccaaatctcatttcgaattgtaatccccacatgttggggcagtggtctggtgggaaatgattgggtcatgggggcagacttctcctttgctgttcttgtgatagagttctcacaatatctggtcattttgataagtgtctggtgcttcctgcttctctctctctctctctctctctctctctctctctctctctcctgctgtcatgtaagatatgccttgcttccccttcaccttctaccatgattgtaagtttattgaggccatcccagccatgcagaactcagagtcgattaagcctctaagcctctttactttataaattactcagtttcaggtatgtctttatagcagcgtgaggattaatacaggtactttccttctatccctaatttgttgaaattgtttatcatgaaaggatgtgccaaatgctttttctgcttttattgaaattatcatatgtttttgtcctttattctcttaatgtaatgtatcaaatttaactgatttgcacaagttgaatcatcctttcattcctgtgatgaatccccttgatcatggtaaataacattttcaatgtgcttttgaagtaggtttgctagtatttcattgaggattttkgcatctgtgttcacctggagtattggtctgtagttttcttttttgctgtgtccttgtttgatttttgtagtgaacccatcaggtcctgggttcttctgtgatgggagactttttattacagaatcaatgtccttactttctattggtcggtttagattttctatgacttcattattcatgaataattgaattgaatgtatcaaaaagtgtatccgtttcttctaggctatccaatatgttgacatataattgttcataatcatatcatgaaactttgtatttctgtgttactagttgtaatgtctttttcatgtctgattttcgtttgagtcttctctcagtctagctaaaggttcgttgattttatcttttaaaaaaaacctctgtttcattcatcttttcagttgtttttataatttctattttatttctgctagttctttattattcccttccttctgccaattttggacttagtttgttcttgtttttccaattccttaaggcaatattaggctgtttatttgagatctttcttcttttttgatgtagttatcaattgctataaactttcctcttagaaattattttgccgtatgctgtaggttttggcatgctatgtttcatgcttccattttcatttgtctcaggaaaattttaaattgcccttttaatttcatcattggcccactggttattccagagcatgttgcttgatttccatgtatttgtgaattttgcaaagtctcttctgatattcatttctagttttataccattgaggtcagaagagatacttgatatgatttcagtcttattaaatttgttgactggttttatgatctaacatatctatccaggagaatgttccatgtgaagttgagaagaatgcacattctgcttctgtcagatgaaatgttctaaatatgtccgttaggtccatttggcctagagtgcagtttaagtctgatgtttccttattgattttctgcctggttgatccgtccattgctgaaagtggagtgttgaagtctcctattattgttgtattgcagtctatctcttccttcagctctactaatatttgccttttatatttaggtgctctgatgttgggtacacatacatgtacaactgttatatcctcttgctaaattgacccctttatctttatataatgatcttctttgtctatttttatagtttttccttaacgtctattttatcttatrtaattatagctcctcttgctctgttttggctttcatttgcatggagcatctttttctaccacttcactttcagtctatatgtgtccttatagattatatatgtctcttgtaggcagcatatagctgaatgttgttttttattcactgagacactctgttttttgactaaggaatttaatccatttacattcaaggtgaggacttactgctgccattttgttaattgttttctagtagttttgtagattctttggtaccttccttcctctgtktgtgtgtgtgtgtgtgtgtgtgtgtgtgtgtgtgtgtaagtgattttctctagtgatatattttgattccttactttgtatttttttgcatctactgtgtgtctttgctgtgtgggtaccatgatacttacaaaatatcttgcagtcataacagattattttaagcttatcacaacttaactttgatgacaatttttaaaaactctacacttttactgcactccccccacattttgattttttaatgtcaccatttacatctttttatattgcataccacttaacaggttattgtagctattattttaatagttttgtcttttaaccttcatactaaagtataagtgacttactcaccaccattatagttttagattattctgaatttgactctgtatttgcttttaccagtgtgttttatactttcagatgatatcatgttattcattgacattcttttcctttagtttttagcatttcttgtaaacaagatctggtggttatgaactccctctgctttaatttgtctggtaaagtctttacttctcattcattactaaaggacagcttgctggcttgcagttcttttacttcagcagtttgcatatatcatacagctctctcctggtgatagaatttggatatttgtcccctccaaatctcatgttgaaatgtaatccccaatgttggatgtggggcctggtggaaggtatttggatcatggtggtatatttctcatgaatgacttagcaccatcctcatggtaatgaatgagctcttgccctgagttcatgtaagatctgattgtttaaaagactgtgacacctcccctgccctctcttgtttctgttctcaccatgtgatacaccagctcctccttagccttctgccatgattgtaaacttcctgaggccctcaccagaagcagatactgctgccatacttcctgtacagcttgcagaaccatgagccaagtaaacctcttttctttatatattacctagcctcaggtatttctttatagcaatgcaagaacagatttaacacagaaaatggtacctcccccacccttgctcctgctctcaccacataataccctggcttcccctttgccttctaccatgattgtaaactttctgaggccctcactagaagtagatgctgatgccgtgcttcctgtagagcctgcaaaaccatgagctaattaaattgcttgtctttataaattacggagtctcaagtgttcctttatagcaatgcaaaagtggactaacacacctagcctgtaacgtttctgcaaacaagtttgctgctaggtgtattggaacttccttatttgttctttgcttcttttcttttactgctttcaggattctctctgtttttgatttttgacaatttgattatatgtcatgaggtagtgttatttggattgaatctgattggaaacctttgactttcctgtacctggatgtacatctttctcaaggtttggacgtttttctgctatcatttctctaagctttctactcttctatctttcttctctccatcttaaaatccaatgaatcaaatatttgcttttacaatgctgttccataaatcccattgacattcttcattccttttaattctttttttctctcctttgactagatactcttaaataatctaagttcacatattatttcttcagcatgatcaattctgttgttgatgttctctattgcgtttttttcattgtatttttcagccccaggatttatctttgattctttaaaaattatttctatctctttgttaaatttcttattctggttactttacagtttttctcatttattttaattatttatctgtatttttttaatgtggctgagcttccttaaaatagttcttttgaattctttgccaggtagtttgtatatctctgtttttttatggccagtcactggcactttattttgtctccctaataatgtcttgtttctctgattgttcttgatctctgtggccatatgttgatatttgcatatttgaagaaatagttacttattccagtttttttaaattggctttgcctgggaatgcttttaaataataagcccttccggagactccagcaggccctctggcctggtccctaagcctggcatggctgtggccgttgtggtgctaggggagtgccctatgccagggaccactgtagtcggtgtagtactgtggctgagttgggggcagtgctggggtgcagcagaagccccatggttgctgaggcctgcttgccactgacatttatccagggcccacggccactgtagatatccagcagggacacacattgagttcactgcacaagggctatgctttcccatctggtgccagggcaggtctggaggcttagtccatagatacttcattcctctttcacttttttaaatcttatcagcctctgaaaaactagtatgcccattttaccacataactcatttgacttgaatttctactttatgaatttcaaattttttccaggctctcaaggttagaactattatatattgcttctattaatgcctatttgttgttattttctatgactcctcaacgtatttgctattgcagcaatctcctcagcacaacacatttcaaaattattcctcccattactcatgttattcttctcaccttatctgtttttgccatccttcaaggctagcatgtagctgagagagmaatacacatattgtcatatctgagttcctgtcccagctcttactaggtcttagtaattgtgcgactttgagtaagataaatgagataaagcagctagcatatttaccaacacatggaagacactaaatttttttctcccaccctcactccacagggttttttatgaagacttgcctgaatacactctctctcctctgaattgaaaatactccctaggtcacaaaaaccaatgccattttgcaatttttttttgtatttttaattgcaaactatattataaacatctttatgtgaattcttctacttgtacatccattattccctccacaaagcacctcttataacactgaggataccaagcactcaataactacttgttggttggtttgtctatatctcgaaatagaatagcagtgtcaaactttgttatatctattggtaaaatataattctaggaaaacaaacaattggagaacttggttcttattttttcatcttcttgtggtccttgttaatgtctgttggttcacaggtgatgatatacaaaatttaggaagaagaattttcgttctttgttagtggaagaaatttttgttattggaagtcatttttgaaaaccttttcattggttttaggattgtagggggaaatggaatcaaaactgcagtgatttagaatatcataggatagtagaaccaggaaattaacatatttaattatagattttgaatgacttcaaaggaaactcagttttttcaaggtattaagccaggaactgggccgttattataggaggccacttgggcttccatttagccagtttctggcacattcattgacaggaataatttaatgattgtgaataatcaccaagtgtaggaaataaggtcctctttgaatcataaagctttttttaaacatgaaaaatgttatgcatttttttgagaatggtgaaatatgcaaactaatttcatattgtcctaccaattatgaatgtgttattcctggcaggcaggtctctttaaaattgcatatgcttagttctttgccagggagaagagagaaaatcattgtcagcctctttatactcagctggggccaggtgttgttcattaacatgtaaatagtgcaattactgccaattaagattttttaaaacattaaaatctgtgggaacacagttatatcacctataaaatttaaaatacatgtatacatcttagtgctttagattcctacaaggcatgtactataacttgtagtcttaattacccaatgcttcaagttgtcatttatttgcacaatgccacatatgaggttcaaatgaaatgtaaaagtacattggctgagtttatgattgtagccaaatattgagaatttattatggaktatattgattgtcagattattttgatttgtcctttaaaaaatttttctatttcttactccgtgtaaggaactgggttaagtgcaatgtattcaatggtgaatgaggcagacatggtctctgcccccatgaatcttacagtgtagttgggcttcacaaataaacaagcaatacacatacaaataagcatacaactaggtaagtattgttataggtactgttgtataaaatgagagggtgccattagaattcatgatggagcaggatgagtacagtttggatagagaggatagaaagctctctatgaatatgcagcatttccactgaagcttgagggataaacaggtgatatccaggtgaagagagtggagaagagcataccagcaagagataagagcgcttagaaaggccttgaagcaagaaacagcttgctgtcttcaagtaattgacagaaagaatacatgccaacttgaaggtagtggttgcctccagggagcaaaggagcagaacagaatttagaagcagtaagaagggggtttcaagagcaactgtaatactttaattctttaataaaaaatataagcaaatataatgaaaggttaacattcattattatcccttggtggatttatggatgtttgttatattactcttggtacttttctatgtgattaaaatgtttgatcactgggaaaaaatgtgaatgagaggtgagaaagtagattttaaaatttgtttacagtagtatgaactgggctttgttataagaaagagttaaaaactgttaatgtatttttgcctctttaaaaatatttctttgaattttacttgggggtattcaaacccttagccactactgatatctattagcaaactctattatctattgatgacatagatactactatgttatcaatagaaataacttggcaacaagcacatccttctgctgcaccctactttgcagtacaatagtttgtttttgcactaatagagctacttgaggctgaagcagtggggcttagaatgaaacctttattggggggtggggccaagatggccaactaaaaccagcagcaatcagaggctcccatcgaaaagaaccataacagcatgtggatcctgcaatggcaaccgaggtatccaggttctgtcatcagaactgactaggcggctggtgtgacccacagagaggaaagaagaacagtgtggtgtggtggcccatgtgggagccatatggggcaagggagcccccagccccccagccaagggaggcagttggtgccccccaaggtcagagatcccagaggaaggagcaggcacccatctttgctgttctccagcctcctcgagtgacatctccaggtacgggagtgaaccagatgaatagggcctgaaatgaacccccagcaaactgcggcagccctaaagaagagggacctgaccattgaaagaaaaacaaacagaaagcaacaacaagagcaccaaaaaaagtccccacaaaaaccctatagaagggccagcagcctcaaagatggatactagacaaactcatgaagatgagaaagaatcaacaacaaaaaaaagttgaaaacccaaaaggccagagtgcctcttctccaaatgctcacaatgcctatccagcaaggggacagaactggaaggaggatgagatgggcaaattgacagaagtaggcttcagaaggtcagtaataacaaactccactgagctaaaggagcatgttctaacccaatgcaaagaagctaagaaccttgatgttaagggaagccagagaagaaggtcaggtcaccttcaaagagaagcctatcagactaacaatgaacctctcagcagaaaccatacaagccagaagagagtgggggccaatatgcagcattcttaaagaaaagaattttcaacccagaatttcatatccagccagactaaccttaataagtggaggagaaataaaatcctctccagaaaagcaaatactgagggattttgtcaccaccaggcctgccttgcaagagctcctgaaggaagtattaaatatgaaaaggaaaaactggtaccagcaactgcaaaaacacaccaaaatataaaggccaatgacacgatgaagaaactgcatcaactagtgtgcaaaataaccagaaagcatcatgatgacagaatcaaattcacacataacaatattaaccttaaatgtaaatgggctaaatgccccaattaaaagacacagactggcaaattggataaagagtcaagacccatcagtgtgctgtattcaggagacccatcttacatgcaaagacacacatagactcaaaataaagggatggaggaagatttggaaatggaaagcaaaaaagagcagggattgcaatcctagtctctgacaagacagactttaaaccaacaaagatcaaaaaacacaaagaagggcattacgtaatggaaaagggatcrattcaacaacaagagctaactatcttaaatgtatatacacccaatacaccaagattcataaaacaagttcttagagacctacaaagagacttagactcccacacaataataatgggaaaatttaacaccccactgtcaatattatacagatcaatgagacataaaattaacaaggatattctggacttgaactcaactctggatcaagtggacctaatagacatctacagaactctccaccccaaatcaacagaatatatattcttctcagtgctacatggcacttattccaaaatcaaccacataattagaagtaaaacactcctcagcaactgcaaaagaactgaaatcataacagtctctcagacaacagcacaatcaaattagaactcaggattaagaaactcactgaaaaccacacaactacgtggaaattgaacaatgtgctcctgaatgactactgggtaaataatgaaattaaggcaaaaatcaagaagttctgtgaaacctattagaacaaagagacaatgtactagaatccctgggacacagctaaagcagtgttaagagggaaatttatagcastaaatgcccacataagaaagaaagaaaaatctcaagttgacaccctgacatcacaattaaaagagccacagaagcaagaggaaacaaatccaaaaactaccaacagacaggaaataatgaagatcagagcagaactgaagaagatagaggcatgaaaaatccttcaaagaaaattaataaatccaggagctgtttttttgaaaaaattaacaaaatagatggaccactaactagactaataaagaagaaaagagagaagaatcaaatagacacaataaaaaatgataaaggggatatcaccacagaccccacagaaatgaaaactatcataatactataaacagctccatgcaaataagctagaaaatttataagaaatgaataaattcctgaacacatacaccatcccaagactaaaccaggaagaagttgaatccctgaatagactaataaaaagttctgaaattgaagcagtaattagtagcctaccaaccacaaaaagcccaggaccagacagatttacagccaaattgaaccagagatacaaagaggagctagtaccattccttctgaaactatttcaagtaattgaaaaggagggactccaccctaactcattttatgaggccagcatcatcctgataccaaaacctggtaaagacacaacaaaaaaagaaaacttcagaccaatatcactgatgaacatggatgcaaaaaatttcaataaaataccagcaaactgaatccagcaggacatcaaaatgcttatctagcatgataaaattggtttcatccctgggatgcaaggctggttcaacacatgtaaatcaacaaatgtaattcatcacataaacagaagcaatgacaaaaaccacacaatcatctcaatagatgcagaaaaagcctttggtaaaattcaacatcccttcacgttaaaaactcacaataaactagatatcaatggaacatatctcaaaattataagagctacttatgacaaacccacagccaatatcatactgaatgggaaaagctggaagcattccctttgaaaactgacacaagacaagaatgccctctctcaccactcctattcaacatagtattgtaagttctggcagggtaatcaggcaaaagaaagaaataaaggatatttaaataggaagagaggaagttaaattgtctctgtttgcagacagtgtgatcctatatttagaaaaccccattgtctcagccccaaaacaagcagagagtcaaatcatgaataaactcccattcacaattgctacaaagagaataaaatacctaggaatacagctagctaggaatgtgaaggacctcttcaaggagaaccacagaccactactcaaggaaataagagaggacacaaacaagtggaaaaatattccatgctcatggatagaaagaatcaatatcatgaaaatggccatactgcccaaagtaatttagagattcagtgctattcccattaaactaccattgacattcttcacagaattagaaaaaaaaactactttaaatttcatatggaacaaaaaaagagcccatatagccaagacaatcctaagcaaaaagaataaagctgggggcatcatgctacctgactttaaactatactacaaagctacagtaaccaaaacagcatggtactggtaccaaaacagatatatagaccagtgaaagagaacagagacctgagaaataagaccacatatatgcaacaatctgatctttgacaaacctgaaaaagaaaaagcaatggggtaaggattccctatttaataaatggtgttgggaaaactagctagccatacacagaaaactgaaactggaccccttccttataccttatacaaaaattaattcaaagtggattaaagacttaaatgtaaaatctaaaaccataaaaactctagaagaaaacctaggcaataccattcaggatacaggcatgggcaaagacttcatgactaaaacaccaaaagcaattgcaacaaaaacccaaattgacaaatgggatctaattaaactgaagaacttctgcacagcaaaagaaactatcattagagtgaacaggcaacctacagaataggagaatatttttgcaatctacccatctgacaaagggttaatatccagaatctacaaggaacataaagaaatttataagaaaaaaaacaaccccatcaaaaagagggtgaaggatatgaacagacacttctcaaaagaagacatttatgcagccaacaaacatatgaaaaaaagctcatcatcactggtcattagagaaatgcaaatcaaaaccacaaagagataccatctcacaccagtagaatggcgatcattaaaaagtcaggaaacaacagatgctggagaggatatggagaaataggaatgcttgtacactgttggtgggagtgttaattagttcaaccattgtggaatacagggtggcaattcctcaaggatctagtaccagaaataccatttgacccagcaatcccattatgggttatatactacaaggattataaatcattctactataaagacacatgcacatgtatgtttcttgcagcactgttcacaatagcaaagacttggaaccaagccaaatgcccattgatgatagactggataaagaaaatgtggcacatatatggaatactatgcagctgtaaaaaggaatgagatcatgtcctttgcagggacatggatgaaactggaagccatcatcctcagcaaactaacacaggaacagaaaaccaaacactgcatgttctcactcataagtgggggttgaacaatgagaccacatggacacagggagggaaacaacacacacctgggccagttggagggtggggacaaagggagggagagcattaggacaatatctaatgcatgcttggcttaaaacctaagtgacaggttgataggtgcagaaaaccaccaaggcacacatatacctatgtaacaaacctgcacattctgtatttgtatcccagaagttaaagtaaaattaaaaaaaaaaaaaacctttacggctaactttatcaagtaaccaaatccctttattaagaacaactaataagcccatccttcatcaaagactcttattacctagctaactctgttataatgttaacactttaattatgtttccagggaaaaataagtcatgccactgtctctgaaaaatgcaaccaagttaataggggcctttgaaaggaagttcttgaattccagtattttaatccttcagcctcatcatagtaattttatatctggatggacaagtctctaggaatacctagtgactaaaaagccagtggaagaaggtatcctaaaatccatcttgggcagccccaaggaactatgtgctatggaaaacccctcaaagaataatcaactgcaggttgcccttgtttatctacttgcctgattgaagagagaaagccagacccatccagttcagtcacatcagcacgaacttcagttcaacagacatttgactcattactatatacagggcacttcatgggctacaaaattgagtaagctacaacccaaaaatgccaggagtttaaagtctacttttggacacggaacaaatacaaatctaatccatttcagagttggaagaagcgtggaagtgagctcatggtgaagtggctagggaaagagaaatgactatatctctttcaactcctagataaattgattcaaattagactgatgttccttattcctaaccatgacattctcatgaaagagaagctagtagaaatctagaaatactcattgtaatcaaatggttgctttaaacaccaaggtaaaattcagttatatataattatcattcacaatctaggaaaatgtctctttttttcataaagaggccaattataacaataaatgtcaaattccttaagtgtaaatcttatagttgaggcttaagtaactaagactgtatctggcattccagaaaagataggttgatattttatataaaattattattctgcctgatataccatatcttctatatttagtataataatgagctcttcccagcagagaacaatatttttaaaatctgatgtttgatgccagtcccaagatagtcgtactcaaggtacttgatttagaaagaagaaaacagcaagattttcctgtgtttttaagtcgagaagtcccgattttataaattgacttggatagagaagtacataaaatataatgcaaaggtcataagggtctgttatctgttccaaaatagtgatccctggtggaaaagcaatgtagtgcatatggccatggctgcaaaatgaaaatgtgttctaagcaggacctgctgaactgaataagcacagatgtacttcaaattaatatttaatctgataccaaatcacttaaaggagttagggatatgaattcctcataagaaataacttccttctcacagagaacaattatggtactgcaaaggtaacacaaataagattgtcatattttcgttagatttaaagagtaaatctggaaatgaaagtattttgctggctctttttttgaattttcttaatattatttcttgtaaaaagaaaatcctctttgaatgtgatggcatggatcaaaatgaaagctaataaagtcagtttgattgagagactatctcagcccttgagagtagatgagagtgatttttaattgacatcattagagtattattagaataaaatagaaccaagtaaaatagaaccaagtaacccttactaatctttaaaaggaaagtgcctataatcaagttacaattctgaaaagcaattctgttgctttttcaggccattttcagaagcagatcctcaaaataagctggagtccagagctgtctcatgcctttcattttaaacccacttttgttccacattttggcctgtcaaaaatgttattatcacattacatactgaatactcagaaaccaccgcctaaatttaaaaaaaaaaagaaactgccaccttaggttaaagtgacatttcatctcttagggtggtttttttctgaattaaaagaggtgactgaacttactacttcaatagaaagcaaagacacttcacaagtatagtaggcactaactggaacatagtatgacaaagaaaaacaggctatattacacttaccatcatatttaccactaaaatattagctctctttgcaagatagttagcttttgtatgatcaaaatgccacatggacattgtattgaggtaactatttttagataatgggttagtcttatacattgcagcaattatgcaggaattataagctatctacatcttttcatttgaggagataaaggacatcccctcccagtcatgcattcaacaagtattgaaactacttcttatttatgtattcagaatatatttgagcacctacaacatgctaggcttgaagtattgaaactactaggcttcaagtattgaaactactacttatttatgtattcagtatatatttgagcacttaacaacatgctaggcactgtgccagatgctagagatgtaacattgaacaatgctgccctatatcccagtgggagaaagaagcaaaaagtcaaaacagaaatatgtagatatggtaataccattcatttcagagaataagggaggtgattgtggaaactacgttaacagtagggaaagctgaaaaaaatccttccttaggaggtgacaattgaggtgggacctgaagtatgagaagagaaaatcaatcattcaatggatggtgagggcaggaagaccctttccggcatatgcaaagggcctgtggtggaagaagatgaccccatctaagaaatgcaaccagacccgtgtgtcaaaaatgtgatagactaaggggagaatagctcaacagaggaaactctaagctaaacagcaaccaggtcacagaaggtcttggaggccattacaatgagcttaaatgctttcctaagtacaataggaagccactgaaggagtttaagcaaggggtgggatgttcagttttgtttttttaaagtttattctagggctgactattgtacagtaaataggttggcggggggattggaagtggggaaaccaggaagctgactattgtacttattcagatgagagatgacggtggaaacagagagaggtggatagagagaagatatatttctgaaggaaaccaatagaatgtggtgacgtattgcatgtggaagttaaggcacaaggagaaatcggtatgattctattatcttgtttgagcaactgagtaccttgtggtgtcacttaggctagatgagcaaaagggcatagtgaaaataggggaatcaagaattatgttttaggtatgttaaatacttgtctatgagatatccaaactgttattgaattttggctggatacacaaacctaggcttgaggagcacatagttagcctgctactgactgggaggagtcagcaaacagcgacatttagagtcattacagttctttttagttcccgaatgcttattcctttggattcaggcattgatggctctactcaaaatatcagcactatctcaatggtggttccacatattagacattgtttcctgagactgacccgagacaatgtgccagagggtgaatgagttccgttgggatacagaaggtttttatttaaaaggtctggattatgcagttctattaagaaggcagatttgggtgggatttcacagtccagagggcaaggggccacttgggagaagaggaggaagatagaaagggaaagaggtttttaaaaagagatggaaatagtgctgtaaaagaaactgagtcatttcacaactttggagagagccgggtctgctactagatatttttctgtaaatttttgagttcctttttattaataaaaatgaaaaatttagtaagcacttactgtatgccaagcactgatctaagtacattacataactaactcatgtagttctctgcagaaagctatgaaatatgcgtttggccacttttgcagatgaagaagaagacacagagaagttccgtaatttctaaattcaccaaggcatttggtggtgtgctaagatttgaatcttggcagtcagtttccagaacccatggtcttaaccattacactatatatttcagtttcagtataatataacatgtgattgtaaatgtcttttttgtctttctaataagcaggtcttttaccaagactaccagagaaatcttagttttcattattttttgtcctgtaagttctacatgttttatggcctggagaataattatgatgatggttgtataatattaagatacctgcttccagtctacatattctgtgattttgttctattttatttcatttttattttctcatatttcttagccctttgccccttaaaaataattaccagagtagtatttactgatcatcatagaaaccactacccaattcttcaaccctattatattgatcataatttattgatgaggtctgacatctcacactctttatccagacttcctcccatgaggaaaagactataaaattattttcctgcctggcacatttaattccagaaacttgcatctaatactattgtggtgaacaactccagctgctgttccaggttcagagtcattttactccatagaaaaaaagtatgttaattgactaatctatatattgtaatatttgtttctttaatgatagggttttaatttaacttagccatatgttagggcccatgtttagaaattagtctattttcaaactaacattcaagaactgcccaagtatacagagaagtttaattgactgaaatgtgtaaaacaaagcaaaattattaagttaaaaataatgatattgtctagttattttttaacttcgaaatacttaaaactccttgaaactttgctgtaatcaactgatttttaatttactaatttgaaagtgttttgctttattaaaatgttttttttcatcctagggatactttttttctcatggctaggtttcatctgtcattgtgccttatgggcttgccctttgccttttgcaaatggtctatttcccttctaacaaatatgcttcgaattttcataaaagatatgtaacaatgttagctttttttctgggtgagaaatggcataacacaactctaaagagtttattactgtcaaagtctgtcccttggaattataggtagatgtttgtgaaaagaactagaaaattctctctcttcttataatcttcaagaatacttcggatgaatgtgagttcagaaatggtcattcctgtgacattggcatgtttaaggcactgaccaactgataggcacaatctaaaaacaaaacgacctatgcctactggaaatctgtgtaggctgtatagactctggaaatttcactacagaacacctagcacatgatttttattcagcatttggtaggaaaagaaaatgaatttatttttcaaataaaaaatgtatcaaggaaagttctggggaaaggaaggagtatgggattgggggtagaagtggaaatttgattacttgagttattgaaatgattcagaatggcaaacttctagaagtactcccaatttccctctgagataattcagtcctcccaaagataggtcgggtgtttcccagagagaggaaatattgtactatctgaaagaaataaaatccttccctggatccatccttcataggaaggttaacatctccctgaaggctttctgtcaactctggagacacagtgtggtgtgtctggggagcatattttacacacatgcacacacacacacacgcaattatgcacacacaagccattaaataagacagtgaaataataactctacttattgccagcttcctactgaagtatgcctatcccattgctcccataatggagaaaattaatatatcctgtcagggtcacataatatgaatagtgaaattctgtgaagtgactgcatgtagaagagtcaggaaatccactttgatctacatttttgatgtttgataattgcacttattatcaggtcctttctgctctttttctttgacatgagatccattatcagtgacagcatgagcgtgagtatgtgtttgatttaaaaaactacttaagatgaggtaatggaaaagaagcgttttttgtccatgcmtmttaaaagaatgggagacaattaaatctcattatacagtggctggcttgaattgtttatcttttatgtatggcattgtttgggcacctcatggggtaacttttttcaaaagaaattatttcctagtgatatattttgtatatatgtagactgttatcatttgctttgatgctttcattctatgagaaagcattgagagaagagataaagaaatgatggtcacaaaaaataggacaggtcatgtagccaaccgctgctttttcagaaatcgttataaatagaatgcatagtcatatgtgaataggactaaaaacagaacataaattcatatttataccaaggcagataattggtaaatttattaactaggattctttctgtatctgttaatttattttaaataacacaagttaccttgatgcaagtaattattggcaattaatatgtgataaggtatttgaacttttctgcttgcctaaattttacaacaagggctcaggctaatttagcactttaacgtgtcaccttgcacattaacaaattagtattcttcacagtagaagcctaagtaaaatgctaacccattcatttactattttttttatttctattgtggacattacctacttttggtctttggctgtcaatattatacatataaataagtattctataaatcagtattatataaataatacatggctaaatggtaaaattataaaactctttcagccaaaattaaatgctactcccatatttttgcttacaaatttctcttctttgctgaataatagagaaaaataaacttgtctttactcatccaagttaacttggatttaatttggagcagctaaaaaaattaatagtctttgatgttcctcttttccattaactttacttttttcagatatgttctcaataaaaagttattggagaagtagtactcctcacggctcttggagaaaatgagagtgtatttggaaatagtttatggagtagcttttgtagcctctgactttctctgagtgacttcgtacccaaaaacagtcaggtggaaccattttgtaaagtataaagcgccatacaaatgtcatcaaatgttagaaaaagtaggagaatatggtaagatatgacaaagtacaaccacatacattccaaatgaaagccttagcctaatttgagctacatttgtgctacctttgaattgctagtttatttgttagtgcttaatatggtttgactctgtgtccccacccaaatctcatagctcccataattcccatgtgttgtgggaggaacctggtgggagatgactgaattatgggggcaggtctttcctgtgctgttctcatgatagtgcatgggtctcatgagatctgatggttttaaaaagggragttgccctgcacaagctctctttttgcctactgccatccatgtaagatgtgacttgctcctccttgccttctgctatgattataaggccttctcagccatgtggaactgtaagtccaataaaccactttgttttgtaaattgcccagtcttgggtatgactttatcagcagcatgaaaatggactaatacagtaaattggtaccagtagaatgaggcgctactgaaaaaaatacctaaaaatgtggaagcgactttggaactgagtaacaggcagaggttggaacagtttggagggatccaaagaagaaaggaaaatgtgggaaagtttggaactccctagagacttgttgactggctttcmccaaaatgctaataatgatatggacaatgaaatccaggctgaggtggtctcagatggagatgaggaatttggtgggaactggatctaagatgactctcgttatgttttagcaaagagactggcagcattttgcccctgccctagagatctgtggaactttgaacttgagagagatgacttagggtatctggtggatgaaatttctaagcagcaagagtgacttggtgctgttaaaggcattcagtttttaaaaggaaacagagcatgaaagttcagaaaatttgcagcctgacaatgcaatagaaaagaaaatcccattttctgaggagaaattcaagctggctgcagaaatttgcataagtaatgaggagacaaatgttaatccccaagacaatggagaaaatgtctccagggcatgtcagaggtcttcacagcagcccctcccatcacaggctgggaggtctaggaggaaaatatggtttcctgggccaggtccaggacccccctgctgtgtgcagcctaggaacttggtgccctgcatcccagccactgcagccatgactaaaaggggccaaggtacaactcgggctgtggattcagaaggtgcaatccccaagtcttggcagcttacacatggtattgaccctgcaagtgcagagaagtcaagaattgaggtttgggaacctccacctagatttcagaagatgtatggaaatgcctggatatccaggtagaagcttgctataggggagaggccctcatggagaacctctgctagggcagtgtggaagggaaatgtgggacaaagccccaacccagagtccctgctggggcaccaccaagtggagctgtaaggaaagggccactgtcctccataccccagaattgtagatccactgacagcttgtatcatgcacctggaaaagccacagacatgcaacacaagcccatgaaagcagccatgaggggggctataccctgtagagccacagaggcggagctgcccaagactatggaagcccacctcttatatcagtgtgacttggacatgagacatggagtcaaaggagatcattttggagcattaagatttgactgctttgctggatttcaaacttgcatggggcctgtagcccctttgttttggccagtttctcccatttggaatagctgtatttacccaatgcctgtatccccattgtatctacaaattaactaactggattttgattttacaggctcataggaggaagggacttgcctcatcttagatgagactttggactgtggacttttgagttaatgtcgaaatgcgttgagactttaggggactgttgggaaggcatgattggttttgaaatgtgaaaatacgagatttgggagaggccaggtacagaatggtatggtttggctctgtgtccccacccaaatctcatattgtagctcccataatttccgtgtgttataggaggggaccagtgggagatgattgaattatggggatgggtctttcctgctagtttatgttagtgcttgatatggtttggctctgtgttctacccaaatctcatcatatagctctcataattcccacgtgttgtgggaaggacctggggggagattattgaattataggggcaggtcttttctgggctgctgtcatgatagtgaatgggtctcatgagatctaatggtttttaaaacgggagttgccccgcacaagctccctttttgcctgctgccatccacataagatgtgacttgctcctccttgccttccaccatgattttgaggcctccccagccatgtggaactgtaagtccaataagccgctttcttttgtaaattgtccagtctcaggtatgtctttatcagcagtgtgaaaacagactaatacagtgctgaagcacatatactatattatagaatctatctcatttcattgttctctagcattcttaagcattgtaaataatttagcacacctttagggaactggaggagttaaaatatttttattggaaatttgtaaagataatattaagagcttatattttagtctaatcttagaaaataatagaaaagcttacaycattgtcagaatacctttctccccaaacaggcaaatttcaatgctgttatctgaatatgctctctagggacaagagataacctgttgagaatttgtgactttccaacatctttttgatggaggtggattctgataccataagcaatggatatcacctacatcaagagtattgctaaaggcagggcctgaaatcaaaggattaaagaaaaaggaaaggggcccaaatcaaacttatttcaaattctgtgtatagccagtaacatccaggcaagatttacaagagggtaaactttcccaaagtttgtaaaatcatttaagtgagttaattccatatggtgaaagtatacacaaaatgtgtctggagatacattgttattaataatacactttccagatattttcacagaatattaacttcaatgactgagcagtactatagctgatgacctcaaatcagttccaattaatatgcctctgcttttgtacataaaaggttaaaaattagcactgtaatgaaatgttgcataatactttgagagttgtgttgagtgggcaataatattttttatttaaatgataaaacagggtattgaatgaaattactaatgtttccatgaatactgaaagtataagactcccgtgagtacagaactgttaacctcttttgaattgagattttgatgtcatatatttatattgagttacattattttttaaagaatagtacatatttttattattacatattaaagaatgagtacatatttttactgagttgttaggtcatgttcattcctttgctttgtctttctggcttgctttttgccttatcatggataggaaggggaagggtaagcattcagaaattactagctttgtccatataaacagttgctcagtaaaaaactaacaaattgttgaaccataataatattgttttccatattaaaactcaggcatgggaacagcaagactccattggtttttcaaacctgctttgtgacaattgcatatatatggttctattaagccctttcacttggatacagtttatttccagaaatgttcaatttgtggatagtgttcatttaagaatttcatcagtgtttgaaaaaataatttaaatgttgactgatggaccactaaatcctttgaagttgaccacgcagtcctcctgcatgccagaaacctaaattcgtgtgagtaggtgttagagggagtagtctatatgaaagggagactctttgttttgtgaaacgatttactacaagtttattttaaatcatgtagtcaaaatataatttaacagagcaccagttatttatataataatacatttgccagatcacatatgatggatatgcaagagatatatctgaaaactgaatggcagaagcaaatacctatttattcgtgtcttcctgtacaaatatcaactgcttcccaatttgaaaaagcatggttaagatagagaatatagtgcagtattatcttcctgcttccaaataagataatatcatagtgaatatatattatgctttatagttaacattcttacgatgtatattttctagctttacttggaaattctccaaaaaattgtatatatgtagattattgttatattcaggagcaacattgacctattatactaatagtaaatacatgggccctatataaacgctacttgaggcaaatgtattcaccatatgaagctactataagatgctccaaatattcatggattattcaaaattagagtaaacactattgagcaaagtacaatatttgtgaataatttgaaatgtcaccattttgaatatttattacacagcatgacaagatagaatcattgtccaggagactggctgacaaatcgggtctcatgaggaagtattatcctttccattatctgttacttcaagtccattctgtttagcacttgttacagcatctaaagtgatttgacctctaaggtctgccttaccttaaccaaattgagactgatgtataaaaccagtcagtcaactgattcatttacaatataaaatataacttcaaagcaagtcaaaatattcttgtcagtggtcaaagtatttggtcaaagtattgtttcctgttgggaagctacatgggaaaccaaatgataaccagaaggttcctttacaaggatggatatgagagaaaaaagaagttagttggaagaccaaactctgagtagtccattatgggatatgcctggcccagcatcagatacttagattcctgaataaggtgacccgtttaactagacagcatgggtaaggataacaatgataaattctttctatgattctccttttctatgtcccatgtttctaatagcacattctttcttcccactactgtaactattaccatatcagcttaatcacatctggctgttcctaaaatacttgaccactcagttacagattattacttagaatgggctccttctacaactaatctcattcattacattttattcctaattttattctcaattaatggtctttacttttaaatttgggaggactttcatgtccatattgcctacaatagcctcaaaccattgctgtatccaacgcttcctcaataggtgactagccaaagaatagaaatatacattgccatgtaattgagattcttttgatggtatataacagaaatgtaaacaaaaaagtgagaaattcaatttattattagaatataggagtatctcagaacccaaggacagaaatcactataaggcctaattgagggactggactaggaattggaaagaaatcagtaactcccacaccctcawttttttcatgtattcctcttgtgtgtttgttttattctctctgcagatgaactctccttccctctgtatgtgaccagaaagggccatacttctgatcatgaatggacataatatctcaaattttaaaacctgactaactaatattctgtcccaactttaaaatcccaggagagatcatcttattagtaaaacttggatcaggggccagctgccagagtatttgactctcagaatattagaggaagaatcatataactgccacaggagccttatctctgtggatagtgggcagttttcagagaaagggaaggtgagctaagcaaatatctaaaaattggctgctgtatatgaagagactaatgagacttaggcatgatcatgaatgacttgtctttcctcactttttatttcaaatactgtgatttttcaccttagaatttccattctcttttttgttttctatttctctgatgagatttcctttctttctgtttactgtgggcctattttccttcatatcctgagcacagttatagtatctactttaaaaccctggtctgctaattccaatatctggttttcttggagttattctctataggttgtcttttctcttgagaatgagtcacatttttctgtttttcatattttaaataattttggactgtattttggacattgtgattgttattttgtggagactgtagattctgttctattattattctaaatagttttaatttttttctcttcatgtagaaggcaattaaattttttggactccaatgacaaattctgtttcttgagctgcagctcaaatctcagttgagtttcttcattctcagttgcagtcagcctcacacatgcatgattccaggtcagggagagatttgggcagagtttatatacagaatatggggtgcattctctctcttatcttttttgggggatgcccccttgactttccagtggttgtggttgcctaaactctgttccctatttttttatgtgagagatactgagagttttctgtcaagatttctgccaccctgtgctgcctcattgtttcctaccttctggtttaaaaaaataaaaaataaataaataaaaactggaaattaacccatgccttcccttcttccaagtgttgattccccaccataatctgcttcttttgttcactctccagttcctaaaggtcatcgatttttttattgaattttgtctagtgattatcacctgcagaaagatagattatgatagaagcttactaaactatacccttctcaccacttattcgacattacttcctgctctttatagtgagttctttttaaaaattattataacacatgcttatcataaaaataacgagtatgtgtataacacaatatatgctagattgttctaagcaatttttatataataactagatcmwgaaataaatagtacagaattatgtaatgtacacttaaaagttctatttctcccactattctactctgagagatgagtattcttcctgatatttcttacacaagtcaaactttactatatatcatctttctgcaatatgcttttctcacactcacaatatatcataggtatctttccaaatcatcttaaatcttaaattatctaacataaatttgctactactagtacaactttcacacacatacacaaacttgcagactgagtacactcatatcatagagaaatttgcattatcatttttatgaacgaacttttctggttaggtagctttacccaactaattttcttttccttctccttcaggtggctaaaccataaccatgcccaatgtcagaatattgtcagactgcactctacaattaactgtttttccttatttaagtcaagtcaattaaatccatacaatcattgtgaaactaaaaatgaaataatgtatatgaaaaatacttcaaaaagtttaaactgttaaataaatgagtaatatcagtttgacctacattttttagtatctgctgtgtataagagtctcggaggttataaggatgaataggatgcaatatcggtcttcaaggtgatgacaatctagcttttaaaatgtagttaatgctatgacatagattttttwaaatgtgttatgggagtggcaatgggaggacaattgattctgacaaagagaatcagagatgtatgagagatgatgaggtgaattggtccatgaatgataaaaagaaatttcaggtatgagactgaaggaaggggatgtattccaagatgaaagaacagtgtatatgtaggcatgaaagtatttatttttctggtaataccaagtaagtcattttggttgaagcatagggtatggtatatatggtcatgggaggggggtaagagtcaaggattaaaagtagaatgagactatagagtgagtcacatttggatttataagggccttataggtgttgttccaagaaatttgcctacaatatgatagccagtgaattaaggatcttgcccagagaaatagcacagtgtatggtgtataagacaatgctagcttctgttacaaactaacctaaaattgtacaatggctcaaaaatagtagtttgtttctcattcacctaaaatgcaactggagaattcctgattagtaggctgttctcctgggcttgacttagggcacaggctctttccatccttgtagcgccactgtctttaacacatggcttgaaaagttgccatgtttgtctacatcaagctagaggaaaggaggagagcaaagatcaygagtggaagattttattgaccagacctggaaatggtactcaacacttctattttctaaactcagtcatatgtatacagttatctgcaagaaagcctgggaaatgaggtctaacttcttccttggaagaagaggagaggaatgtagtgaacaacttggtggtctctgtcacaaatagtcagatttagtttttagaaagcccaccctggttgcagtgtcagtgatggattgtaggaggagatactaaaagcaggagagcagataagaggctgttttcatagtgcaagtgagagatagtcaggtcctaaaggcaatgcttaaggagccacttgcatcagggataagacagggatacattttggagaccagatttgatgactgagaattcaggggccagagtttgttgacttgagcaataggttgatagcctagatgaatggtgattactctatatcatgataataatgctcatccaaaaaaaatgattgcttacttagactggtaataattgagtgtttgatagatcagagccctttgtcaagagctataggaaaataaagtagagtattttatatggccctttccctcaaggagtttttaatctatctgaggagagagaatacacccaaatgacaacttgacaacttttatgtatatcagtaaatgtgagttaattcaacacaaactgaatccgagtgctagaggggttggtggaagagttgtgtttaagaatgcatgggatcattaggatgtaagtttggaagttggattttattctttcatttaacaaacatgtattaagtgtatggtgtgcttagataactgtactgctggttcataaaaaggctcaagtaatatttgttgaataaaatattagttatttaatgagacaaacaaaaaataacccttacttttgagggatttattagaaataagtaatatgggacagtaaggttaacataaaggtaaacaaccagtacaataatgtttaacaagtggtatgatagaatggtccggttggggcacaaaggaaggaatgttcaagaaaaatctttgttaagcatgaaactcttgagcttgtcttggaataacagtacaagtgaccacacaaactaaagatgaaagagagagaagaaaggtctttccaatgcagcagcaaagatgaaggtatgacaaggaaagtgggttggcaagagatgaagcctagtgttccctgaacctagtgttccctgaatttagggaccaagtcgtgttaatatctgtacccttgtgcatagtacttgtcccttttgagatgctcagaaaataatggattctattcctatatgccttcttgtagtcctggcgagtgtatctagtacacttctcttcaacttcagacatctaactaattaacagaggtagtgaaataatgatttttccatcagtgactgaaggctctgcttgtccctgctggtgacctcactttacattctcctgaggctacaaagtcatttgcaggtatatttggttgttttaaatcacagttgcaaaccatcactgatataagccatctaaagtcccaatttctgctcaaagagagatgcctaactgaaataatagtatcaccaaacaccatcttgaattcaaaatcagattgaggcaacaaataaagttttatgtgatgtgaatcaccaatggtatgaatttctcttactctagcagaactatatttcttaaaagctaacaaccatattttcttagtgaaatttactgtttgaagtgtataagcacgctttggtccttgaagggttgtaattttaaccggagatatttcagaataagataataagttgagaaatgagtgcttgggcaaggagtttgaaaatgcaattttatttcattggcatttttctgtctagcctcatatgtgtttttatgcactaaataagtatattgtaatttagaccttgtggtttaattttccatgagcctaatccctaatctatactgggaagaatgatcctcttaaaatggggggtatctaaaacctcttttgtgttttcctgctaataaataacttatattaaaataaaagtatgggattgtgaatatttgaggtcagacagacttaaggttagttcccaatttgccacttactaactgggtggccttaagcaagttacttaaatgttctgagccttgctttcttcatctgtaaaatgagaatagtatcaactaccccttgcaggatatttgtgagaattagagattatatggtgggaattaccatgtatgaggtgtttaaagagtgggaattgctactgccacaaatattgttgttggcatctttcagttagagtcaacttccaggggaaaaagtgtatttggaactgccctctgcatataacagttttaaaacttttcccatttgcacaaagatcctatatgtgacctcaaagtatataatgggtaaaagtaaaggtgagatactcaaagcttcaggccccatcctagtccctragacgtgctcatgaaatacaatttgaaaaccattccctcagtggcatacgtttacaagtgctaggggaacttaaaacatgacattaaaagaaaagcaagatttctaagaaagcactgcatagttcctggtagatccttgtatgatctaaatgcttattctattaaatgtatggtaaaaagcactgcaatcgggacttataagaaaatcgtgcactatgcctactgaactacccctctgtaaagaagcatgagaaatgaatcgtctttgaggagggcagtataaacttttcatgatttcctaacttttctgcagtattgtcaaagaggtaggctataacctatgcccacaattattgaatgacagccttccctcaagacactttactgccatcagaaacttactgtaaaatactagttgttagaataagactctctacagctatattccagaaaccttttaataagtctgttgattttcattatcctctacgatccctagtatctccaatgtgaatggcacactctgaaatggagcactcttgtacagtgtgtaatcagcatacattataccatgaccctgctgatatccatattttttaataaagatgaattgtttggttaaatataaatggcagctaattaaaaatataattttcacttaaatttttatacagatgcttcagaaatcaagttcaaataaagcagtaaaccatacagattctacaatttcaagggcttctctgtaggcagataaaatagcagaaattcagctgtcaacaaaattataggcagattaggtgctatctacgaattaaaatgtaaaatttgtaaataatcttccttgaggtgattgagttgcatatgatttactcacattgacagatgaaattccttcttttactttttatggcttaaaatatactagaaatataaatgcattcccttgactattaagctgacatacctttagaatattgaaaaaccaaagcaacattattttatttcagtcctcaaaagcaaatttttgcactaaaattccactcattgtgttgtagagctttgctccttagttcagctaaaacccagattcttgtcacatgaccaggaaagtttaggcatgcggacacattgaagggtgaggggagcaggactttactgagcgaaaaggataaaaaggaagaaaactcagcaaagtgagatggagtcctgctaacaagccctctgcctcacagattgaatcccaggtcaccacataaaaactgaggagtccaggctcctcccacctgcaaacaacgcaaacttcccggggctccacctcgtcctcccagtgcgcaggccagttgcagattctccagggaccccgttttatctgcctaggcatttaactgtccctactggaacaaaagtagtttgcaatttaagagaacaattaaatatcctggtagtgaactctgtttcctgaaacgaatccactggataatgaaaaccaagacagtacaagaggggtcagcaaactatggcctgtgggccaaatctggccyatcgmctgtttttgwaaatcaagttttattggaaaatagctgtgttcattcatttacacattgtctgtggctgctttggtgctaaactggtagagttgaatactagccacagagactatatgacctgcaaagcctaaagtatktactgtccagtccttcacagaaaaggtttgctgacctttgcaatattaaattatttgaaatggcaaataaaatattatatatgtttgtgtgagcaaatttatcaatacaaggaaggatattccacactttaaatgttaattatcatcaggaaaggtattggcaattaaatagaatacttctttcytccttgttgcacaattctactgcacctaaactcttccagtcactgcacatcaaaatacataaaatggaattgaataaaattcagagaatgaaaaatgaatttatactagactgaataatggaagagactcttacatttggggaaaatgatgagtggtgactttaccaattcttcaaagtcaaaaaggccaatggtaagctgagtactaacttttcagtagaacccttgaatacttgacaaagtactccaaagacaaaactcagggctataaggaccataagtgaaacaacagtttgtcagaagggactcattccttcctgttaagtttatataactacattgaatacaatcagaattcagacataggattactaagtggcgtttttttcaaaaaaggaatactaacactgatctcaagctaacagaaggtggcattgtgaccttcagaggttaagagcagtaagcagaaagttagtattagtatacaggagttttatttaattttattttacttatttttaaataattccaacttttattttagattcaggagtttaatgtcaggaatactgggaggaaacatgagaaggaggatgactgcttagaattaatttgcagaaccctttcttaaagcaatattttaagcggaaacccaagatacaaaaaccaaaaataaatgaagatgttgatgaagctagagtggatgagtgttaaagttctgcttgcttggaattaaaaaaaataaaataataaaactaaatttaaaagttctgcttgcttggatccctctcttctttatgtctgtctcctctgtgaagaagagctctgcattttcaattagcagactatcactgaaagtgattcaggaaggctactcacaaaaaaggaatatttgtgtgtccagcccatctaatttccaacatgtccagacaagtttattatgcttttttgctatctcccacttcttttggcctttattttcctgttatgaaatatttatgacatactgaaaatgttatttaatatttactcataaaattttgtaaaactttaaactttgcacataaacagataaatatttttggtatgcttttcaatcgatattcatcgaaaaggtttattacttttgtagatacctttcattgttttcattcttacttgtcttaaagtctaaaattaaatcagtatctctacccttttcctaaacaacagatggaaattaaattgttttaattttgatcattatcccttcatttacatgtaattatcatccagtattctgattatacttcttcttaacaccccaaaattatttattataatattttccacattcaatgcttatttagatttacccacatgtttaccamttacattaccattttttcttgcagctcatgcctttcttctgggttcagttttatgcttcctgaagtacatcctctcataattctttcagcaagggtctgtagtggtaaagtctccttctttgtaggaagttgtcttcattttaccctcagtcttgactaagaaattctctagataaggaatgcaatactgacagttgttttctctaagcattttgaaaatattacttcatgaactaacagatttattcctggtacaagtaacatactatccaacaataatgtcttcaacaataaagatgtacacagtcatagctcagtaaatgctggagattggttccaggaccccttcatatatcaaaattcttgcatacacaattcccacagtaggccccacagaactagcacataccaaaagttggcatcccatgaatactgtattttctatctgtgttttaaaaatcagcatgtaagtggacctgcagggttccaacccgtgttgttcaagagtcacctgtactttctaccataacaagcagttcagagctaggcagtactagggttggttaattgagcagctcaatataccacaaatctgagtcagcttctctgtgacacttttggcttttcttttatagttgttaaataacagccagctgcaaacatcatgtcctcacgatgataatgtccaaaggctgaaaggaagagccaagttctccttgcctatctctctctcgctatcagacaagataatcttttccagaaaccttttttcagacttcctctcagccagaattgggtggcatgctcacccactaatatagtcactggcaaagaagaatgaaatattatgacttgcttaaaccagtaatggagtttggagtggggcacatgtttcatacctgaacaatgtaagaattctgttagcaatgcaaaagaggttaatggctgctaggtaagcaaacaacagttttccatacttttttttttttttttttttgacggagtcttgctctgtcgcccaggctggagtgcagtggcatgatctcggctcactgcagcctccgcctcccgggttcaagcaattctcctgcctcagcctcctgagtagctgggattacaggtgcacgccaccacacctggctaacttgtatttttagtagagacggggtttatggtgccattaagtaatctgttgttattctaactaattatagcttcattgtagctaatctgtctgttctatctagttgttctattatatctttatgtatggtgctgtgttagttcatatcatccaagaagcagctgccaagatggaataagatgtgctagagtgttttggaggatcctttgaaggataatggagagggagcaggagaagggagggagaacctttagaatgatgcagggtctgacctgtgaagagggagataagagggaatattaagtaggaagagtttcagactacaatgcagatccaagaaagttttggccaggctgatggagaccccttgaaccaaagttacccattataggggtcctccatcttgtaggaatggcctgtattagtacagtcattggctggaagtagcccataagaagtgtggactcagcatgaatccagtactacattcagaaggtcaggagctggggctatcattcaattatgcacataaatagattgggaggtgcattttcatagctgccttagataatctaactatgaattttcctttttcctactgacgggtcatgcttcctgaatctgaaaattttttcagattctcagatttttaaatcagtcttagaatattctccatcatcattatttcttcccattttctttattttctttttctagaatgtttattagatccatatcatatcatttcattctatcctccatgacccttaacatttcttttagatttgtcatctctttatatctctgtgctgtattctgggtaatttcctcagatacacattcaagttcatgaattcttgcttgatttgtgcctcatttgctattgaactttccctttagcttttattttccattgagtttcacattttgatactatatatttttaggacaactttcttttaagtctatatgatctctttttaaaaatagtgctttgttcttatgcttttcattctttctttaaccattttaaacgtatgcattttttacagtctctaaacaagagctgtgttatctgaaattcttagggacctaatcttatagtttggtgaaccttttgtttcagttggattatttccttatataatttttaactttaggttgtgatcttatttgcatttgcctctgccaggctctctaatcctttgtattaatgttaatttctcttactggtagtcattagaacacatggatagtatacactcaactctaaatccatccttgatataggcccataattataaattctcaataacaattttctattgttttcacccagagcccagtccagggcagacaggcttctttgttatccctttgtgtgagtgggcagatttctttcagtatattctttttggaagtgtagcattctgggggtccatatattggcaacatacgggggtttcatttgcaaaaccctaccttatgaagaccaaagtcatcacctcctaattcgacaaccttagccttaaaacccatatctttatgttacctacttgcagagaagctgcaacatagactcctgaacatgccactcaggtttaaaattcccaccttggttttgactcctgttttgtttttgcttttgtttccacatattgtgagctcaatttttcatttaaaaggacacatgcaatgtttatccagtatttttacatgttttttttttttttgtaggctaaaactttttacattttctagtccaccattattgccagaagccgaattcttaattcctactctatattgcctcagggtagtttggttaacaaacagcaaaattcrcttgccatccacacaccttctctttatagcataagaaatcatgatattagaaaaaaaaatcttgatacatctggtttcagagaaaactgcagtgcttccaaggcaactagaagaggtcacaggcatgcttaggcagataaattctagagaatgttttaaccaagcttgccattgtatcactaaaggaaaagcagaggtcttgcttgagagtattagaaaggcacattgctgcttttttagtgtaggacatcgtttgattcaaggaaattgccctaaatgttatgttttcgatcatctactgagaaacagtgaggaaataatcctacaatgacccagctggctagttgcgtaagttataaagttttattttgtcaataaagacttacttttcttaagaaggtttgtgttcctgagtcctataaaaactggatgaaaagaagttggctgctagattattaccacagatataaggtcccatctagtggcaaatgttcctgcaaactgaggtctgcacaattcatgaaaataagaaaaggttcattttttggcataattgacaaagtatgacatatcagccctttcaacatcagctttttaatgaaaatcttcttttatggcacagaaaaaaatttgtagtatacaatattattttagagtttttaccgagatgatttcagattattatttaccaagtatctattctattttaaagaccatatttttaaaaaatgtttacactttttatatgccatttaaggggcaaattttttattcatttaatatagaaaagtctcataattttaaaaacttttgacagtactagttgaatcttaccccggaatattccatggaaagagtagtataaagaatgtagggggacagggaacggtggctcacgcttgttatcccagcactttcgaagccaaggagggcagatcacttgacgtcaggagttcaaggccagcctggccaacatggcgaaaccctgtctctaccaaaaatacaaaaattatccgggtgtggtggcgtgtgcgtgtagtcccagctactcaggaggctgaggcacaagaattgtttgaacccggaaggcagaggttgcagtgagctgagatggtgccactgcactccagtctgggcgacaaagcaagcctctgtctcaagaaaaaaaaaaagaaagaatataggggatttggttcacctgcctaagagaataaactattttaagaactttaaaagcaatagtagtacaatgaagatttttattgtttttctttaaaccagtgagtctagaaacttctataggatactagtaagtagtgactaacattcatacagtgcatttgaaagtaactatcacacatttatattttaaatattatatggacttaacacttaatacaacttgactctccaactggcctgaattaataggatttttaacatctttctacacattttcttaaatgtaaatattttatatgctgagggaaagtagtttctttctcttaagctgttttcttgaggaatcattacattttcatgactcacacctttgaattttatcttttcttacaattccaaatcgagctgttcatgtctcttctctattccaagcaattctttgccccattcattttgaagatgtgatcagagagtaggtgtgagtggataatattcaattcaaacaacatgactacacataatttaaagcatccagtgcattttaaactgacatttaaggattgcgctggactaattcatcctgccttcttcagcttacgtatttctgtgcataattccttcttgaagttaatgggaatttggcatgtggcaggaatacatgtttcatgaaatgggaatctgggatctgtcatttaacaagaaatctgcttctaccttaattggtctgtctccctaatgtctttcactatactatagcagcataggctggccttccattttaatgtttaatgaaactattttaaattgaagactatatatgggttaccatgaacagaaagaaagtagtatgatctatgggactgaaggtgggagagttttgaaatgttgtgcttactgaacatagcttaaaatttaaaagttctgtgtgctacattgtaaacattttaattaataacacattgtttcactcacccatgccagtaaatgctgaaaaacatcttattcaacaggctttagaactagaactttatttttatgatcttttaaattaatttttatttataattgataaataataactatacatatagaactagaattttaaatcaaagaaaaagtaatggtttttctagttccttagtgctgtgcacggtgtattggagttcagcctttatatcagtatctacattttctaagtttcagttatgcaaatatgtacttcctatatgtaggtgaaataatttttagcatataaaacattttcaaataatgatcaataatttgccaacacattgaataaactataagatccatgaagggaatactatgcaggcttaaagaaaaagaacgcaagaaagatttctatacactggtatggagagatctcaagatgtattgtcaagtaaaaaaaaaaaaaaatggtctgggtgcagtggttcacgcctgtaatcccagcactttgggaggcccaggtgggaggattgcttgagcytaggagtttgagaccagcctgagcaacacagccaaaccctgtctctacaaaaaaaactaagaaatttagctgggtgtgatggtgcacacctgtggtaccagctactcgggaggctgaggtaggaggatcacttgagcccaggaagtcgaagttgcagtgagctgaggttgcaccactgcattccagcctgtacaacagagcaagaccctatctcaaaaataagtaaggtgtaaaaatgtaaatataatatactatgctttgtgtacagaaagagtgatattataatatatattctgatattctgtactggtgtgaaatataatggaaagatgaataagaagctagtaaaaatggttacagggggtggaggagaaatgaagtgggtggggagaaaagacaaagtgaaacttactgtacacctctttaaacaatttgtttcttagcttgttttgttacaaagcatgttaatgtaatgaaatgggaagaaaataaatttaccaatacacaaaagatgttttaaactgctttcttccaggaatatataagttaaaatgttggacctggattttttgtcttgactctgccactaattagctatatgatgttaggcaagtcactttactcatctggacttcgatatctgtaaaataagtaagttagaataaatagtttccaaggccctcctcagtcctttcattctaacatgcaaacaggtgacagcttagtttaggtgtacataggtcaactttttaaggattggaattgtgtctgattgataagaatatttattggtactctagagttcttctgctttggctaattttttctccagatgaaataatacttaaaatgagttttctcactcagtcagatagatacacattggatataaattacctttttaaaaagcaattttgctgcttttccaaaaagaatttctgtcttttaactttacgcaaaatcttcatacaaatatttactaaagtatcataaatgtactgacaccagatgaactcaaaacattgacttttaattgctaatcagtattttgataagcttctgagtctttattaaatatgtgttcatgtttgatatccattctgtttaggcttcaattatttaattacaggtcttgatatgaaactaatcatgcatatatccatacgaagcttgtatactgacaggataaaatcattaaacagtcattactgtaaactgacgttggcctgaaatttttgcagttaacgggggagttgatgcttgatgaacaatccaattaaaactggcaacaaaagacctaaaatgtcagccaaattgctttttaatagtcaatgtagccatcacaaaacataaacattaaagtccccatagaagcataaagcttcatggtgaaacaattctagaaaatgaataataattatagcatcttgaggattcttttaatagacatgcactcattaaaaatattttgttggttggaatcagatgacaaagtatgtttccctgaatattttcttacatttgttataataataattgtatttaacattagataggtgtaatttctattttctaaaaatgttattttaaaagcactttaataacctagaatacaggttttgaaaaagggaataagaaaaatgtacaatatgacctgctaatatctcaaaatacaaaatcataatgaatcctcagttacactgaactttaaataaaacrcaggaaagccaattgtgatttctacaagtaatccaaaagcaatggacaacatttagattcttgcaactctctgagtgttcaatactgaatatgtgaatggattaatcacccagatgtttcctgctattcagcagtttgatttttagttgaagatacaaattctattatttgcatttttcaccattggttcagatgttttgcacatggaagccaaagaattagattgccgtgaaagattatcttgtatgttatgaataatccaacttcttcctctatcattactgccacatctttgaacaggcaaagaaagaaattgtggggttttcatctttgtaacattgtaacacaaaggaaaatatcaaatggctcctagggaaaatgttgaaagcatcagggttttaataataagtcatttattttctcagtaaacatttgctaaacacttataatgtgccaacatggtgttgaccactctgggaatctggagatgagaaagatttggataccatctgaagcttattatttagctgaaggttagacatgtaagcaatcacatacatgggagaaatgtataaagaattcaagccaggaaaataaaaaatacttatctcccaaactcacatgtgaattaggattatcctttagcctaccatatttttaaaaatactttgtagcatagatacacaacagtagagtcctcagacagatggttttctaatatgtttatgtattaaaatatctttcaattaagtattgccttcctctacaatcatagagtctaattttatgtgctatgaaggataaattgacgttcacacttctccagctgtggttcgtgtgttttatctgttgggaaagttagtgctctgttttcagagcaacaatttttaaaatccctcagaggagagatagacacattgggacttcaaagtctattagctgaaacactgaggagaaaaccctataggaatataaatgaaattttaatagcaccatatcagaaaatattaaatgacccaactatccataaaaatttgcttatcttttaggtttttttcatagtacaatgatgactaaattatagagagaaaattctaacatttaggctatatctctaaaccaccatctcagcctgtgggaaaataaaaatgccttggtccatattatgcacgtcgtcgaataaaatcatgtcagcaatttggttaagtgttggcttgaacagaccaaatcagccagctcctttgctattgtatgaaccacagaataataagtttaagcataattttctgcccctaaattaatattttaatatgtaatcattcagtaaagaacaataaagccttcggtgtaaaaaagaatagatagattgatagatctatctaaaaattcttatgaccacatgtaaaattgcattatgtatttttgcatttgcccaagtaaattcaaggtaaatattaatactatttgctcacatatttaatcaggtacctactatgacctagacattgtgcagggcaccaagattcaaaaatgaataataaatagacctcaccttcaagcaactcactgcctcactgacacaacacacacacacacaaatactcatgataatgttggtttctgatagataataagttgtgtgagaacacagaaaggaaaatggaagaaagcatcacagaagaggtaacattgcctaaaagacttccattcatgccttaagacctagctccactgagaagggtgagaagcaatagcatcaaagcaaaggaagcatgtataatacagtactgtggaaacacagatgtgcgtggcttatgcagagtagagagataggggataaagctgctggggtttataggccctactaatgattttgtactatatgttacatataatgaagagccattgtattcattgtaattaagaaaacagttgtggatttattcattttgattattcattggtaatacatataattaaataagctgttaataagttacagagatatcagatatcctaatttaataagaattagatctgtgaataccagggtattatctatagtcagtgtttcctacattctcctgaatatatttaagtcaggtgaagattttctaagatgatttctttataaagcacaattagcatttttttccacaaaagcagtaataaaaccaccatcatacctgtataaaaacccaaatttttatataatattccagtagaactcttaaaagcactcaagcaatgaaattaccggcacataaacaatacctaactcaaggattgccagaaaccatatttttattatctacaattattttaatgttaaaaccaataatgtggacattttggtggcacaaagtactcttgaactacttaattagtttaataggcaacatggtatagaacagtgacttttaatttatttttctcaccgtttcccacagttaaaatatattttgcatcataatatacaaaactgaaacaaaagtttcatgaaacaattaaaatctttactaaatgtgatgttctaggatatattatattctatttcattttttatcctagtcaaaattggtttcataacccatcaattgatcatagccagacatttggaaaacattgttataaatagaatagttgaaaataactggatttgaagtcaaaagatactggattggaagttgaaagacktgggttctttttctgggttctttttwctgcttacaatctctatggccttagtaaagtcagttaactcctctggtttttgatatataaaatgggaatgatgccttccatgtctatctcacagactcctgttgtaaggagcaaatgagataatatagtgttttgcaaaccataaaacactatataagtgtaaggaggtgatatccataaaatgagactatacttcatagttatgtatttcatgtgactttcgtgaaccttttaatccttcaaattcactgttaaaaataatttccgtgacggtatctagtcacaccagatgtatgtgaaaataaggttgacaaagtgtttctcgttatgagtaaatgacataagttcaagtagagtgtatgtttttggcctctctgaaagaaatgtgaaacagaccagcaccctttaaactaaaagatagttaaaacaatgagaggaatgcatggctttatattatgtaatttgcatatgtgacacatcttttttgatacatggtgctgctgctgaagttagcctttggcaaagacgtgtcataaacgcatttgcagaacactaataggaagaaatctataacagtgaagagggaagcaggcaaatcattcatttgaaaaagcattgtttagtaaaatattattatgaactacctatgttcagttcttgccttgctaaaaatggatggaaattcaatatgatttgaggatgacttgtctggttttctccattcagtttttcaacaaacatttgctaagtactggctgtgtaccacactgcaggtgctatgagagtcattacctttcaaagggctttatcctctgttagggaagataaaacaagtatacaaatacaaagcacaacattaggcctgttggacgattgcacgaagcagagacttactcagactagctcagatgataaggatttattataagcgtgcatgtccaaaatctgaaaatgaaccaagctctagaaatttcagcagcaggagtttgtgaattttcaatccagggttctgctattcctgacacagtaactgcctcctgtctgcttttttctatatctgtctgttctctttctgccaccacctggcttcatgtgtcttaggaggtattgggggcataataggaaacagtgctataggtggtcagaagagattactgtagcttctttctttagatttcaaagaatggttaataaaaggggtaacattggtaatgggcctcagaagagtaggatgcaaacaatatgggatgaaaggacattcaaggtgggaagtcaagtatgaatgcaaagattcagagatggagagagcaccagtgggtctgttgaatggcaaatgttgcagtgtggctgcaggacaggaaatatgcaaaggtatactgggccaaaatcatacctttttaacccctcaaaaagtgttctaaaacttttgaatttaaatgtaatatagtcaatctacatgtgtacgtattttttaaatgtccaatagttttccaatgtaaaaaaaaaaaaaaaacagtccaaacaaagcatacctcaaaaatgtcttccattggcctttgcttcagtttattttgcagaaactggaacacatttgtcactccattgacaagcttatctagtgaggcatggcactaggcagtgtgtggattgataaaataagaaactccctgttcttagaatttgccatttagttgagggacaagacagacaagcccaaacacaaacataaatgtagcagaagcaggtatttttatacagctgtcactaagtactttcacactccctaaacactatacccagatattaccacccaatctccctcattggcttccttgcttacctattcagattcctttctcctcagtgtgctctaagcttcacagcaacataaaaaggtacctaattggttctctaattgaaatatctggtcttgggtttaaagaccatctaccaattgctgtccccacgcctgcactcatttgactatgtccatttaccacttctacctagtcatgctctcctctccagggaggcaaacttatttgtcactggaaaatattgtcctttgaggacctgaggtcttaatagaaggcagaagagcaagcaatgatcactgataaaatttgattgcctttgataaagtaacatgaataagggctttaaacataaatttctttataaacgttggattcaagtttagccaaaccctgcaaataaccattatatgttaaataatcaagatgtaccagcaacagtttttcccttgctaattctccaggacatagaaggtaactaatccaaggtgacacggttacaataggattcaacaaagtctagtctgttctgggatagaaaggtatattttgcttctttggaatgccctccagaaatagaagactatatctagggtgaacattccaacttaatcctaaatctgagagatatctctgtgcctattacctgattcagctactgacatagcactgatcaccttgtaaagcacacatataaatggctctacaatagagacctgttctcacatgaaacctagaatatttgtggagtgattattaatggattaatgcgacatttagtagttgcaactcagctgagaataggagatgagctcctggagacacaaagaacctcatgtctcaccatttcttctcactgactaagcttttcaaaggggtgtgtgtgtgtgtgtgtgcgcttttgagagaagtgactttcaccttcaccattatacttgggcacatagcatacctaacacttaataagcagtacaaaaatgtttgtttaraaaattaaatagctggcttgggctaggaaaattattaaatcagcattagcatgtctataatttttcccctctcttaattgttatatttacttctgctgctctgccattccctcgtaccattgcccaagccactgaggcaccctgctccctttcattagggccatttcccttccctgtgtatcatacaacttttctgtgaaaccttgtagactagtctgttctctctttttcaactctaccactgtttacaattacctgctcatcattccattgtattaatatgcatgtgcttaccctcctcccatgtcagttacataaccttttctgatgaccatccactattccttttggtgatttttcaggcagatatatctgttaggggaagaggaagaagggttaaatggcagatttatttctgtaatctttggaatgaggttagtcagtaaagactacacaagtaaagactacacagtaaagactacagcatcatacacaagtatgatgctgaccattatgtgtaaagctggaaagtgattatgacctggagtaaaggcatactcatctcaatggtcaccactggttgaccatgtaatcttcaacaaataacataaattttccatgcctcattttccttaccttatatttaaaggtaagtatttattgtaccagcaactttataatcacaataacttaccacatcttataatgagaatgatgattggaatgatatataaatggaatgctatttgcacctctctgtgtataagagagctgaaaatgattaaatacagtaacaaatcatttactcagaatgtctgagacctgacctgttctattatattggaatttagatatcctagttccaagtgagcataacaattttaaaggcatgttagctaatcaatttatgctatatagtgtaagwtgcaaagtatagtaagaaataagttttaaaaccatctgtcttagaaagcatgacacataatatggaatgtaagatatggtagaaaataaacaagtttttaaaacatgagttgaagraaacatttatttagtgttaatacattatctagatgagttggtgctatgtatggaattgtgtcccccaaatttatatgttgtagccctaaccaccaatgtgatagtatttagcaattgggcctttgggggatgattaggtttagatcattccatgaagatagggcccacatgatgggattagtgcccttctaagaagagacatactttctccccaccatgtgagaacacaacgaggaagcagctatctttttatttttcatggaagaaaatatttgcaatgtatttaacacaaaaggattgatattgggctttatgtaataatttcaaatcaattgtaaaagaccaaacatccaatgtacattaaaatggacagaagttataaagaggcgattcagttttaaaaatgaaaaaataaaatttaaatggctaacaaactgtttttaagatgctccacttcacttgtaatcagaatacccacaaaaagttgtttaaaattataatccatttatattatagaatactatggaagcattattttttaaattaaggtctatttgtatgtacatacgtggaaagatctccaaatgcatttcttagaaaaacatgctacaaaacaatggaaatagtatgatcccattcatgtttttttatttttttatttatactttaagttctagggtacgtgtgcacaacatgcaggtttgttacatatgtatacatgtgccatgttggtttgctgcacgcattaactcgtcatttacattaggtatttctcctaatgctatccctcccccctccccccaccccacaacaggccccagtgtgtgatgttccccgctctgtgtccaattgttctcgtcgttcaattcccacctatgagtgagaacatgcagtgtttgattttctgcccttgagatagtttgctgagaatgatggtttccagcttcatccatgtccctacaaaggacatgaactcatccttttttatggccacataatattccatggtgtatatgtgccacattttcttaatccagtctatcattgatggacatttgggttggctccaagtctttgctattgtgaatagtgccgccgtgaacatacgtgtgcatgtgtctttataatagcatgatttgtaatcctttgggtatatacccagtaatgggatggctgggtcaaatggtatttccaattctagatccttgaggaatcgccacagttttccacaatggttgaactagtttaccctcccaccaacagtgaaaaagcattcctatttctccacatcctctccagcacctgttgtttcctgactttttaatgatcgccattctaactggtgtgaaatggtatctcattgtggttttgagttgcatttctccgatgaccagtgatgacgagcattttttcatgtgtctattggctgcattaatgtcttcttttgaagtgtctgttcatatcctttgcgcactttttgatggggttgtttgatttttttcttgtaaatttgtttaagttctctgtagattctggatattagccctctgtcagatgtgtagattgcaaaaattttctcctattctgtaggttgcctgttcactctgatggtagtttcttttgctgtgcagatgctctttggtttaattagatcccatttgtctattttggcttttgttgccattgctttttgtgttttagtcatgaagtccttgcccatgcctatgtcctgaatggtattgcctaggttttcttctagggttttctttggttttaggtctaacatttaagtctttaatccatcttgaattaatttttgtataaagtgtaattccctttgaaaactggcacaagacggggatgccctctcgcaccactcctattcaacatagtgttggaagttctcaccagggcaatcatgcaaaagaaagaaataaaggggattcaattaggaaaagaggaagcagctctcttaaagcagctatcttcaagctaggaatagagccgtcaccggaaaccaaccatactggtgttgcagaacattctctttagttcagctaaaatcaggttcttgtcacacgaccaggaaagatgaggcttgcggacacatagaagggtgaggagtggaatttactgggcaaaaaggaaaaaaaactcagcaaagtgagatgctaacaggccctccacttcacagattgaatcccaggtcaccacacaggaacaggagaggttgggctcctccccactgcaaatggggagaacttcctgaggctccaccccttcctcccagtgcacaggtgggctgtattcagagacaattagtcgtgaaagggtgggcttcatccgggaccagcagtctggtttttcagccttcaggctattataggcttgaaagcagggttttgccggggactcttgactgtcacctgtctctatcactggtactttgaacttctagtctctgagctgtgagaaaataagtttctattgttttagccacccagtcaatggcgtattgttatggcaacctaaaccaagataatcggctatttattattttatttatttagaaatatggatgtatatctccaggttttgttggctagcaagcacatatcttttacttttatcattacttgacacagcccaaattttccaaatacaactgattatttacattaaggaataggctgtatgatatrtatgtacacaattcagtgcattaaaatggaactggagactattattctaagtgaagtatctcaggaatggaaaaccaaacatcgtatattctcactcataactgggagctaatctatgaggatgcaaagrcataagaatgatacagtggactttggggactcaggaaaaagagcaggagggggtgagggatgaaagactacaaattgggttcagtgtatactacttgagtgatgggtgcaccaaaatctcacaaatcaacactaaagaacttatgtaaccaaataccacccgttccccaaaagcttatggaaataatttttttttwaaaaaactatttctatctattaaaacatacgttattaagaacactacaattcttgggttaccagcaaaatctgtgttgatgaccatgtaattatccattataacttgtctgccctattcataacgctttcatttgtccactgtgatattgctgacccacagaatcacactatcgccatgtgatttaagtaaaataaaagattgaattatttattcaattatttatagataaatattccattcaatgaagaaatggcatgactttttattttgataaaaacacataaaatataccatcttaattttaatataccatctccaattttaagtgtatggtacagtagtgttaactatgtgtacatttttgtatagcaaatatctggaaccttttcatcttgcaaaatcaaaaatttatacccattaaacaacttccctcttccccctcctctcaactcctggaaatcactattagtactttctaagagtttgactattttagatttagattcctcatataagtggtattatgtagtatttgtccttctgtgtctgacttatccacttagcataatgtcttccagattcatcattttgtgcaaatgacaggatctccttttttaaggctgaataatattcaatcatatgtatatgccacaccttctttatccgttcctcccttgatggacgtttagatttcttccacctcttggctgtcctgagtaatacaatggacgtgagaatgcaaatagctctttaagatcctgttttccactcttttggatatattctctttaatagggttgctggatcaaatggtaattctatttttaattttttcaaaaaccttcatacttttttccatagaagctgcacctttttacattcccaccgacagtgcacaaagattccaatttctccacatcctcaccaacactttattttccatttttctttatactggccatcctaatgggtataagataatatctcctggtggttttgatttgcattacgctgatgattagtgacattgagtatcttttcatataccttctgtccatttgcatgtcttctttagaaagatatctattcaagtcctttgcccattttttaatcaagttgtttagtttttctgtttgttttgttttgttttgttttgttttttctgctattgaattgtatgagttccttttctattctggatgttaatctcttctcagctgtatggtttgcaaatattttctcccatttcataggttgtcttttcactcttttgattgtttcctttgctgcacaaaatgaacaatcatttttaaagccctttttcaaaaaaattctgttgttcagatacttctactcattatactcccgtataaacaaacttctgttaaaatgtttagggaattcgaatgcttttgtttgtttgtcttacattttcagttctttcaaatggagatgttatacaaattgagtgtattagtatgttacattatgaagaatacaataatttacgtgtaagaagttccccaaatccataaaatataaaataacattcaattcacattttttaacaagacagctctctagtatccctcgaattttaaractagattttggcatacctatgaagtgctacactatgtatttatttaatayagccaaccattagaactattatactgagtgacaaagatggcygaataggaacatctccagtctacagctcccagcgtgagcgacgcagaagacggctgatttctgcatttccatcagaggtaccgggttcatctcactggggaatgccagacagtgggtgcaggacagtgggtgcagtgcaccgtgtgcgagccgaagcayggcgaggcattgcctcactcgggaagcgcaaggggtcagggagttccctttcctagtcaaagaaaggggtgatagacggcacctggaaaatcgggtcacttccaccccaatactgcgcttttctgatgggcttaaaaaacggcgcaccaggagattatatcccgcacctggcttggagggtcctacgcccacggagtctcgctgattgctagcacagcagtctgagatcaaactgcaaggtggcagcgaggctgggggaggggcgcctgccattgcccaggcttgcttaggtaaacaaagcaggccggaagctcgaactgggtggagccaaccacagctcaaggaggcctgcctgcctctgtaggctccacctctgggggcaggacacagacaaacaaaaagacagcagtaacctctgcagacttaaatgtccctgtctgacagctttgaagagaccagtggttctcccagcacgcagctggagatctgagaacgggcagactgcctcctcaagtgggtccctgacccctgacccccgagcagcctaactgggaggcaccccccagtaggggcacactgacacctcacacggccgggtactcctctgagacaaaacttccagaggaaccttcagacagcagcattcgcggttcacgtaaatccactgttctgcagccactgctgctggtacccaggcaaacagggtctggagtggacctctagcaaactccaacagacctgcagctgagggtcctgtctgttagaaggaaaactaacaaacagaaaggacatccacaccaaaaacccatctgtacatcaccatcatcaaagaccaaaagtagataaaaccacaaagatggggtaaaaacagaacagaaaaactggaaactctaaaaagcagagcgcctctcctcctccaaaggaacgcagttcctcaccagcaacggaacaaagctggatggagaatgactttgacgagttgagagaagaaggcttcagacgatcaaactactccgagctacaggaggaaattcaaaccaaaggcaaagaagttaaaaactttgaaaaaaatttagacgaatgtataactagaataaccaatacagagaagtgcttaaaggagctgatggagctgaaagccaaggctcgagaactacgtgaagaatgcagaagcctcaggagccgatgcgatcaactggaataaagggtatcagtgatggaagatgaaatgaatgaaatgaagcgagaagggaagtttagagaaaaaaaaaataaaaagaaacgaacaaagcctccaagaaatatgggactatgtgaaaagaccaaatctacgtctgattggtgtacctgaaagtgacggggagaatggaaccaagttggaaaatgctctgcaggatattatccaggagaacttcccaaatctagcaaggcaggccaacattcagattcaggaaatacagagaatgscacaaagatactcctcgagaagagcaactccaagacacataatcgtcagattcaccaaagttgaaatgaaggaaaaaatgttaagggcagccagagagaaaggtcgggttacccacaaagggaagcccmtcagactaacagcagatctctcggcagaaactctacaagccagaagagagygggagccaatattcaacattcttaaagaaaagaattttcaacccagaatttcatatccagccaaactaagcttcataagtgaaggagaaataaaatactttacagacaagcaaatgctgagagattttgtcaccaccaggcctgccctaaaagagctcctgaaggaagcactaaacgtggaaaggaacaaccagtaccagccactgcaaaatcatgccaaattgtaaagaccatcgagrctaggaagaaactgcatcaactaacgagcaaaatcaccagctaacatcataatgacaggatcaaattcacacataacaatattaactttaaatgtaaatggactaaatgctccaactaaaagacacagactggcaaattggataaagagtcaagacccatcagtgtgctgtattcaggaaacccatctcacaggcagagacacacatagcctgaaaataaaaggatggaggaagatctaccaagcaaatggaaaacaaaaaaaggccgggattgccatcctagtctctgataaaacagactttaaaccaacaaagatcaaaagagacaaagaaggccattacataatggtaaagggatcaattcaacaagaagggctgactatcctaaatatatatgcacccaatacaggagcacccagattcataaagcaagtcctgagtgacctacacagagacttagactcccacacaataataatgggagactttaacaccccactgtcaacattagacagatcaacgagacagaaagttaacaaggatacccaggaattgaactcagctctgcaccaagcggacctaatagacatctacagaactctccaccccaaatcaacagaatatacattttgttcagcaccacaccacacctattccaaaattgaccacatagttggaagtaaagctctcctcagcaaatgtaaaagaacagaaactataacaaactgtttctcagaccacaatgcaatcaaactagaactcaggattaagaaactcactcaaaaccgctcaactacatggaaactgaacaacctgctcctgaatgactactgggtacataacgaaatgaaggcagaaataaagatgttctttgaaaccaacgagaacaaagacacaacataccagaatctctgggacacattcaaagcagtgtgtagacggaaatttatagcactaaatgcccacaagagaaagcagaaaagatcaaaaactgacaccctaacatcacaattaaaagaactagaaaagcaagagcaaacacattcaaaagctagcagaaggcaagaaataactaaaatcagagcagaactgaaggaaatagagacacaaaaaacccttcaaaaagttaatgaatccaggagctggtgttttgataggatcaacaaaattgatagaccgctagcaagactaataaagaagaaaagagagaagaatcaaatagacgcaataaaaaatggtaaaggggatgtcaccaccaatcccacagaaatacaaactaccatcagagaatactacaaacacctctacgcaaataaactagaaaatctagaagaaatggataaattcctcgacacatacaccctcccaagactaaaccaggaagaagttgaatctctgaatagaccaataacaggctctgaaattgtggcaataatcaatagcttaccaacgaaaagagtccaggaccagatggattcacagccgaattctaccagaggtwcaaggaggaactggtaccattccttctgaaactattccaatcaatagaaaaagagggaatcctccctaactcatttatgaggccagtatcatcctgataccaaagcckggcagagacacaaccaaaaaagagaattttagaccaatatccttgatgaatattgatgcaaaaatcctcaataaaatactggcaaattgaatccagcagcacatcaaaaagcttatccaccatgatcaagtgggcttcatccctgggatgcaaggctggttcgatagacgcaaatcaataaatgtaatccagcatataaacagaaccaaagacaaaaatcacatgattatctcaataaatgcagaaaaggcgtttgacaaaattcaacaacccttcatgctaaaaattctcaataaattaggtattaatgggacgtatctcaaaataataagagctatctatgacaaacccacagccaatatcatactgaatgggcaaaaactggaagcattccctttgaaaactgrcacaagacagggatgccctctctcaccactcctattcaacatagtgttggaagttctggccagggcaattaggcaggagaaggaaataaagggtattcaattaggaaaagaggaagtcaaattgtccctgtttgcagatgacatgattgtatatctagaaaaccccattgtctcagcccaaaatctccttaagctgataagcaacttcagcaaagtctcaggatacaaaatcaatgtacaaaaatcacaagcattcttatacaccagtaacagacaaacagagagccaaatcatgagtgaactcccattcacaactgcttcaaaaagaataaaatacctaggaatccaaattacaagggacgtgaaggacctcttcaaggagaactacaaaccactgctcaatgaaataaaagaggatacaaagaaatggaagaacattccatgctcatgggtaggaagaatcaatatcgtgaaaatggccatactgcccaaggtaatttatagattcaatgccatccccatcaagctaccaatgactttcttcacacaattggaaaaaactaacgttcatatggaaccaaaaaagagcccgcatcgccaagtcaatcctaagccaaaagaacaaagctggaggcatcatgctacctgacttcaaactatactacaaggctacagtaaccaaaacagcatggtactggtaccaaaacagagatatagaccaatggaacagaacagagccctcagaaataatgctgcatatctacaactatctgatctttgacaaacctgagaaaaacaagcaatggggaaaggattccctatttaataaatggtgctgggaaaactggctagccatatgtagaaagctgaaactggatcccttccttacatattatacaaaaattaattcaaggtggattaaagacttaaacgttagacctaaaaccataaaaaccctagaagaaaatctaggcattaccattcaggacataggcatgagcaaggacttcatgtctaaaacaccaaaagcaatggcaacgaaagccaaaattgacaaatgggatctcattaaactaaagagcttctgcacagcaaaagaaactaccakcagagtgaacaggcaacctacaaaatgggagaaaattttcacaacctactcatctgacaaagggctaatacacagaatctacaatgtactcaaacaaatttacaagaaaaaaacaaacagccccatcaaaaagtgggcgaaggacatgaacagacacttctcaaaagaagacatttatgcagccaaaagacacatgaaaaaatgctcaccatcactggctatcagagaaatgcaaatcaaaaccacaatgagataccatctcacaccagttagaatggcaatcactaaaaagtcaggaaacaacaggtgttggagaggatgtggagaaataggaacacttttacactgttggtgggactgtaaactagttcaaccattgtggaagtcagtgtggcgattcctcagggatctagaactggaaataccatttgacccagccatcccattactgggtatatacccaaaggactataaatcatgccgctataaagacacatgcacacgtatgtttattgcggcactattaacaatagcaaagacttggaaccaacccaaatgtccaacaatgatagactggattaagtaaatgtggcacatattcaccgtggaatactatgcagccataaaaaatgatgagttcatgtcctttgtagggacatggatgaaattggaaatcatcattctcagtaaactatcgcaaggacaaaaaaccaaacaccgcatgttctcactcataggtgggaattgaacaatgagaacacatggacacaggaaggggaacatcacactctgggaactgttgtggggtggggggagkggggagggatagcattaggagataaacctaatgctaaatgacgagttagtgggtgcagcgcaccagcatggcacatatatacatatgtaactaacctgcacattgtgcacatgtaccctaaaacttaaagtataataataataaaataaaatgaaaaaagaactattatactgagtgacatatgtagtgatactatttctagagtttctagttgaattaccataaccctaaactatcctcataattatctattgttgtaatctaacatgtatttagagaaggaaaatccctacatgtgactcatagyttaagataattctttttattgtaataacatttacttgaagccaatttggtatttcccatagtagagagatggtcatcatgaatgccagttattgtattaaataagaattttttttaggtacataatatttcatttgtaaatgtggttaaactttaatgtgcaggaagaaaaacagcatacataaattgctcagttgtctttttaaagcaagcccatcaagcagcctcttctgatattttcagcatcaacttgggataaaatgacacaccaaataagctaacaactgttactatagattacataaattatgtaggtgctactgaaatgaagatatttgctactcaaaattaaaaggaaacatttaatgatgtgtgcttgagcatattgaatcggacttacaaataaaataacccactacatagatttcattataagttattacatagctgttcagactcagcattttatattaattgtttgcaataaagaggaatgacaagattggtataagcacagttggtgttgtttgttttgaaggccaggagagatggctgagtggcaacaaatggaatcagtgcaatactatggtacccaaggccttgcactaagttctccacatctctcagactcatattctccatctctaaaatgggcacagcatatgaatgttgaaacactgtgttttcttcaaggctgtggaagttatttatagcctcagaaaactttaaaaattacacattcttaacaataatgactctttttttcaaacagtccattttcacagcataccagttatgtgaacaagaatgtaaaataagagagactagagggccaaaaataaaaacactaaaaagaagtaaatgaaacttgtgatatctccacagtcagtgtgtctaaattcatgttatttttttcatggcaccaataaaatttactaaaactttgtaggtcacttatttcatttgggttataaaaagtctctaatttgattctgtcttycccccagaaatgattagccactcgttttaatggaatacccacagccatagtcttcatgacaacaagactctgtgtaaatggtttcagttggaaggtgggaagaggccttaacatctgtgtagccttacctctccccatcttggtctactgttccaacagaggaaggggacatgtttttcttttcttcctactttgcaagtatatatcctaacaggcataaggaaaagaagtaatagttgtagcagtagcagcaacagcaacaaatgtgaatatatgtaagtcatcactgaattctttgaaagaaaattggtttcataatctaaattcatactggaaataattacaataataattatattagtaactaacattaactgaatgtgtcacatgtaccaggcactatgctaagtatttgacatacaatcctggtctggtacccatgctgtttacatatactataattaatatgcaatgctttaatgaatatatttggatacactatgaggcaagtcgtatgtcccaaattaggttgatacacagttacaaaattgagcagatagctttcatttataatgtggatgttggtcttaatgccaatatgataaagttcctgtttatttgctatgagcggtatacctacaaagcgccacatttctaaatagtcgtcatcgtttgttaggtggtatttttgtatatactatttaaaaatgtttctgagcattcctgacacttcaaacggttatccacaactccttccctcatggggtttgacgtactgtgagggaattatttgaaagccagttttgcttgcagcttggcccagtgaataaagcatcagataatatttgtgaaagtctttgaaagatgcagatgaaaggtgcttcataaatacaaagcactaatgttgtattcatggaaatggctcttcttcacatcctttgctctaatgtctgagtctcaaggtgttattgcaatggatactttagaaatgcatgtatacccccagatcattttagtatagaggaaaatgcaagtgaacacagtcagagtacttaactaaaaatcatgaaatagagactattatctgaagtgaaagaaacttgcagcataataaagaagctgatcaatagagagtgtttggtgtggcttggaggaagaggaaaagaaaggtgtcaactgttcttatattgactcatgacttcaataatagcttcttagaacttttagaagaaaataagaaaactgaaaattgtgaaaaaaaatcaactataatgcagaagttttaagtaatcaagtgtcttggagtcaagtagattatcctcttaggctacttactagatggcacctgattttatagatttcattgagctcaataattgatcattcatttaataatattatttagtgcttactatgtgccaagcactctgctaagtgttttgtacacattacctcatttatttcttacaaaaaacattgagatgcttattactatccttattttacagatgaagaaacaaaggcttgaaaaggtttatagcaaactgatagtaaatgacagagctgtgatttaaaccgacataggtctgattctaatatctgtaacttaaccattgtgtcattcgaaaatgttatgatgtacttactaatttaaacaagttatatacagatgatatctctaagtaagtaaattagtagcagagaaagtactctacacttgattcaccttattgaaaacaaacaaatgaaactaagacactctcctctttgtcttctactactaaatataaggtgttccctaaacgtttaggttaatttctccttttctttggcttcctcatcatttattttgtaagttataagtaggataagccctactttaaagaagagtatagttcagtagtagacagcacttgaccttttattctgtacacataacaataaaatttaaatatatatatatataatctctctctctmtatatatatctgtataccttgacatgcaacccattttgtatgtttatcactagaaagccctatgatacacaatgttcaaaactacccagaatgggaaacatctaagtcctgtactgtaagtatggaaaagaggaaattgccctagtgctgccagggcaagaatttgaagatcaggtagctggtcagtaagcctaagtgacaatggcttcctgagtaatggaattatgctttacataagcagtttccaaatgctgatgagaccaggagcataaaacagagcaattccatagtagtatgttcttttaccctgagggggagacagctcactctgtgtgggctaccaaaaccagaaaatgagggcttgtctccatgaagtacaggggaagcaaaagggaaccatgtatacatgcttgcattttaatttcatttctatcctttgtggtacgtgtttgctatttgggagtcaagaaaagtaaaagcaaacttgaatcaaatccaggttgtcatcattcccatccaggaacccagatcacactctgtggtctgctctggtccagacctccagtgttaatacacagaaaggagcgtctgtgcattcattcactgacttcaggcactacaagaagtctctctgagaaactgtttcacataagtaatgtatgtttaatctactgtccctctcagcatctcacctatcatacatatgtattttcacaaggtacatgagtaccttttgaaaaacttacttgaatgagcttaacgaagaactaaattgcttaagagataggttggtgcaaaagtaattgaggtttttgccatcactttccatggcaaaaccgcaattacttttgcaccaacccaatacttgcttaaaggacatatttatcaatcactacctatgaaatcatttcttaatttctaggatttccatctatatttactactgcagtctcatattcacagcttcattaacatgtgttctcatttttttcttctgtttatgcaagctgactctcttccccttgagatgagctaatttttttcattttctgaaggcatctatacattatgttcatttcgctggaggggagtacctgcattcactgttgttcaattcattctaatatcatatgagcagattccactaatttgcgtttttattttttttaattttatttatttatttatttatttatttatttattgaaatagtcttgctgtgtcgcccaggctggagtgcagtggtgtgatctcagctgtctgcaacctctgcctcctaggttcaagcgattctcctgcctcagcctcccgagtagctaggactacaggaacgtgcccactatgtccagctaattttgtatttttttgtacaaaattaataaatttcataatttagtagtttggtttcactatgttggcaggctggtcttgaactcctgacctcaggtgatccacctgcctcagcctcttaaagtgctgggattacaggcctgagccactacccctggcctaatttgcttgatagacatttcacttgatccactagcagacacatctatatcaatagatcagtatatttcctaattgagctgccttctcacaacttcattagccatattctagttaatgaagtctcaagtgcaatctacacatagtttgaggctacatgtgaaaagacatcattwcaaaagaatttatcagataacttttttgtattctgggtgatgttcatccagaatgttgcattttgtttggggaaccataaagacctagttaaattggagtgagtccggggagataagcagtaatgtaattgagagaatgaatcagactttgaaggaaaaataaaatgacttaaatatgcatagcttagcataagcaaagtttataagataggcttagtaataggttgtaattttggcatatctcccaaaaaatagctctatttaacatttcactaaaatgccatgttgaaaaacaagaagatgaaaatttgtaataatgaatcaatcaatgaacatttcaagcagaaaacttttcagatacaggctgtgcccacacaatgccaaaacagctgttaggaatgtgaataattcaatcaaataagttatttggcatcataaaacactctcacccaccatggttgctataacttttttataaaataaaacttgattgaattcaaactttaaatttttgaattcactcaaattaattaaatttgtaaataaacaaaataataaacttgaataaaattatgggttgtatgtgggagatataaagatgattcagactcacatcctgatacaagacaagtatatgcatagcttgaatgcaagaggggaaataaaactttctctgtccttcctacagaattgttactttcctgctcatacttcttaggaggctccctcactagcccattagatgtcagacagaaagattggtggcagccagtagtgttctaccagcaatcattaagatcataattctgaaaaaaaaatgttttggccccgacatatttgaataacatgtacatgttactcatatgagaataccaggactcctttttttaatgcttcctatttcctttttgttgttgtcgttcagaggggaaagataagcaagtcttcgtccctcccatggtatgagtagaatcactttacaagcatatggatatgaaaatcacttattacaattgcttataagatcagagttgtacccaattcctatcactagctataaccccaacccctttctctcccatccaagaaagcacatccaaatgcaactcagtgagagtggcactattagaggcatcaccctgagtccactcatctatactttttaaaaataaatcatttgtgaatttcagccctctattatagcaacaggtgaccgcaaaacattggcatgttttgatcctatatctgagcattgctgaactggagcaaagggccaaaacatgagtgaaatttgagaatcctctggctcttgtgaatactgctataatagtgacatctcttcccattgtcccagatgagggctatgtacttgtttagctcccaattatagatgccagggttcctctccatcactccattaggtgtccatgagtgccctttgttcttaaagttgtgctggtggagaggaactatggagtacaggggatctttcttgccaaataaccagacaacggtggttacgagaacattttcttcagcctttatttgaaaaatttggacaagggtgaaacctttccgaggcttccctagcctctatgcttttttatactctagaatttttgccttttgctttttttgtttattcttaatatagcgtgccctcactatttaacatatgatagcttgaaaaatacttttcttgaaacttcagacacagttgtaatgttttcctgatttgtgcttcaaacattgcgttctatctttataaataacattggagcgatttgcattctttgccttttgaacaaatacagggtgaccatttataacagtgtaataaaaataaagccctgaaaatgaaaactttataaatgttcaggatatctcttattagctaattcattaaatgatacactgtcaattaattcataaccctccattacctacctgcaaataaataatgaacttgaagattgaaaataattgaaatacctacataagactttagtttgagtataaactaaatatgaaattttaaaggatcattacttttttatattttctttttgatatacttcactgggtaataacagaagccacaatatcattgtcaacataagataaaacagggcaattatctatttcatgtttcatggtacataacagataacagtttctttcaaggctatagtgaaaaggctttggccaaccactaattttaattgctaactaataccgtatactaacgtttaaatattgacrtttaaaattccaaattgtgccataaagtagagctctttaccactctacttagaaaaatgacaattttctaagatgacaaatatattggcttcatttttcttttttttaacattacgaaactactctacaaatattagcagagwtatatccatcttgtattttcacaaccaagaaaattaggtagtttgagcaattactacaataatttaaacaaaatggcatttaccacagccttatctttttttcttgattgtaaagtcctggattgtttgactgagttaaaaaaccagacacttattggcaggaatattgagtattatgcctgaggttggctgattgtactatgtaaaaccaatacagtgtacagcacagttggcttccctctataacagagacaggaagaaatgggctgggggagggctgctttgtggatctttgactaacttgtatgcttgcacaacaaattggagaacaggaaaagagattaattaaactagaaagtagaaaatttggactttctggatgtagaccagcactccctctaaagrtgagtatcagcttatagagagactaaaatataaatatgaatttcagcacaaacatgtcaaaggatcataggtgctttattgttgaccttcatttccagtgattgtaacaaagatcaacctaactgacagaaattaacacagcatactrtatcttacctgctggcttagtgagagggccattcaaagtcctcaaagggatgtacttgacaatccgaaaaacagtaaatagtatccagggctgtggaagccatgcagaatgcagtaatccagaaccaggttgagcccatggaaactagaaaacattgtaatttattgttagctttcccccagagcctctgtgactgttctccttcagtcatctgcttcagttgtgatatctcctctctatttctctctccttctgactctttctgttgttgtctgtgcgtcactcatgcacatgcccatttatacataagtatttattaagcattacctatcgaatggactttatttccattctcaatccaatggtttatttaactgataaatctgcttttaataaaggatgttggtatattaatattaaagcagtattatttgagccagaaaagtgataaactgtattgtttattttcttctgaaaaccagttttcttacctttwtattcttttgagcctctaataataattacgaggttgagaacagaacagccagatacatttaagtctaatttgatgatcattgagcactatgaagttaatggatattagccgtaacatgcaaatcttaaaactacctgctcacaagttacaaaagctctttgtgacaggtaaaataccattaagtagtaacatacattttgagttagtagtaatagttaatattaataagaaaatatcttctctttcttttaagcctgtttccttttaccccctactcctgcctagaaggggagggcagctcagaaaagcaacctcaggaaccaaagacttctaattggccttgagagatctgacataagtagtatggcaataactcttggtgccctgatgttctttgcacgtgtagattatatggtcttcagaggcattaattaatattgcctcataagagctcaggaaggtggttaaatactaatacaggcccataatcccttatccaaaacctttggggtccacttttttcagaatttagaatttttcaaattttacaaaggtgctgctgtacatatactgtatattatatatacactcacccagagtgaggtatgggccagcaccccttaataaaatgcattaatactttcttacctaaatgtatgaaaattcacaaaataagataaataaatgaagactataaatgtcctcatatcacttcaggtcaggctttgccaccaaaatttatgaaattagataaataagtaaagaccataaatatcctcaaagcatttcaggtcagcttttgccacccagtgagttaggggaaaacaaactcatttttcagagattctttgattccatagttgtagwtaaagaattgtggagctacccttccccttggccaaggagataatgaaacacatactaagaccaggaagtacagacatgatttctgactctccgtgacctttttctagagctataggaatatatgtgccccttttgacaacgtacactgcatagtaaccttgggaaaaaacatatttagggaaggtattgtcacagtgtcactaaagaaaagaatgatcaatttagtacatggatttcagaaaagctagccatgtatctactttggtcaaatttttcaagaaaaatgtctatttggcattactgtaatactgacaatatttatttttaacacctaccgaaaattattttgcatgtacagccagtgctgctacagtgctcgttttataaaggttaattttttcctttgccattgggatgtttgagaacagtttgaacttaagacaaattttgcgtttgcatatgcgcaattccatctgttaaaagcactagatgaatgcagaaaactgcatacagcagaatgaactgcgtaagaatacacaaaatgggcacatgtatatacctgcaatatccatcagctatttcagctcaccacatgtggataggagcctgtcccatccacatctggtatttagaagtttccgtcctaatcagataactttccttttcaccacttcacaataactcacaatttgcaactcttctggcacccactttcacaagataaagtgtcatatttggtatggcattcgcgtatcccttaaccattaatatatgacaaactatgctgtcattcttattaggttcctttttttttaatgcgtcattgattatgtttctgaatgttgcatccctaacttcattttttccataaccctttggttaggtgtgattttgcatagtgcagtgaattgcagaaatgcatgctttgtcttgtagcagaactgactgtatatgttaatgaaatgtaagggacaaaacaccctgatagacactctgataagttgccacagtatttctgagcagagatactctaatttcttgtgaaagctttctctaacacattatccaaaataaggtgtattggcaaaaagagaagaaaaggaaaaaagaaaaaactatgcgtgacacgtttcttcttgcacttaccttttggagacagaggcaatgttgtttctgaaggcttatacttctattagtagctctgccacacttaaaatgtctcaaatctacagtttggaggaattttgctcctgagaaattatcttaccaagttattttaggacctcaaacctgaaactggctactatccaagtatattatgtgaattagacctttccatttgaaaacttaatttattttcagaaagctttgtaagtaagtctggatatctacatttgcataatcaccactccccccttctcccttcctctctctggggcacagaagtgtatggttgccagatacatttggaagtgagtgtatgtgactckcaaacccctagaattggtgttctagagcttctgacactgaacactaatgtatttttcattagtgtttaatgttgggaaatcccatttcatggatcccaagtattaaattacttcatttgggagggaacaagtgcattccccatctttttcctgaggtgaaaaaaagaatgaatctgagatcatttgcatttcataaaggcttaaggtctggatgtattccactcagtgcaacaatccaatattgtgaaagcgtttaaagacaatatgaactagcagggaaacttccacatatttgaaatgtggaaataaaaatacacagtaaaatagatgaaaatcaaaatatccatatatgtatatggatatgcattatacgtagataatctaaatgactagacaaagccattctacctgcaacagaaataataatactatgattgcacttttcaatgaagtaaaatttttatcatttttcataatagagttgcaaagattgtgaggtaatctagcaggcaataaatctgatgtcaatgagatattctttttcttttgaacaactgtactgaagagaaaccctttctcttgcacaactgtgctgacagaaacccctactgattaagctagtaaatgtcatgcatgttgtttagaggggttctgagcacaagacctcaaattgactcctctttttcttctaaccttggacttgcaccttttcctcccttccctcgggtcattaagtgctctcccacacgtggcattagacagtagatctgtagtgtgtcactggtgcttttttcacatcatgaaggggcatcattttaagcaccttcttcagagtatcattgtcctttgtcatggctctgggaggcattccactaagatcttcaaggggaaaacctacttctctgtcaattgaatagatagccagtggctacatcagaatgagagccaaagggaacacagaaggtgattatctgggtcccatgatccagtcaaacyctcttctattagcaaaagattttagagatcttgctctgtacccagtactttgctcaatgtcatacagcatacaggagaagtagaaggaaaccttattctaagaaacatgcagtctattttgggagaaaaggcaaaacacatagaatatgatggggatgctataatattgccaactcagggatcaaatttatggcaaaaatagtaaatgttaaagtcatagaagagagtcatgtttatgttccgaagtagcataatggaaagagtgctgggcagagtactgggatttcagataacataacccatgggggtgggggagagttttaagttcagtctatctgttaaaatgtcacttaatttacaaaaacacgtacagaaaaagagtaaagaaatcatctggcatgggcaggaaaaagtatccaagttgaatgaccttgagcaagtcagttcacctctttgggtcttgggtttctcatctgtaaaatggcgagtggagagaggcaagcttaactaggtgatccctatgatttcttccagccttatagttttatacttttatacttttattacattcaataaagaaatagtcaataaaatgcatgctcaagcacattttacatgaattaaatttaattgttaggaaaagggattattattatccttattttacaaatgaggggttaaagcttctaaagggtagaggcagaacttaaacccagatttgccatacatcccagtccaagtcctctcctctttccactgtgctgtgttgcataccattacaccacactgccttcctttctacatttaaggagtcatggtcaaagagaaaagcagacgtaataaacctaagtgaaaaatcaagaaaatgtggacaattctttgtctctaaatcttatgaaggaaaagagaactcatattacagagatctgcaatacagggaatggagcattagccagagagtcaagagatgtgagttctagtcctggccatgccactaacttgccaagtgtccctggacttgttttctcatttgcaaaatgagagcatctccaaagtcctttgggtttcaacattctatgcttctttgagtccccaaaatggaaagcacacttctagttacggttatgagtatgagcccagaggtttaaaaaaagttaatgagatgttaagtatttgtgatgattttttttagtgaatatgggatttgagctgggcctggaataatgggggtgacttaggaaattcatgaaacattttagttcttttaaaatatacaaggatagctgaccatctaaaggaatcctttttataaaatgaatgatcaccactcccttctctakctatcttttgtacaattcagattttcatatagtgagtttatttaaagggagagccacctgtgctagaaaatacagccaagaatttgtcatgctcttgggaggctaatatcgtttttaaaaataaaaaaccatgccaatgtctttaaaattcaagtttgaagtaaaaagattgaaagaagtgattttttttttttctgtgatcagccactgcaaagtgggcctcagcacaaaccagctgagtcctttgctaggcatcgaaagcctctggcgtttttctgcttttcaactctcagtcatttgggaggtgggacaaggccatgctgtccacaaagtttatccagaacgtgctggtgttacaagaaatcacttgacatctattatgttkctcctgtggaagagaggtggctatcagctacaatagtgatttctttttaaaggggtttaattgaggtatttctcatgggccaaattctaactcactgtctttacgtgtgcctgccaggaaaacaatggaaaaataccaagcaatagcaacaatagaagcctgaggaccgctgtcccaggctgcccctctgcaaacgagcagaaaaaaaatctgtttccttgctgcctaagctgccgctaacatggcagagctcctagaaaggtgtggcaaaggaaaaaagttgcagactgtgctttgcatgaccatggaaatatgtataacaacttgaacaaacttcttttakcctaccttttacaagtagcactctagttggggggctgacaaagagattagtttcacacagccaagcgacacactcgtgagctgtttttctaaaatatggatttgctcccgtataggcaagctcacatcctttcctgaggtaagccagaaggtggccttatatttttatttgaagtgccgaatgattttccttgcaacaaatttgtgccttttactagcattttctgaagtgagaattttgcaactgatggaaatcagctcacttctgttctgtaacttggtgtcttgttgatgatttatttgttcagtagcagaaactatgacaaatggtgtgaggcggcctcatttactttttagctgctatagccctaaagaatttacrtgtaaatgcaactgtgaatgttttacatttcataagcatgctgcacrtgcttttgtaagttaagtggcatttttacagatagactgaacttaaaacaacctccctcaccccacaggttttattatctgaaatcctggtaagtctgtcatgctggtttccctgactgccaagtgggagagtaagtctctattttatgtttctcttctctcctctttagatgtgcagagcagcccacacaaccagttcaccttcagacccctcccaccgccacctccgcctcctcatgcctgcacctgtgccaggaagccaccccctgcagcggactctcttcagaggagatcaatgactacccgcagccagcccagcccagctgctccagctcccccaaccagcacgcaggattcagtccatctgcataacagctgggtcctgaacagcaacataccattggagaccaggtacttgagctattattgatcccactaaacttaagtattggcagaggatggttctactgattgcagaaactcatttcatcacacacatctgcagagacacacaaatgcacaaaccgatacacacccagatgcatgggcaaaaaggaagactccttcacaggcgcagatgtgcaaacagacacaaacatctagatccagccacagccacagaccaaagcagatacacgtgaaaagatgaagccgcagatacataaacaccctgctgtcacatatccacaaaaacataaaacaaagcaattatctaagctgtcactgcagcctcaaagtgaaaggcaattgtcccttgttttaaaaaactgcagtattacaagaaaacccaaacacaactggaggaggagtgatcatttctattttatttattgtaagattctttgaaaaaataagttgccttcaaacattaaaaaaaaaaaggatcagcctcatgtaatggaagtatatgtgtaagtttaaaaactaaattctgcctttagggtgaagcttttggtcttttgagcaaaaaagtttgcctctgtttttcttcacatgtttagatttctagattgactcctcagagctttgtcatgataaaagttctactctttgcagttctaggtcccttgatcatgatagattttagcaccagatacaattaataaagaaattattcatcatttctagtcactttcttaaatcaaacattacaactttatattgacatagaaaaacactaactaataaaacatagattctattttctttgaaattcaaggacttccccttgtttttttgtgtgccttatttagttctacaatggaagcttttatttttgttttatttttatagattcggggatacatgtgcatgtttgttacatggatatattgtgcagtggtgaggtttgggcttctagtgtaccctcacctaaagggtgaacattgtacccaataggtaattttctaaccctcactccccgcccatcctcccttttttggagtcccaagggtctatcatttccatttttatgtccatgaatagccattgtttaactcccagttataagtgagaacatgtggtatttgattttctgttactgagttagcttactttgaataatggcctacagctctatccatgttgctgcaaaaaacatgatttttttttaaggctctgtggtactctatggtgtatatataccacattttcttcatccaattattcattgatggacacttaggttgattccatgattttgctcttgtgtattgtgctgtgataaacacatgcatgcaggtgtctttttgatataatgatttatttttctttgggtagatacccagaagtgcattgatgaatcaaatggaagttctattaaaaatcgccatactgttttccagaggttgtgttaatttttattcccaccaacagtgtataagcattgccttttctccacattttcaccaatacctgttgttttttgactttttaataatagccattctgaatggtatgagatcgtatttcattgtggtcttaatttgcatttctctgataattaataatgttgagcattttttcatctgtttgttgaccacttatacagcaccttttgagaaatgtctgttcatgtcctttgcccactttttaacaggaatttttgggtatttttttcttgttgatttgtttaagttccttgtagattctggatattagtcctttcttggatgcattgtttgcaaatattttctcccattctgtgtgttgtctgtttactctgttgattatttattttgctatgcagaagctttttagcttaattaagccaaatttgtctatttttgttgttgttgcatttgcttttgaggtcttggtcataaaatttcttgcctaggccaatgtcctgaaragttttttcctaggctgtcttctagtatttttatagtttctggtgttatatttaagtatttaatccatcttkwgttaatttttgtatacagtgagggataggagtccagtttccttctacctatagctatccaatttacagaaactttttctaaagacatttgtatgtaaaaaatgggtataatatactacttgataaacaatgtctggtatcaccttctaatctgatctctgggaattggaatggaaagagaaggactagtcaactctcctaagactggttgttattgtttttgttgtttagcagcatattaaattaaataccaaccatggcatcagagaatatttcaccatcaacaaactgsaagtactatggcccatgtccaggaaacagtatcatccatcacttaccagattaaatggtttcataaagggtgatttctgctacattccaagagaaaaatatagcagtcagcacctatggtgacaataacccaattagaactatactagtgatagagtttctgtatttatttatttatttatttatttatttatttatttatttgagacagtctccttctgtcgcccaggctggagtgcggtggcaagatcttggctcactacaacctccacttcctggattcaaacgattctcctgcctcagcgtccagagtagctgggactataggcatatgccaccacgcccagctaatttttgtatttttagtagagacagggtttcaccatattggctagactggtcttgaattccggaccttgtgatctgcccgcctcaccctcccaaagtgctgggattacaggcgtgagccaccgtgcccagccctgtatcttttcttttcttttcttttctttcttttttaattgaaagggggaggtgagtaaagggtaaaatgcaaagaacratgtatatcttcttcaaggagttttcaaacagtggttatttcctcattttacttttagttcatttgcagagcttagtgatagagagctgaggaaacaacagggcaatatggttaagtagcagttctgacaagcaaacacactcctttcgtctttgaagccaaataacagaaaatctgggagagagtggggaatgggttcaggcaaatggagagagaaaattattcttatttgaaatgtacatctaggcatgtttgtacaaactgcacccacggaccttctgtatctatgcaaggaatatattaattggtctcagtttcttaagacgcagagaagaacataagttttcatgtaagagtgaacagagtacctttttagtacatttgaacatatatttagcatcacaatgatgattttttaaaagccagaaacgttattagctctatcaactagcattgttcaaatatagcctttaaaatgttcatttctcatgtagtcaataaaggtaactgtgggtatccaggaacttatacatgaactgtgtaacagaacctgtctgagcctcagcctcctcatctgtaaaaatgaatatacaaatgcctgacttcctaattaggaaaatcaaactaacgtagtagaaagtgcctcatatactgtaaagcactacacaattaaaaggtaacattactatccctactaagtggccacttgcctttgcataaatatctccaaaataggtaattggcttattcctaagttattccactctacctcaaacaactactagaagattctttttgaaccaaaatctatcccttcttaactctgcccatttttctcaaatctaattttagggtctcacagaataagtaaaattccccttacaactgacagcccttcactattcttgagtcctctattctttgtgctaaatgtttccccaattccttcaacctgttcctcacattaatgggtttcaaatctcccttcctggtctctttctttagaacactccagtttgtccaaactgctcttgaaatgtaatgttcaaggctgaatgcaggtgtgggttcttattagcctctctggttgcaagaagccagagacattcaggttgcctcgagtaattgagaacatcttttcagtgtatgtgttgtcagtccccgggaacgcgggaaactctggtcaatccccaaaggaaaggcaaagactgtggatctctagcattaataagactcagcagttctctgcatttttgctcctctctgtctgtttctttgtccaatagcttattctttccatcagctcaatatttattttgtctaccacatagtttctactatctcataacgatgtcttttctccactgtaccacatgactccaagagtacctcctcacwcctctcacctcatcccttcagctgcatgtcccattgctaactgcattattatcttggtcactgtaggctcaaaaccctaagagggaatttgattagcccagttcatcccttttatagcaggctgtgtttcagttttttggcaagccctggcaattattctcatagtcaactgaggctacggggagagaaaagtcatgtgattaaaataaacaacatggccatctatggttgtcccttgaggaaggaccgtgagcagatttgatgttccttagatgggactctcagcagtcagtcattttgactgattcactgaggattttatgctatgaccaacaattagccacctctcttgttctaattatgtattttcgttaatgctgtctactccagtatcagcttttttggtggccacatgacactatccatacacattgaraacaccggaaactaaaccccaaagcctgtttaacatgttctgaagctaaaccacgttttatttattctgtaagtacatagttgattctttttcagttttgtgtttggtatggaagataacagtggaaatatatttggagccttgatttggcctaatttgatctcatcttgttagcatgtggaratgttgctgagttctaattctaccatacaaactatttgcttttgctctcagaattatgtcatctgtaggcttgttaggtrtgcttccctcttttttatgtaagttatcgatacaaatgttacataagaccagattagggttagatctctgtgcatgccactggtgacatttatctattaggcaacattcttttactaacaacccacatttctccatcttgttcatagccatattatgggagaccttgttaaatgccttgctgatattcagatatagtatgcttacattcttaccgatcttccaatctaataaccatgtcaagaatagaaatgaaatgagattgtctaacataacttgtkcttagagaatttatactgcttgctttcttatggttactacttttttcctaagcgctcacaaactgttcttttattaacctgttgtagaattttgtatttaatcaacctgtttcttggtctagtctaaggagtccatatgcttcctgtttattttgaaaactaaagccaatgttttctgtttctagtctcctgtcacacttcaaccacactacagttgctaaaactttagcaactgtgacagggtaatccaatctccaagacctctgaccactctgggatagaattttaattcatttattatagaacagccaaatgccttttaatgactgctttgcctattttagcttcaatttatggttactgatattgattttaccatttcaagtctatcatcattctttttcacaaagaaaactagtacagtagttgagaaggcctctcagatattggccatccaataacaatttcatgggttgcatgtctctcctacccttgctcttcttggtttaaatatattttttaaaaagcacttttctgtcatctttagcagtttttttctcaagcctcaggctcatttggggtataattcttcttagcattattttcatcatgccctcttaaacttacttatttttggttttcatccctttattttggcacctgttcttttgaaatccaaactgaatgtgaatggataacacccagtacagacacactggtttcaacaggttaaaaaaaataaaatataataacttcccaactctcttaattcatctccatattagagtatctcagggcatgaaattgtacctactttacttcagcaagctcttttcctaaagtctgggatttgggccttataaggtacttatggactctaagataaaatacttcacttcctctaaakgttcctatcaccttcaactcaccagtttctctttttctaagtcagtcagagaggcaagtttcttattttctctaccttttgggaggtgtagtcattaacacaaaaatttgggaacttgccatatatttgcattttgcaaatcgatacaactagcagatgtttatggagttgaaatcactcatgtttactaccctttcctcctacgacgcttttgtgatctgtgttgaaaatcagcatccgttgtctccttctggccaagtgtcttattatagactctccaatccactacctattagtcatgtgacattgggcacattaattatcatcaccatgtctcggttttctcatctgtaaagtaaggataatagtaaaacctagctcataaggccattgtgagcattaaatgagttcctaattgcaatgtgcttagagcagccatgaacataatgarcactccgtaaatattagtaataataatagcaataataacacaagagattattttactttttgtccctattgctatctttatctaactaaaggtatttctacccttccattcataatttcctcaaaktaaacatatacaacatcattccacttcctctcttagcatgcttttaaatagaatacacttggcctggcccggtggctcacacctgtaatcccaacactttgggaggctgaggcgggtggatcacctgaggtcaggagttccrgaccagcctggccaacatggtgacaccccatctctactacaactacaataattagccaggtgtggtggcaggtccctgtaatcccagctactcaggaggctgagtcaggagaatcgcttgaaccggcggggagtggggrtggttcagaggttgcagtgagccgagatcgcgccactgcactccagcctgggcaacagagggagattctgtctctaaataaataaatagaatatactctttcaccaccatgttccaaatcatcagaaccatcccccttctcccacattttgacgatacatacctgtgaggctttttaagactgccctgtgatcaatcttcaaaacwgcttgtgcattgctgcctgccttctgtgttattcagaaaaacaatgccctgtctacccagtacattggggattgggccctgccctgagccctcccttactcagacgtcagccttgctatctccttctccaagccttcttctcaaaattcccaaygtctagattatattttgggggcagggtgttttttgcaacccggaaagatgggcacattgccaaagatggagaggctgggtgatgtgtgcaagcatatgtactccaacatccctggactaaactacttatgttattgtgaacttagacacatgacataacttccatagacctgaatttccctgtttgttttgtgtcaaaaatgacagaccctacctcatggggctgttttcagaactgaatgagataatatatgaaaatgtctactcagagccaggcacatagaaagtgtgcaataaatattactattttcaattcagtataatagcctggcacagacctgctggcaagtagatgaattcagagttactacaattcagagagacacaatagctttaatctgctgtaaaaacatccagtattcacatatrcttcccagtctatggattattgtgcgtgtcctgcacagcgaggcattcagcaagcatttactagttattcctggtgcactgccgcttctatgaggaatgagaatccctgtattccagaaatgcatggtttagtactagtaacaataacgatatctaactatgctaaacagcattactatatgccaascactattctaagcccttatgaatcaacttctttaatccatatgctagtgcccatgtggtacgtactatttagtgttgccatcctcaattgagagatgaagcaactgaggtacagagaggttaaggaactttgtaaaatcccacaggtaggatatgacagatccaggtcaggttttgaacctaggctgtaggtctagcatcttcatatttaaccactatgcattactgactttctgtagtaggggaagcaaaggtaaataaataacagtaccatcacaagtgttttgttatatttaagtaatccaaaggtaagaacccttggaggggggtagatctaaccaaggtaggaatagtagagactaaggaagtgttcaggtaggtagaaggggggaaagtcgaaatttccctgagaaaatggcctaaaaatcattttgttctaaaatcatgaggtgatactaagtgaaaaatggaggaaagggcattctgggaataacatatcacaatcaaaattgtgcatagtcaccagttatctaagtgatattaggcactattctttttattatttctttcccttcttcatttgccatttaaatactcttgaccaggttggccactctgtgagcaagcatgttctttctagtactaatgagagacaaccattctggaactgaaaacctatcattctcaagctatgagccagaaatctaaatttcatgctaaaattcctgctgttaaacttccatattatccttccttatccagaggcccatccttagatatactagagtttgcagatcctttctttcttttattctttgattttttttttcttyagaaagtctctttttcttccctgtggcatgagcctcaatcccaaaggtatcatatggctttggtggcacagtcctgtgactgcttgataaaattctgtaagactggttaagagtttgcatttgctattattagtgagattaaatattttctaaaatgtttaaaacataaaaaaaaagaaaacaatagaactgagttcaaagtcccattctgcttcttattacctctatgagcttaggcaaattactgaacctttctgaatttcagttttttgaacttaaaaatgggttaatagcactcactttataaggttgttacaagtattatttcataccgcacatgaaatttgcaccctcattttagtttcctttcttctttctcttcttcccatgtccatcccctggcactggctttattcctttctagcttctcacaatcatgatttactgctttccttcttttctatagaatgtttttttcattctatccatgaaattatgtgcaagtagattgacctgcctttaacacccaattaattgaagaggtgcttatttctgtcaggaattcaaacacagcccccttgctgcagagcactggaatagttccctttgcttctcagcctcttcatccaggttcacttttaagtggaattgcagccatttttgtttactcttatttactctctttgctgtcccccaattcaaattcctaattcagagtctacttgatattctattactcatgataatttttggccaagtgttggttcaagacaactaattttgcttggcctgatcttagatggtaattattttttcagaatgatgataatggatagtaatcatgatctatttaccaaaatgaatcttactcaaaggttttgctgtgattatcaacactagagaaaacctggtgttgggattaacatgaccacttcagttcacaaagacaaatcagaattgtgtggaggaatcatgccggggcaggagagtgcaagtaaccatcttcattgatttttagcatattctgacagatggctgcagcttggtatgaggctaactgcccttgatggctttaggccaatgtgacaattaaatggagtctacagggttatttttacaaaagaagagccagggccattggcaaaggagattttggcaaggaatggaaacagaaatgaaacttatatgaccaatgtgtattactatacttccagagctagtttctatcttggggaaaaaagaatcatttggaggaaatactcattaatggtgattgcagtaatttatttatggaaaaataccctttaagtattaaccaataaatgtaagttctccagcagcagtaatatgtctttattatacagcactgctaaaatatacctaacatttataagtagtttttttctagaacatttgcaatggaaaaatagagactaaattttttccttcaataatgactggagaaaaaaaatctcaaaatgtacatatgcagtgcttagatccaacagtatctcaggctttaatcctttaacagcacggaggttagcaaaaatctatcttcagccacagatttaaagattctttttaagacaggaaaagacgctgtagaactaatctatgacctataaatcctgtttaaccaagctcaaccaagcttttcagcctacaccacatgatgggtgtggaatatgttaaatttacatcaaagagaatgctgtagtcttaaaatatgttttacatgttgagagtaaaatataagtctattgtgcttaggcagtgaagaacaatactttggagatcagtgtgatacagtctctagttactttggtggcagcattatttttaaacatgcttttcaactgactattctcagtttcatttcaaaataaaaccataggcaaacataatttgtttcattttatagggaaagaatgcttcaccataggtgagatgaaatctgattttaatatggagaagatttacttggcaatgcaaatgtgaatctaaaaatgttttagggaatttttaaaaatgagttgattgatgtaatatacgagtatagcaaacaaaaattaaattttagtgaaatctctgtacccatcattttgccctccctcaccatatacttatacacttccctataccgactatatttaaaacagagatgtatggttttgaacaagagagaacacaagttcttaacaacttcattcactgcaaagttacttatccagtgaatcataacaaatatttccattaccatgtcaagttaatagatacttgtctattttactaagagcatgaaatatatttaaagcagcagaaaataaatttcctgtcaattattcttattttctatcagggtgttaatgtgtatctgcacgtgtgtgtgtgtatgtgtgtatcaaaaagatgtgctactaagcatctccctttagaagaatccagctggttctgtattaactccataacacaaaaatgtttgtagctttcaaagcaaaagataagatctggttaagtcttgaggtctttgaaatatgtttgcaagaattgtgaaagtgtggtactgagtattttatttaaagaacaagaaagctcaaaaagaattgtcccctttggtgaacagataagcaaataaacagtaacatctgcttctctattttgtttaaaaaattggtgtgatatctgagggtattagaaagtatataatgcaaatactttaaatgaaaaacagttcattataaataatataatgaatttattttagtttcatcaaattttaacaaatacttattaagtgcctaccttaaaccaaacactcttctagttgctggggctacaacagagaacaaaacaaataaaaaccttgcctttaatgagcttacaatctagtagggggagagagcctttcccctaaaacattgatcttttttgaggttaataatattgcaagacttggggtctggctagatgggatatgggaaaacggggagaggagtcaaagatacctcttaggagtcttcctagtctgccatcacctctgttttagactgggtaatttataaacaacataaattgattgctgtcatttctagaggctgggaagtccaagatcaaggtgtcagcagattttggtgtctggtaagcacctgttcttcatatacagcacgttattgctttgtcctcatatgtcagaaggggccaacaggctcctgaagcctcttttataaggacactaattccactcatgaagacagaaccctcatggcctaatcaccctgccaaaagccctactttttaacatcaacatattggggattcgatttcaacatatgatttcttttttgagacaggatcttgccctgccacccgggctggagtgcagtggcacaatcatgacccactgcatcctcaacctcccgggctcaagggatcctcccacctcagcctgtggagtagctgggaccacaggtgcatgccaccatgctcagctaatgtttgtattttctgtagatatggggttttgccatgtttctcaggctagtctggaactcctgaactcaagcaatctgcttgtcttggcctcccaaagtgctgggattacaggcgtgagccaccacacatggccaacatatgaattttgaagggacacaaacattcagactatagcaacctccccacttcaactttcatgtagaaaccccttatctatgatctcataacactctgccaatatgtttatcacaacgccttatttcattgtatatttgccctcaaaaacttctatttacttgtctttgttcctcactgaaacttaagtaaagtgctatgccttttcttatgttgatccctcagtgcttggctcatatcgttcaacaaaatgcatggacagagtaagtgagcagagaactacagatagagtagatttctgaaatcaggaacagaagttaatggaagcagacagtgcatattattttggaaatattggaacacctacgtgagccatctagtttgaaatgttcagtatcaaaaaaagttgaaaatatggatctgagtccaaggaaaggaataaatagagaaaaaatattctcctactacttgcttactatgtgccaagtatttttccaagtaactgtcacatttattttaacttagtgttattaaaactaaggcttaaaaatgttgaacaacatgccacagggtcatcagttacgtgtagtggagtcagttaaaacccagcttcggccgggcatggttgctcatgcctataatcccagcactttgggaggctgaggcgggcggatcacaaggtcaagagatcaagaccatcctggccaatatggtgaaaccccgtctctactaaaaatacaaaaattagctaggcgtggtggcacacgcctgtattcccagctactccggaggctgaggctggagaatcgctggaacccgggaggcggaagttgcagtgagctgagatcatgctgctgcactccagcctaatgacagagtgagactccgtcaaaaaaaaaaaaaaaaaacaaaaaaaaaaacccaccagatatgtctgcttccagagctcatgatggacgtagataattaagactttcataggtaaatgtaataatagtaagtattgaaaaacctagatggagttttatgcaagactaaaagaaagccaaaaaccaaaccatggcaacacttatgtattaggagttcatagaggagaaaggccagcgtaggtgaytgaaaagtaatcacggaagagaacaaacagaaggaaatttccaggaggtggtgatcatgattttcaaatatcacagaggaatcaaataaactatggatgagaagagaccattgactctatcaattataaattttaagcagccaatttctgtacagtagtgagattgaagccacataccacgttggatttgaagaattggtaagagctaagaaaatggaaacaaaaggtaaagtagggttttgaaatggggcagtagattgagagcagactgaatcagggcaaaactttcatgtgaattggaaggcaaaatacaagggaaactacattagtgaggaggtatacactagacatcaggatagtgctgtgagtgacaagaagaaacagacccagtcagagatcaagttgccttaatgataaagtatatagaaatatgcagtgataatcacataattcagaagaaaacaacatgatcccatacaacagtacaggcttcccaggttgccaagtcccaacaaggacatagagcttcggaatttttttttttttttttttttttttgagacggagtctctctctgtcgcccaggctggagtgcagtggcatgatctcggctcactgcaagctccgcctcccgggttcaagccattctcctacctcagcctcccaagtagctgggactacaggcacctgccaccacacctggctaattttttgtatttttagtagggacagggtttcaccatgttagccaggatggtctcgatctcctgacctcgtgatccgcccgcttcggccttccaaagtgctgggattacaggcgtgagccaccacgcctggccgagctggggatttattaatcctcacctttgggaggaggattaaaataaaataaaaagtttgcctttggtattctcacagtagaggtgatattacatcttcccactcttatctaaagttggttctcaaatatacatcatatttccgagggcaagcacctatcactggccaagacacaattagaactcgaactttttatctctatctggcatacaaaaaacactaggcggtcccttgttactgaagaagatacttaatagtgacatatgtatgcacagagcttgcattgacagcatagatgctaacatgactatttccaattcaaactatcaaaatatcaagtacaacatgatattagcttcataagtaaattgaatttcttctggcataaaatagtcacaatctgatatttttctcacctttcaactaaaatcattgtttttatctatgacagtctaatctttcaaattttgtcatttaccatagtgaatagtatcattaacttaggtaattttatggtaatgtgggtagttgtgttttagtagatacacttgtagctaaatactttttcttgtctgtcaaaatcaaaaggcttagctatttgataatgtactgtatatgtatgcatgtatgtttgtgtgcgtgcatataggcatgtgtacatatataagtatgcacgcataatttgctattgtccaaagtattttcactagttatctcatttcaaactgtaaaccctggaaagtagacataatagaaactatgcccaatttaatggtaaaataactgagtcttgggaaattttaataacacattcatgtggagcatgtgttattaaattattaaaatttcttggagcaagatttggtgttggaatgtaagtcctgtgcaaacaatccaatgctctttgcactataacaatttgtctctggtatataaagaactccacgccatctctttttgtctttcagtgaatatttatggttcggttaagtttccctgcctggagatataatctagtttttattctatttatattaaaatcttaaatgcccaggaaactggggcattctggttaattggatttggtggttagcttaaggttaaatagaactttttacaaattgccatccttgttgaaaatcattcttaaatatgaatctactttccatgttaatccaaatgatcataatttaatcttttataattgaaaatcttatagtacatcagggttgccatttaagcttgagttgttattgtaaagtgttctaggtataaagggatgttgtagagtggacaaaatgtctagtggtcccaggatatccgttgcaaatttttaatggccccgtgtgagtttttgaaaaagcactagatttacagttagaaatcttgagtccaagtccaatttcactattaaatagctatgtaaccttgatatccctttcttcttctcaacctcattttcctcaatagtcagatgaggaaatgaagctaaacgatattcgaggtcctttctggctttacaatctctgtcattctgtgacttgcttcttgtctcttgctcctccactgaaagaatcctgcttaattgagctttccagttagttggattctaattaattgcaagtttactaattccaggtgaggtccccaaacaagtgagatagatttaagttgagcagtcatgattctttctgaatttcctataggcaagaagaactgaagaagacaccacacttccctttctgtcaaagggtagtgatgatggcaggcaactatagttaaggaggcaacattaggccagtgcaagactagtctatgaagtcatttttcctgttacgcaataggtgcttgatacaattttgttaaataaatgcatttttaaaacaaaaccctttgtgaacccaaaatatctgagacacatctcagtcaatttaggaagtttattttgccaaggtcaaggatgcgctggtgacacagccttaggagaacctgacaacatgtgcccaaggtggttggggtgcagcttgcttttacacattttagggagacttaatacatcaatcaatacatgtatgatttacatcattggtttgatccggaggggtgggacaactcaaggtggggagcttccaggtcataggtagatttaaacattttctgtctggcaattagttgaaagaattattagtagaaaacaatgtctgggttacaataaggggttgtggagacttaggttttatcatgcagatgatgcctgctttagagaaaatagactgtatatgtttcttatcagacttaaggtctatgttgatgttaacactggagggatataacgaggcatgttaaactccatcttccatcatggcttgaattagattttcaggttaactctgaaatgcccttggccaagaggaggggtccattcggatgatttggggccttcgaattttatttttggtttgcacctttatagtgacaagattcaagatgcaacaccttgtatagaagtctactctgccttgggtcatactgtgtgtgaggctgcagtacagtttcaatatcttccttcatgttgtcattctcagtctatgacataaatacagcttcatattatgtttcctattgaaagataaaaatataatctggtttaggtttaagttacaaccagccatttctatactgcaccccgtgaatccgtgatgatatttgttttctaaggataggcaatgatgcatagaaaaaataagtccaggtttaatattatatttgccaagtacaaaagcatatttagaggtcagcagagtgcatgaaatccctatattcttgacgttgaccttaccttgtttatctctctgtgctgtccctgaataattaaagtgaaccaatgtgtttcttctttgcactctcaaatccacacagcagggaactagggagagaacattttagtggaaggcaggcctgctttccacaaattctcctgtgctcaagtggaattgtagtcactaagctttagagcatagcacaaagctgaatttgactgtttcttaagtgacctaacctaagaggagttaatgttgtttcaattgctatgattattatatattctgcatattttaatcagttcaggttttggatttttgcctcatgacaggttcatgaggggtacagtttaaaaagcaatttttttttattgttacaaagatttccttgtttggtcagtaagggtaaatgtttgaggcaattatcggtgagttgtatatgctctctggccctagggttcagggtatttgtttggataatagaccaatcccaagtgcaaatagagcatcaaggaggaacagctgtgagcttggggaggaagataagatcaggagtgcctggcatgaaaatcttcctctgggagtctttacagagtgacagattttctcctgtagagatgtagaatacctcaaaacttcacgttccaattggatgaagagtttagacaaatggttctcaacttcaccactattgacattttgggctgaataatttcttgttacatatgtcttaaggaggtagactgtcaggatgtttagcagcgtatctgacctctacccactagatgccagtagtacccctccccaagttgtgataaccaaaaatgtctactgacattgccaaatattccccatggaccagttggtcccctgttgagaaacactttttttgtagccagtttgagaaacattcttttccatcgatgtttcccaacttagtcctggtactggtaagacaaaatctattgttgctggatcactttttactcaaaccactcttcaaactcttaatttcttttttcccttcccatctttccctcctcctattcctttcttccaaggcctttgttagaggtttagacaattctccagtttatagtttgggatagaaaccattaaactacatccatttaaatctgagcctctctgcattgctttacttttaatrcaatggcaactcgtcatataatttttatccccaattaacttgtcatatcctgcatttctatgtgagagtcttaagcaagagaaatacatttttgacacattgaatatataccctgtttgtactatacttaattgacttgttttctggtaatgcataaagatggaaaaatacagtgtgtcattgctgactatttatttagatcaaaactaaacaacctatagcaaaggagaccagagtgacccctgaagcaactaacgaatgatcttctaaccttgcaaagacagccatatctatctgtaagatttcttttcttactctattcctttctcttctcttatactcttcattctccctatgttcactttttgtcctctatttcctgccttactttagacctgcactatttgggggcatgtcttagctcttctgatattgttctttgcaaaaagcttacaaggacacagaaacctgaaagaaaaatggcccatttggagatgcacataacataggatggctagaagtatagagggcattgtagacaatagcagtagtgaggctgacaggcctgcagaggccaggtcatgacggaccttataaaagtagtataccttcatttcaaaaatagaaagtacatggataatcaccaggaaaaataactacaatttccatcatccaaagatacttactattaagatttccttttgttttcttctagatcagatgtctgtggaatggggatttggggttgtattttgcttttggttttgtgtgggaggggacagcacgtaattgtggttgtactatatgcatgaactctgtttcttgctcaatatggaaaattatctagttactgggagcagaaaacctgtacaactaaattaaactttttaaaggttttttttaagatgcagagtaatctcacagtgaaagaaaagcacagtaagtacagccaggcctaatgaaagatgaaactctctccatcattctatttctttctgggaccaggtgatgtctcatcttttcttctctctagagatatgctccattctcaagcttcactctagatgggatttctttgtctgttcccctataatgttgtaactccagctctggctcaacrtgaccttgcatcttggcttccccagttgtgtgtctatgtctagatttctgagtgagaaagagagaatacrattgcctctaagtttggttatccaattctggactatggctgcaggcagtggggagtgggcatagggggatcatggatgtcctgtctaggtctctgtgctgagagacaatgatctacatatctaatatgcttatgtggttaccaattctttggattttctgactgcataatattccatggaatgaatgtgttaccagtagaagagatctgagttaccctgaccagcagcatatccatatgggtccgtagcaacttcagtccctgcctcctcagaagaaagaatttaactgaggggcataaagcagaaaaagagactgaggcaagtttcagagcaggagtggaagtttattttaaaagtcttcagracggaaagaaaggaaaatttgcttggaggagactcaagggggcacctgaaggtccaagggagaaaagagagcaaaaaaaaaggtgcctttaactttgatcctagggctttataggctcgtctctcccatgattctacccttagggtgggcttcctgcatactcagtgcgttccttaccatttggaattgagcacgcacagtgtgtttagggagttatacacatgcccatctgaggctttctttccttttccagtggcgtgtacccggaagatcatacttcgctatttttgtctcttgatgtgcatgtccaggaagttgcttctccttggggcctacattcaattaacattttgatgttaacaggtgtggactatcaggaaatggcaccggctaccaatttgtcactgtttgaaaggcaatgcaataattgctgaaccatcaatggacatttctagtgggtgatagggagagccctctcctgccccactcatgcctatttacctgtaacaattgtactaggctccttccatatttgggtctgcttttttctagccagtggatgaggaaggagattggggatcatgggtggaaagttttaggggtcaagccttgaagtgtcagacatcacttttgctcacactttacatttcattagccagaactcagtcgcaggaccacacctaacaaaaatggtggttgggaaattgtactccatttgtgtgcccaggaagagaggagaacatgggtgttggtgagaagcagtctctgcttctggctgttttattttgaggctatttcaaaggacattcatgtgttttgccagcttgttctttagagaagaaaaatgttatgctggatagattaagggactgatttgagtggcatttcttatgttaatttatgacattataaaatattcttacctttaatgtacatgtatgaataagtctttcaaagaaataaaagctgataaaagccaaatgttgatcaagatccttcaaaagttgcattagcataatgatctagattttcaacctgaagtgtttagtgagaaactcttaggctctgtccttcttgtacttctttgtaattaatttgaaacttttttttatataagatgtccttatcgaggtacattataactcaataaaaataaatgatacagaaaagtataccatgtcaactggctcataarataaaccaggaaaagacatgtctgtggaaaatgaagttgaacgggagtctgaggcaggagaaacgcttgaacccgggaggtggaggttgcagtgagccgagatcacgcctttgcaccgagcctgggcaacaagagtgaaaactgtgtctcaaaaagaaagaaagaagaaagaaaagaaaagaaaaggaaaagaaaagaaaaggaaaaaaaaagaaaagagaagatgaaaaaagaggtaataaaagtgtataatactctgcccactaccccctcctgtataaagaaaaaaataaccataataatccaagtaaccactgaagatcaattttataaaatcatcagtttctctgttgagtaaaattgggaactgactttcagcaaagggaaatgtaattgagtttctttacaaaatgaagagttttttttttttttaagtcctaggaaatttagagtctgatttacttttaaatgtatagtcacaagtatttcctgcgtcacctgtttgttcctattttgattagtctctgttagggaatgaactactgaaaactatagggtggcattccattattcctccatagggaaaatgtataaaattgtaagaggattgataagctcacctaccaatagctttccacattattttgtagtttgaaaggattatagcttccacaccattatctcaaaacctaaattagcattaaatataaagagaatgaaaatatgataagcttacttatctaagtaaataatttttatacgttggcctgagccttttaatacaggaacatttgcattaatagaaaatattaatttggtatttactcttcaactgatatagagttttttaatatcaaattttaaattaaagttgggttaacagaacatggatctaacttggggaaggagaatgaaagggtgacttgaaagggcattattatgaagagaagcattaattatttattttaattagttttgaggtctactaaagcaacttgatcaaacattgtaaaatatgtagtatattctttctataccatttatgtatctatgcccttactcctactttcaatttatctctaaacatcctgttaaagaatgttgaatttatatttagttatatttaatttatatttatgtttatattaattgacatgggaaagtccagtacagtactgcatgaaacttttctgatgtcccccacattctaagcagggagccatgacaattacctcactttcacaatgatgataagtatcctcctgatatcatttgatcatttctgtaattttaagagttgaaaacaaattccataaaaacatattcagtgaaatatgaagtttatatgtattcatctttgagaagagaaatatcagatgaccaggtgaattaagaagatcatactacctcaatgattaatattatgagtgatattgtaggcatggattttaaaatattattgagtgcctgctgtttattatgcaccattttaagcactgaagatacagtaataaataagataggcatttgtactttcatgtagcttacattctagcaatcaacaaaactgaagttgattmccaactctgccttttaccaattgtgtaacctgatgaaatgtatctaatcctattatctgacccacagcctcctcacctatgaaatgcagataatatcatctaccttataggattatggtgaggattcagtgagaaaaagcacatgaagtactttagcagagtacctggcacataatagatgttcagtaagtggacaatgatgttgccattatcattaacagcaattatctttaaattattagtataattattaatagtaattctttcatgactaaaatatctcacaagaagacatgaaatgtgaatcaactatttctttgatttatttattttagattatgtgaaaatgaaatgagcgcatatagttgyttttacattcaacaagccaagaaatatttgcccgcaaatagaacacttaccttagactacccaacctttgttccttctgcatagtgattcaagacccatttagaagaaacaaaggcatcatacaaatcaatatgtattcatcgaatacctctgaagtaagagacaatgtacctagaaattaagactgtttcctgtcctcaaggaatatgcaatccagagatagttgaccagatagggcagatattgcttctgaataaaagaggagaagggatgataaccactgaaaggtttaaaaaggatctcccggctgggcatggtggctcacgcctgtaatcccagcactttgggaggccgaagcaggcagatcacctgmgggtgggagttcgagaacagcctgaccaacatggagaaaccccatctccaccaaaaatacaaaattagccgggcatggtgccacatgcctgtaatcccagctactggggaggctgaggcaggagaattgcttgaacccaggaggcggaggttgcagtgagccgagatcacgccattacactccagcctgggcaacaagagcaaaactccatctcaaaaaaaaaaaaaattttttttgcaaatcacgatagtaacgatctagactacagagtatttctatttgagaatatattatagaactaagacttaagcctaggaaaattaaagcttagataggtatccagaaattcatttaaaagctcttaaaattatgaacgatgtggacggagcatggaatttttatcaacacttggcgtccgaggtttagaagcaatatgtggacagaggtggcttagtatttggaagaaagaatcacagggcaaataaaatgaaattctcctttatatagttgttagtagagatgttgaggttgatatctttgccagtaatgactcttttccacaaaacaactctaagtattcttgttagagaagaaaatggggctgacccagcatggcattttcttgtgttttttggaggcatgagaataaatacctatgaatagccatttaagcaaaagtgatatacaaatgccaaaaagcatatgaaaagatgttcaagggcgggtgcrgtgtctcacgcctgtcatcccaacactttgggaggccgaggtgggcagatcacttgaggtcaggagttcaagaccaccctggccaacatggtgaaaccccgtctctactaaaaatacaaaaattagctgggcatggtggcaagcgcctgtagtcccagctactcaggagtctgaagcaggagaatcacctgaacstgggaggcagaggttgcagtgaaccgagattgtgcyactgcactccagcctgggtgacagaacaaaactctgtctccaaaaaaacaaaaaagaaaaagaaaagaaaagaaaagatgttcaaaatccctattcatcagagacatgcaaatcaaaaccacaatgagatatcacctcacacccatgagaatcattactattaaaaaaaaagaagaaggaaaattacaagtattggtgaggatgtggagaaattggaacccttgtacatggttggtggtgttgtaaagtagaaaccgctatggaaaacggtatggaagttcctccgaaaagtaaaaatagaactactgtatgatccagcaatcctacttctaggtatttatccaaaataaatgaaagcagatctcaaagagatatttgcacaccttctatgtttacagaagcactattcacaatagccaacaggtggaagcaacctaagtgtccatcagtggatgaatagataaacaaaatatggtacatacatacaaaagaatattatttggcctaaaaatgagggaaatcctgtcaaatgctacaacatggatgaacttggaggacgttatgttaagtgaaataaatcacaaaaacacaaatactgtatgattccccttatatgaagtatgtaaagtagtcaaaatcatagaaacaaatagaatggtggttgcttggaagaggatggaaagaacaattgtttaatggggatatagtgtttcagatttgcaaggtgtaaaagttccagagatctgttctataaccatgtcaataatacttaacattactgaactatacactaaaaaaatttaacatgcgaaattttatgccatatgctttttatcacaataaaaattcattttataatttgtttttttaaaaaaatacctaaattctactatgctatccaaatatggtttggtcctattaacttctagtcttcttgtttttaaaaacccaacctcagcttctactggaagcaagttgaattccttcttctgggtacaaaaatgagtcagatgcttatagctaagggaatataggtatagatatgcgtctcataagaatgtttacaagatgtaaaagaaaaaaatcattggttatttatgcatctgttgttagaaagtcatagatttctgtctgtttcctatagaattttaagtgccacattaaatcacattatttagtgctagcagataccctcagaattatgtagtatgaggggtttaaaaatagagagcacattttccccttttttatagatgattttaaaatccttacaggggcatttattatattcccatttaccaccactgggtctcatcattcttgaagattttttttttaatttctttatatgcccatttccttttggtaataycttgcctttcctttttaaatttgaacttgaatattaaaacagatgcaaagaagagtactacttacacataaactcttgaactgcatttttatcatttgctctgtggaaaaaaacccaattgtatgaaattgatagcaacattttagtatatcctcaggtccccagggaaaagcaatgtgcttagacagatgatctgattgtatgagcacatagctaacatctagcactgagcatttgtctttctgctcctgcttctttcagggactatgaaaacacatttaggcactagtttgactttccaacaatggactgcaaagcctatgacaaaacacgtcatttgcattgctctttttcatggttcacaacaaagtacagatcactttcagcrtagaatcttaatctgagtttgttaataagaaaacaagaaccttagtacatgaactcattttattatctaccctcattgagaaccgtgatttggattccactcaaataaaaattagtttaaatgttgttctgctgcaactgttgaatttattcattatgctgtaatattttacttatgaaactgcatttggaaatcctttggtgtacatcaggatgaaattacagggctcagggatattgattattcttgtaattgccgtcataatagccaacaattctctgtcttttgttttccttccttccacctcttaatattataccaaaccaaatcaatatccaacatattggaacacttacattgtctcaaaaatccaattattctccttcataaatgtgcaaaagattgaagattttatctccaaacattaagtaaaggaacctcattctgctgggtttctcctttgtcccataggaccatatcagagtgttgctgcatcgaatccataatatgtgacattttgtcacctccaaagtaaccacagggcaggagtggggaggtagggaggctacatccctacgctgcctgtatagtgctacacttcttgctcactagtaaatgaaatggtcaaaggggaaaaaaacagtctgggagagttaagcagacattaaaaaagaaattcatctttttatggtgcggaggaggttatttatttaaaagccttaaagtaacagcacaatcaaatgaaaagaggacaactaagagtcacttattcattaaaatatacttaatcttattattatttttatattgtttcttcattctggggataaattaggtgcctttagaagcagtagtaactcttttaggttttcatcaactaaagggtagtttctttgtaatgcttacccattcatccaaaatagttaagacagtctttaaaatttactagaagaacatttgacatacagaagaatagatgtgtattatgtagtactgtttgaacagatagtatttgttgggcccaggtcagttaacccagatgattagaacctgatgctaatctggtgaagactgtggttgtcaagtagcatggggtaatgtaaatacactattttggaagccccagatttcagtttcatccatgcctattagctagctatgttatttttaagtaagaaagtttcattctcttggcctcagtttccctaacgtcaaaatgagagggatgggctactagatgatttctgcgggtcccttccaactctgtgattctgtagccatcattctcacattcttgttattagtcagaaaaggaatgtaatagtgtggctcagttaaacatcatcctcatgccaaattcaacacaaagcatacttattctatgcctcaacaggcctgtattcccatcacaaacaatacactatgttatagtatattgtttaagagcagtggctctgcagccagactgcctgggtttgaaactcagtttaatcaattactagctgtggggccaaggaaaagtgacttaacctctctgtgcttagatcgtctcatctgtaaaatagagatatcgactgtaataaagttgttatgaagattaaataatataatactttgtgaagtatttagagcaatgcctgtcaaaaataatcactcaaatgttatctcttactaacattattataataattactattatcaccgctctactcctactaaacctctttgggtctcagttcagtcatctagaagattaggataatagtatcaacttcacagacatataaggatcaaaattggagacaaagtgcctaacttggagcctggcccatctaggcgctcaataaatcacgttaacttaaatggaaccaactattcctgtggttggtgttatcctgtaaatgttttccactccctaatactcatgaatctttttttttatcttagttacaaaatcaatacaagctcaaggcagaaaagttcagaaaatacccctaccatacaaaggtaacataaattattattttccttgaacatatgtactttttttcctttaaaaattgaataacgttgcccatactcttttgaagcctgcctttttttgcttggtaatatctgtaaacacttttcccagtgaatagacagtcatttgccacgcaatttgtaatgattgtgtagtactacattatgtgtttataaaataatttacttaatgaaatagcaattactgggcatttagatgtttattttttgctattataaataacattgcaatgaatggcttcttatatggattgtcatacacatcatttcctgaggaaaaattcctatagccataattattgcatcaaagaataggcatttttaaagtcatttgatacataatgccaaattgccctccagaaagacctgtgaatctgtactcccctcagcaacccagtcctttaaaaaatttttaacctcatgatactgaagcaaaattctctgttgtgggtattttccattaacattcatatagggtttttttaatccctttaaatacatatgcttttgttctttaaatatggaagctagaagtcagtcttaaaataatgttagtaatttatgcatttgtgcacacattacatgtacaaggtgatgttggctttatgcttagtgaaattttttgttgtacattaaaatgtagcactcgaatgtgttttgttattttactgccccaggtaatacggtagactgcttaagattaaagactttggtcaaggtgatgaatatgctaattatcctgatctgctcattctacatgtatatgtattgaaacaacactatgtgatgctggtaggctgggggaagtccccaaatgctggcgggatcttggccacagctggtgtccaggctcttgacactgttgcaagaatgaactcaaagacaagttggaaaatagtggaagtatggacatttattgcaaagggaaatgtacacactcaagaaaagggagtataagtgtactcaagagagaatcacccacaagggggtttggagctgctaccttttggggtttgtttattcaaggggtagaatattcatgaaaattcctgtaaaaaggtggagatttatcggaactgtggtgccacccatttttacaccaaacatgggtatttctggaactgtcatggtgctggtgggttgcgtgatttagtatgttaatgaggatataatgaagtccgaggtgaaacctaggtcaaatcccgcaccacgttgggtccagtcagtcttagccagcttggttcaaatcctattattcagggtcttaatagcccatagcctctaatcatgtgaaactgctgcctggaatttttttattctcctgcaaccacactatattattcctgtctcatatgtaccccataaatatgcacaattgttatatatgtcaattaaagataaaaaagaaaagaaaaaagtttataaaaaatgattggccaggcacagtggctcatgcctgtaatcctagcactttaggaggctgaggtaggcggattgcctgagctcaggagttcaagaccagcctgggcaacatggtgaaaccccgtctctactaaaatacaaaaaattagccaggcagggyggcagcctgtggtctcagctacttgcgaggctgaggcaggagaattgcttgaacccaggaggtggaagttacagtgagctggagttacaggctggagtgcagtgagatctggaagttacaggctggagtgcagtgaatgagatcgtgccactgyactacagcctgggtgacagcgagactccgtctcaaaaaaaaaaaaaaaaaaaaagattaaggactttggaaccccaaatgacctagattctgattctggctctgtccttcacttgctaggtgagtttgggcaagttgtttaacctcttttggtctccatttctataaatacacaatgagaataatatagactatttcataagagtaaagagcaaaagagatactaatgagtgttcagcacaacacttggcacttagcaagtataaaagtacttttatttatttgttgtataaaagaartatatgcaattttatttatttatttatttgtttttggcaactccttccatgtgaatacattactactgtttacaaaatgcccatattacaatagtcatgaacactcaacaatcattctttagtaattcaaacatgacagtagcatgactccatttgcatgaagttctacaagaggcaaaacaaatgtatggtggcaaaaacatgcagaatagtggttttctctgggaatagaaatagggatttacctagaaaagacagaagagaacttcttgtcttgatgggaatgttatacatcttgataggggtttgggttgcataggtgacagcatttgtcaaatctacagcaaatgtgcacataaaactgcacattttattatgcataaattttacattaaaatttgtaaaactatcaaactagctaataatatgtgagttaaaatatatgaagggaagtgtactgatgtatgcaacatacttcaaaatgcttaaaaactaaaaactggccgggcacagcggctcacgcctgtaatcccagcactttgggaggctaggcgggcggaccactaggtcaagagatggataccatcctggccgacatggtgaaaccccatctctactaaaaatacaaaaagtagctgggcgtggtggtgcgaactgtagtcccagctactcaggaggctgaggtagaagaattgcttgaacccgggagatggaggttgcagtgagccgagatcatgccattgcactccatcctggtgacagagcgagattccatctcagaacaaaaccaaacaaacaaacaaacaaacagaaacagaaacaaaacaaaacaaaaaactaaaaactgacagatggagagaagaatggagaaatgaataagtatgtgacaaagtgagttcagtcaaatgctaactgtggaatctagttagtgagtatgtgattgtttattataaaattctttcaacttggctgtatatttgataatttttataataaaatgttgaatgaaaatatggctgtgaagctagtctctaaagtttggtagtgaggataatctcaaacactggtgtctaggccattctaatgatcaaaatgcctaatgatgcatctctgtttttgaatcaactcttgatgatcatatttaatgaaagggaagggtgtagtgtgtaacaccaaatgtggaatgttagcactcactagccagcaaatcggggaacacaaggcctgtttcttaaaggtctagatgaaaaaagaaaaaaaaagacaaagaaaagagagagaacaacaagggcaatttagaattatctcttaggtatatgaaaatgttgctgagctccatccagttctcttgagcttggctatagcatgattgtttgaaattaatggagtttgtgtttttgtagcaactggctttgstttttatagcccaaacttgtgtttccttttcacaggcatttcctgttcaaacatggatctggttcctctgcgatcttcagtgcagccagtcagaactaccctctgacatccaataccgtgtactcgccccctcccaggcctcttcctcgaagcaccttttcccgacctgcctttacctttaacaaaccttacaggtgctgcaactggaagtgcacagcattgagcgccactgcaatcacagtgactttggccttrttactagcctatgtgattggtaagtcctytttgtcatgcctcagttttgttcttaatcaaagtcttgttttgcttgtggtgggaatggggggtttttctctcgattctggcatgtacacatttggacctaggcttagtatgataacaaattgattttcttcttttttttttttcttcctaaccttaaatactgctgaggagagtaaggaatgctctttgagaagaaatatttatactactaacacagtcttattgatcgcaattactgtagttaaccattttcccttcaattaaaaggttgttatggttttcccattagaagtcataagtaccaatctacaatagcttcttaaattacagttaaacaataatactgctacggaattttcaggtagcaatttcattaaagccccagttatttggaagctatcagaaaattcagtacataatttcttcccaagaattcagatttttacactgtgaccaaaaaatgtattcttatttcactaggtaaatgactgcaaaattgtttagttactatgtcttgaaaagtaaagcagagagcagttataaggtgctctttccacttttaggaaaaatgttgttgttcttgagtcaccctgattaaagtcaccctcatttggtagcaaattgtattgatttttctggatgtcattttattgtgactgaatattaatttactttcttgagtggttctgcagtctaaaatgtaaactgacttaagaaatgtgtgtattttgtggcagcactattcctagaaggaatagaatgtcattgtagaaaacaaagtctatccaagtatatccctaataaattattttcaggtttaccccagttacctatttgaagcagatttacccactaagagacaatgaatatgattttgagtggcagataaaaagagacttagactttctttaagtaataaagtacatttggttgattcccatttatctaaaatgagaataatctaaaagttcacataatgagtttgtgtgggcatcatagaccagtggatggtaagtaaataaacggctatattttgtagggaggtcactgatgatgtaaacagtataggatcatagcctgcgctgatgttcatgattctctcttttatattttcatcacacaagctgaatatatttgaacaatgcttctatttaacatggattatattaccctataatatcaaaactgtgtcttttatctcagacatttcaggataacccaacatgtgtgtttatttggtttgtggtgacctgtaatgagaaatactgctgaaggaatggaggcgaaggatgagaaagttctacaactcaaacatgattttcatatatcattgagaacaaggaataatataaaaagtttaaatacattagagtccctttaaaatggtcttgctcaattgagataaacttttatatgggttattttctattaacttttactatatagagagataatgttttagatacaaggcctaacccttggtgtaaacaagctcaagtaatagcaagctctttatttaggtttataccatgtttaatactaattttctatttaaatttattattatggccactcccatatcaaaattttattacatattctgaaacttgtttaattcagttgtatgtttattcatttcatcagcaaaagtggaacatttcagttatttcaaggactgtcttttttaatagaataaacaatggcatatcaatttggcatggaagtaagacagtatagttcaatagttattaacatagatttttcagacctctgccacttattaggtrtgtttccttgggtgagttacttaaccttttcaggtctccatttcctcatctgtaaaacaggcttaaaatcgtacctatagcataggattgttagaagaattaaatgagttaatataagtaaagcacatggagtagtgcctgaaatatagtaagtagcctataaatgttaaatattatcattaatattaccattgttaccatcataattattattcacgattaaaattcactagttcccagaattaacaattttgttcatggctgtatctcagcaccaagaacagtgcctggcacrtgtaagccctttcagtaaaagtttgttggaaaaaaatgaattatgctaagctctttccttgtatgagcacatttaattctcamaacaatccttaaggataggtatcaatacatatgtattttataaatggggaaactgaggctcaacaaagttaagaggtcacatagaggccacttttgagattaagagggtgccttgctaagaaataaggatgctgagcttcaagccagagcagactgactcttgagtgctaggccttgctgctcttctagcactgaagtaaactttataacttgtttacttctcagtctactgaataaatccaccagatattttttcttattaaattacaaattcaattagatataccaagtcatctmttcccatggtgagtgccactaagattggttgattggtaagcaatatttgttgaaatcatttactgggagattttttagatgcagaaatatcaggctaaatgctggcacagtaacttgagtgggttcaatatgagaagatgtttatggcaaacactggaactttgttcctggttctgtcatgaactggacattatgtgactggataagtcagtaaaaatctctcttgatttatcccatctgtgccatattggtgaccacctcagaaggatagagtaaaaattcataaataggcattcaggtgaaagatagcacataagagctgtaatatacaagatgatttttaaatggctttctgtggttgaaataaaaaagtattatatttcaaaatatgaaaccatttcattctcgactattgctgagtctgtaagtcatcatttttttcaatccccatttgcagttgctgtataacccaagtaaaatctttcactgaaactacttgctgcttctgtttcccrtgcaaattcctttctgctatttcattttcctctattatccattatacataacctttagatactaatggctgtatgctgtgctgccctcaatccactaggggaaatcgcatcgatatcaatgggacatcaatagtcattctgtgcattatagctctgtaagtggtcattggaaagcagtggaaatccagcacgtgaaaagccagagctgggttgttcagccaaccagtcctatctccacacctacccactataccttttggatcagggaaaaaartcattcctttgaataagttttgagttcaaaaaagttggtgaagagaggcatggaaaaatactgattatatgaagatagcatggaatggctattgtcatcacttcctcrtaaatctgtaatattttccatctgaatcaaaaagtatgtccttatgcttcatcttttctgatattttggcatcagtgatgtatcagtgccagtcagaagcacatttgcttgaatttacaaataagccatatgaagtagtagtcaggaagacagatgaccatatgcaaggtgtcaagagaaggcgaggttaaggtacttcatcagtggttgtgaagggcacaaacacagcttctctggcaatctttgatgttttgatcaagtttcttcacagtcagcagattgtataagaggctacagaatctcacatacatggaaactcacatgaatacattgtgcctggggtcaagtgcgctgttacattgaatgagctgaagagtaggggtttctggctctcgtacccattatcattagttaatgacatggatgatccttttcctttgccatgagattagtagcaatccataccaccttcaggggatacaggtagtattccaactgtgcagatgaaataatttcagtccataaatcttgtcatgacatactrtatagcctacatgtagaaagctgaccacaatggatattaacaatatagaactagaagagatagagttttgtacccagttctctgatccaaaggttagagatgaaactattcaagagggcaaagggccttcttcatgttgctctctgcagcaaaattcaataacatagattcaagtgctttttttgcctctttgcactggcccaaattgccctattttgggggtttactacagtggagtaaaagagtgctgaaaataatagaatgaaaggagtggtgtgtgttcattttgtccgcctcaaaaagaaagtgcaaatacctcactatacagggaagacataaagtggactgtggcatgtgctgactttggaaaattcaagaatttagattttttttaacagagaggatagaaatggagttttttccccattaaatctaaatataaaaatgctccctcacacagtatttgctraatgtagataaatatgcttaccaaagcccaactctttcacttatagtgctagcaacttcattaatctttctgtgcctacgtttcctcatctataaaatgggaatgttgataatactttcttcaaggattgtctttataattaaatgagttgaagcttgtaaaacactcaggacattgcttagcacagctgaataaagattaatgataattattagtgaaatagaattattatgaagattatttagtttgagctggggtaagggtaatgaggatataattcatcctaacatgaactgcttttgtttcccttctttccaaagtcatctaaaacaatttttcagagcatgaatgtctgtctcacaagaatcctctaatgagtttgttgtttccttctgcctggtctgaaatagctgtcactttgcctttattttactaatatccctcttctatgatgttttgacccttcaaatggttttgtatttttatctgaaggccatatctaggttgaaacacgttttcattaaaatgcattacagcttataacattcaagaaatgactcagcataaaatgctaaaaagcatttcacattatcctatagaccgttatcaatccttttgctgtcatgcttaatacttattacttcttccaattcactcttatagacccaatcatgataatactgacagtttttatattagcattgacttttcctcctattcatgaatctaccaaccttctagcaatgtctctaagcagggatctggaaaatggkggtatgacttcagtctaattacaaatctgctatccatgcatttaccagaacctttctttaaaaaagatttatagactcttcttacatcaccttttggtataatatattccataagttttatccccaccatgttaagtggcactcttgcctgtcataaataaaagtataaatccaatccaaattaaacatactaaaatgacatgatgaatccatgtcaaataaaactaatttctagaatcagagttaggtcctgttgytcagactaagggcatcttggtgaaaggcaaatactgcacttatttttttttcttagaactccagaatgtatttaagacacagagtaagagaaataatttattgggtgaacaagtagtagatactaaatatatgtcttgcatcaagagattattgtctcaaggagaggcaatcactctactaagtacttctcatacagtactttcttagcccggctaggaaaattaaaatgagactctgtgaaatagataaagatctactggtaggcataataaagggggactggacaggaggttagtcattttggagttttgcatgcttaagacattttagaacagtaagaatcaatcatgcaaactcagaccaaaaaaaaaatctctcaagaaatctatgacttcacagtaaataacttgaattctatttcataaagaagaaatttagctcctgtttaactcagtttctctccacccaaattgtatatatagtgcatacatagatatgtgaatattttagagccacattgcataagtcgttaagctatacttactctgaagtgaataagaataaactaaattagagcaatggcttttaaacagatggcaggttaacccattttaaacttcagaaatatgactaaatttttatctagaacagccagagtggggagggccagtatcaccaacaaaatatctgatttatcatagtcaacactaacaggtggcatcttacagggtggaggcttatccatttagggttcagcaatatttgcttcacagaaaggttgaaaagcatagtatgttttaataaatacaaatatattgcaatacctggggaagcaaaaaaggaaagatacagaaaggtggcaggaaatgaagacggtaagcaggagctgattatggaaggcattttaagccatggtaaggaccttgaaatttattcccagaacaaatggagagttgttgtggtttttcattagggcaagacaattatttgctcagacttacatttagaaaaatcaccctaatggcagtattgaagttgggtttggcaggcaggacgatgggtttgtaaaattgaaaacatggagataaattagaagactatattagtaatacagattagtgatagtgagagcataaacttctggtaatggagaaggaggagatggaatggagaaatatttaaatgataaaactcacttgacttagtgactaataagatgtatcaggagagaatgttgttatctggcttagggactgggtagatggtgatgctattagtcaagatagatagcaaatggaaggaagaggcttaagggtgaaaatggacctacaggtagagatacctagaacattattaaatatttggtgctgaaactttggaggtaactaccgttgaggacaccaaaatcgtrggagtaggaaggaaaaaggagtatgaagacttgaactctgggaaatactggtgttcaagaagcccagggaaaaggaatctgctaagcagactatgaagaaacaactagaaagattggaagaaaacattctatggtgaagataaaatagtggttctcaatgtgaggtctagcaaccactaggaattccaagacctgtcaaagcatctataaagtaaaactattttcataataccataaaagtgttatttatctcttttactgtaattctctcaggagtgtacagtgtagtttttcagagaccacatgacatgtgaaatcacaagaatttacatgcaaaagtagctatgagagtccgcctgtttttcgttaagccaaacatgaaagagaacttcaaaaatgtaaaacaatgccactattctcactaattttttgggttttgcaaaatactatataattatttattacaaaatgtgtcatttatgttaaaatgtaatggtatctatatattattcaataaattaataaatacttaaaaattatccattttaatttctaatgtagatataactcatgtcaccaaaagctctttggcatcttcagtaatttttaagggcaataaagaagtactaagactaagtcatttgttcatggaaggctagattcttgtctaggtatgatcccacaaagtagtctttcctgggtagacttacaagcccattaacaaattacaccaaagtacagatagcatttaaataatagcactagtttgtattgcatcctccatacaggcaagacccacgtggaatttcagattacagtgtaacttctcaggaacaccttccttggggctcctactcctctctatgggacagtaatgaacaaattaagaggatccaagatggctcactgtaattttctactcgtcaaagcctcatcaaagcgttgccagtctaattaacatagaccttgtgtactgtgttatagttaacttccagggtaattgcttagtcaagagtttctaaggaagggcctcacaaatgtttgattattgggttggatgtgacaatgggaaattcttaacaggaagaaaagatatatgatctggcactttgaaaagcactcttgcttctatttcatttagctcatattaaaggagctttcctgatcaaatgatcagggaactgtaggctagcatatatacatagaataccagaggaggtggttgagctctcagataaactagctgcagctctggtcaaaaatgaatggaaatgtgatttttgactgcaaccattctgtgctacacagacaaagactttgctctttggtagtcataggtttcattaaatcaaatagcccattattcaacgttcttaattcagttttaccctttgttcacttatgaatctacatttcctttggttttgaactttaattttaattaagcgtagatattaaatatggcaaataacaataatgcagtcttttatatatatcatatccacaaatactttgcagaatyaactaataaaattatggagttaaatgaaaataatattaaataaagagagcagataaaagattttggattttactcataacaagcagctaagccaatactagttgtacaatgcttaagagagagaggagagagagagagagatmccagcygtcaagaaactaggamcaagtatattgcactatgaaagaaagtggaaatttttgaaatggagtggttttgttaaagatcatgtgctacctccagacatagaaacctattgaaccctaatcctctgaagctaacaaatagttcactggtttttgtaccacctagcagagagtcaagaagtttttctttttaaatgtctgattgtagtggtaaatctagcctcaatcagtcgataagtagttgaagaatcagatgacttttgaacctacttgaactatttggctctttagaggtgaaagttcttataccagtgggaaaatgtaaaggactggaaatattcaatgctactccaggctataatagcacatgctccaatattatctcatagaatgttgtagagatagcactacttaagatttaccaacataggagactgtgggagtattgaaagccagatggtacaaatagatcctttctttgtcatgcctaaaacacagcctgttctaagattgtacaaaacccaaacaaaccattagtatctttggtttcttttcctgcctctgtatgtttttagtttggtttctctgaacaaattctgccattatataacttgggttagccatcatataaatctttttgctgataggcaacaatctagtcttttgaatcaatgaactattaaatgtataacccattaactggaaggamaaaaaaaatccctcaattttaaaaataagaggttcaatgggcaatcacagttaaatagactttcaaaaaatgaagactgtggagtccagtggtagggacatattttggcctaaaagaagcataattcattgttagcatgcatagcaaattaaagaatatagttcttttttataggcaattacagtgcatatgtcttttgtgatttgagtaggtaggaaagaaataaaaatatttggattactcactgactgcctcagtagcattctcgctaatgaggctgaggtcatgggctcagttactatttcaatctgtcagttcagttctgttctgtttcattaccaaagcccatagtctcaatctccctttgygtttccctccccaaatcaggaacttagtcctgtcttctacttcctaacaaaacctgaattcagaattgaatcttaggtcaagaggttttacataaaatgtcttgtttctctttaaaaatagatctgtcatccctggcccggcattctcccatttccccatgcatttattgagtacctactatgtgtcaagtattatttcagtctttgttgtggcaaaaatagtatgagaaccatcaactggggctaaataggaccatgaacgctccagtccatcgaatacccatcctaccctcttcactcttttatattatctgccttccttctatgtagatatctaagcctgaagccacataataaaataactcacactgaggtataaatggctataacaaagataagtgtattatatctccgttacgtaatttgcactttatcaggagacaaagtgttaattctaaaaaagtctaggttctgcaattagagtcaactcagaagttgaaatatatttgccatcactactttaagccaaagaagtgagatactcactatgaatttccaagccttaaaaatccaggtggagaaattatgtgaagggcaggaaaacatgcctaagaatacaacacagtcaccctgttagtacacctggatttatccacagttacaaatcatggccctaaccatggatgactctctcatagatgcatggaactgaacgtaaagaacagcatgcagtaaaattatatttcatacccattattagagacttgtttcaaatgaatgtgttatagatactgggtacacaatgttcaggtatgtgtgtctgcatatgtattatataaacgtaaaaataaatattaacagtgagttctgggttcccatagggtaacattggccttttaaatccaaatctctccattcccttattcaaaaagaaattcaaatgcagaagggaagcaagtaaaaccacctgtaacccactcaataacataaataggagatagataattctacaaacttcagattacacataggtagagaaataagcacccaaattactcagagttgtctctgtagcccatgccaggactgagagtcagatagaggctaaatggaaaagaagacatgagagctagggcccagctatggcagacttgatcaaattactcccattaaaaagaagaattactcccattaaaaaactgtytgaacaatctcagacctggcatatgagagcaatggctactgaaaatggaaaggaatgtactttaaagttcacagaagtaaagttggtagccttgggaaggcacaacctctgagggcatgggggcattaacttggaagagatgtcctttggaggcttggtggtgaagagaaagaagaaagcaagaggtataatttcaggatacagcaaaaataaaagtgaatcacaaaattaagcgacctaccaaaccccctatccaaaagccattattgattttaaaagctacactttaataagaactaataattctagtaatctaacaagtcaccaaactcctgattcctatttacatacaactcctattactggtccaggaaactaaaatatttcagaatgaacataaaagggagacaacacctacacaaagctctataagaaggaactagaaaataagaattaatcatttcatttgattaaaaaaaaaacttctaatagccaaccccaaagcagaaaaaaacagcaataaaacatctcagtcctaataagccttaaacaaacatttgaagatatgaaaaaggctcaaatgataaagtttaaaactcagaacagaaatgtacaaaatgagagttgactaaactcagggaataaattgaagaaaaagataaacccatcgtgaaaatgaatactatactgactgatgacgaagggagaaaagatattaaaatgaaaaagatgcaatgatgaaaggcacttgaatagcaaagggaacgaaattgaaataaagaaagaagtttaagaaaagatcagagaaaataattgctgtagaagatagtcaaataaatacaaactacatataattatattaatggttcccaaagaagaaaaacaaaacaatgaaataaaactaatatttaaaactataatcaaagaaaattttccagaaataataggcctgactgtaagtattgaagggcacaacctttaataccttggaattacctccaagtaccttcaaaaactgactcaaaactatcaactcctagtcatgtgctactaaaaatattaaacttcaattattatttataatcatctctgggccttttagtgggaggagtcatttgtaaaagaaagaaaatcagattgaaattagacatcttgacaacagacaaagcaaggtaagagtagagcagcattttctttctttctttttttttttcttttttttttttttttgagatggagtttcactcttgtcgcccaggctggagtgcaatggcatgatcttggctcactgcaacctccacctcccaagttcaagtgattctcctgcctcagcctcccgagtaactggaattacaggcatgcatcaccacgcccagctaattttttgtatttttagtggagacggggcttctccatgttggtaaggctggtctcgaactcccgacctcaggtgatccgtccacctcagactcccaaagtgctgggattacaagcatgagccaccgtgcccggccagaattttcaaataactcaagaaagagtatgagccaaggattttattcaaaccagttattctttaattattaaggatctagaaaaatactttaaacatgcaagaactcagagaatactgtactcataagccctactagattaggaaattttgacccaccactttcagttcaagacatgtcaggtggacaaaaacatagtaaatatatagaagaagacctaagaaagcaaaatcagtaagatagatcctttttaatgtattataatagtaattattaataatattttaacttttagtttcaggggtacatgtgcaggtttgttctataagtaaattttgtgtcaagggagtttgatatacagattattttgtcacccaggtaataagcatagtacctgataggtagtttttcgatcctcatcttcctccactctccaccctcaagttggtcccggtgtctctttctcccttctttgtgaacatgtgtactcaatgtttagctcccacttataagggagaatatttagtcaagatagatcccatggctatgtattgaacttaaacaccctgatattagagaatacaccttcttctcaaggtttcataaaacattcacaaaatttgagcaaatattaggtaacaactcagtgagtttcataagttagaaacaatacaaacatcattaccagatcatggtgaaatgaacgtacaaattaataagaatatttaaataccagaaaagcccttctatctgtaatttttttaaattttaaacaattcttgtgtataaggggaaataaaacataaaattttaaaatatctaagaaaaattataacgaacacaccacatgttaaawtactattaaaccttgtataagatgaaaattcacatcaataaaagaaaacaaatctgaaaaatcaataaaaagaaaacacaagaaaggaaataagaaagatatagcagaaattaatggagtaggaaacaaaaataatagaaagataaataaaatagtgttaaaaattaacaagtaggcagaccataaataatctgaaatcaagagaaaaggggaaatatatacgaagtaagaaatgaggagaaataaccattgaaacagaggaaagttgtaaaaaactgtaagtggcaacttttcatgaatctttttgataatgattgagccatttcgtacacccaccagcaatgtatgaacgtgtttacgtctccacggacattgccatcaaactgtgctgcaagcttttgaatcgtcagtttgacaggttagaaatgacrtcttagtgtagttttcttttgtttttctcttaagaaaaagtaaggttgactatcttttcatatttttaaggatcttttttgttacctgtgtgctcatatctcttgcctttttttccattttctttttcttttctttgtctcaaattttaagagtttaagaagagtcattattttgaatacataactctaactgtataccctcaggggaatatattctaaggacaaaaacacaaaatttgaactttacttagtaggctcatttctagtaatggttttgctataataattccaatactgttttgtgcatcttataggataagcaaacaggtaaatatattgatgttactgggaacaaggttcattgtgtggaaaaggaaataaaaatatggaatgagaaagaagaactctgaagtgttggattagaattggggatatatatatatatatgagcttgtgcttttaaactgcatatatgcatgtcttagtctgtgttgctataaaggaatgcctgaggctaggtaatttataaagaaaagaggtttatttggctcatggttctgcaggctttacaagaagcatagcacaggatctgcatccggtgagggcctcaaagcccttccactcatcgtggaaggagaaggggagccagtgtgtgcagagatcacaaggcaagagagagaagagggaggtgccaggctctttttaacaaccagcacttgcaagaactagtagaacaagaagataactcacttattactgccaggatagcacgaaaccatttatgaggaatccactcacatgactcaaacactttccattaggccccaccttcaacatttggaatccaatttcaacctgagatttggagggtcaaacatccaaactgtagcaatccacatatatgtgtgtatacacacacacacacacacacacacacacacacacacacacactctaacaaagcaggttataaaatctaaaaatttttttatttgtttgtatattcctagtctgtcctctgaaaggacttaaaagcaataacacctcagtagtaattaatacaccttatacccaaactttgatttctaaatacatttcctaccaaaatctccttgaaggattggctgtttctaggtctgtggcagggaaagtaagtataaggtaagcctgggatatcttgtgctagaaagcaaggaagtgttcaggcatgccaaaatgacacaggagccaacttgaagggattccccttggccaaatttgagtgtcagaaagaagaatggtggtaattgattatacactgaacaacaacaaaaagaatttaatatttgtaatatggaaaaattaatcatttaatttctagaaataggcatgtgttctactttaactcatgtaggtccytttatgcataatcatagtctcatccaaattaggtattacaatagtactgccttatccacagttttgcttcctacaatttcagttacccatggtcaactatggtctgaaaatattacatacaataagatattttgagagagacaccacattcacatagcttttatcatggtatgttgttatacttgttctattttgttattattgttcatctttttaatttataaattaaacattatcctaggcatgtacacgtaggaaaaaaaaaacatagtatatgtagagcttggtactatccgtggtttcatccatccattaggggtcttggaacatattcctcactgataaggagggcttattgtattatttctactttacatataggaaaactgagactcagagagcttaggagcttgtacaacatcacatagctaataaatagaagagccattactcttcgaatctgtctgacacaaaaagagcctgtgccctcacttattacactaaacagcctctaaaatggagctcatattatatactgctttattgcacttgctttgtaaacatttttctctatcatgaaatattttctgtaatattcttaatggcaacacgatcttctattgtatatagtcatttgtctaactgatcccatttgttggacatttgagtaattttcaaaatcttgctattatatacaatacgctgaataccaatgttttaaatctattcagacctttttcttaccataaatttctaaacattaaatggcttgataaaaatattttttaaaaaatccaacactttggatatatattgccaatttgtccaaacatttttgcaacactttacactaccagcagtatgtgagggtgttcgttcctctgaactctggaaaacttttgacatcatcatttataaaaaagaaaagaagccattttgataggcaaaagggtatttcagtgtcttagtttgcattttccttccatatttattgaggtatattgaggtgtaaatgacaaaaattgtgtatatttaaggtacgcaatgtgatgttttcatacagtatacactatgaaacgattactataatcaaattaattcatatgtctaacaccctcatagttgccttttattgttcggtgatgagagcatttaagatccactctcttagaaatgttcaagtaggatccttgcttccaaaatgccaaaggaaagaaggaacaatggtcatgccattcacttgcagcctgttcactgcaagaactgtgctcaatgcatgcccaggaataaggctattaagaagtttgtcattaaaaacatagcagaggccacagcagtgagggacatttctgaagtgagccctcaatgctcacagtgtttcccaagctgtatgtgaagctatattgctgtgcgaattgtaccattcacagcaaggtagtcaggaattgatctcgtgaagcctgcaaggactaaacacccctaccactatttagacctgtgggttcttccccatggccccaaccaaggcccctgtaaggagctgagtccttacagactgaaggaaaactactctctggagaaaaataaagtggaaattgtacttatttttaaaaaaaaataaaagaaaaataaaataaaagaaaactcctgtaatcccagctacttgggaggctaagacagaagaatcgcttgaacctgggaggtggaggttgcagtgagcctacatcccaggcatgtcagcctggacaaaagaaagaaaagaaaagaaaaaaaagggaagggaaaggaagggaaaggaagggaagggagaaaagagaagagaagggagaggagaggagaggagaggaatcttgaagtatacattattattaactatagccagcatgctatgagaagagaagagaggagaggagaggagaggagtggagaggaatcttgaagtatacattattattaactatagccagcatgctatgagaagagaagagaggagaggagaggagtggagaggaatcttgaagtatacattattattaactatagccagcatgctatacattagatttcgagaatttactaatcctgtgtaactgaaactttggaccctttgagcatcagctccctactttctctacccccagtccttgacagccaccacgctgctctctgcttctatgagtctgacatttttagattccacatgtgtgctagatcatgtagtatttgtctttctgtgtcttgctttgtctcttttaagaagtgtttgttcatgtcctttgcccactttttggtggggttgtttttttctttaaatttgtttaagttccttgtaaattctggatattagacctttgtcagatgggtagattgcaaaaattttctcccattctgtaagttgcctgttcactctgatgatagtttcttgtgctgtgcagaagatctatagtttaattagatcccatttgtcaattttagcttttgttgcaattgcttttggcgatttcatcataaaatctttgtccatgcctatgtcctgaatggtattgcctaaattttcttttagggtttttatggtttggggttttacttttaagtcttcaatccatcttgagttaaagttttaaagcataaggaaggggtccagtttcagttttccacatatggctagccagttttcccagcactattcattaaatagggaatcctttccccattgcttgtttttgtgagatttgtcgaagatcagatggttgtagatatgtggtcttatttctgaggtctccattctgttccattggtctatatgtctgttttgataccatgctggtttcttgtagtatagtttgaagtcaggtagcatgatgcctccagcgttgttctttttgcttaggattgtcgtggctatatgggctcttttttggtttcatatggaatgcttgtgatttttgcacattgattttgtatcctgagactttgctgaagttgcttatcagcttaaggagttttggggctgagacgatgaggttttctaaatataggatcatgtccacaaacagagactatttgacttcctctcttcctatttaaatatcctttatttctttctcttgcctgcttgccctgccagaacttccaatactgtgttgaataggagtggtgagagagggcatccttgtcttgtgtcggttttcaaagggaatgcttccagcttttgcccatttagtatgttattggctgtggatttgtcataaatagcttttactattttgaggtatattccatcaatacctagtttattgagagtttttaacatgaagggatgttgaattttattgaaggccttttctgcatctattgagataatcacatggtttttgtcattggttctgtttatgtgatggattacatttattgatttgcatatattgaaccagccttgcatcacagggatgaaactgacttgatcgtgatggataagctttttgatgtgctgctggatttggtttgccaatattttattgaggatttttgcatcaatgttcatcagggataagcaatatattgttttaaaatatgtatatattgtcgaatggctgaatcaagctctgaattttatgcttttgtatgttctaatatttattttagttgttagttagcatcctttattttcaggttgaaaaacaccctttagcatttcttgaatagcagatctaatggtgatgaattcccttagcttttgtttgtctggaaaggcctttatttctcctgaatttctgaagaacagctttgccagttataatattctcagttggtagggttttcttttttaatactttggctatatcacccctctctctcctagcctgcagagtttctgccgagaaatccacttatattcctttgaaggttctctgtatatgataggccacttttctcttgctgttttcaaaattctcttttgttgttaacttgtgtgaatttcattataatatctcagtatatatctctttatgttcaatctatttctattttggattctttgggcttcttgcatctggattttcatttccttcttcagatttgggaagttttcagtcattatttctttaaataatctttccacacatttctcattattttctctttcgggacttccataatgtgtatacaggtttgcttgaggccaggcacggtggctcacgcctgtaatcccagtactttgggaggccaaggcgggcagatcacctaaggttgggagttcgagactagcctgaccaacatggagaaactctgtctctactaaaaatacaaaattagccgggcatggtggcacatccctgtaatcctagctactcaggaggctgaggcaggagaattgcttgaacccaggaggcagaggttgtggtgggccaagatcatgccattgtactccagcctgggcaacaagagcaaaactccatctcaaaaaaaaaaaaaaacagatttgcttgaagagaccataagctttcttcactctttttcatttgtccttcctttcgttcctcctactgagtaatttcagatgacctgcctttgagctcgttgattctttcttttgcttcactgactattgttgaagctgttgatggaatttttcagttcagtcattgtgtttttcagctctggatttttttttatggcttctatttctttgctgagcttctcatatttcttacgtgctgttttctgattttattcacttgtctatctgtgttctcttgtagctcactgaacttgtagttcactgagcttctttaagttaattattttgaattatttttcaggcattttatagctatccatttttttagggttggttacaggtgcttgttgttgttgttgttgttgttgttgttgttgttgtttgttttttgctttccctttggtgatgtcatgtttccctgattattcatgattcytgtggcattggcaccttctccagtcattaaagactggcttcaccaggagaagctcttcacctgtcagcttgtccagggattctgtgtggaccagcagggaaggtctctgggttggctttgctgaaatccttgggctggtaagcctggtgcatgggtcagtaatggcaccccggttcctgggtcagtaatgatggttgagcctggagcttgggttcaccagtgccagactggtacctggggccatggaagatggcctggccctagggtaggcctaaacccttgggccatgaagaatgaatgcagcttagggctataagggccatccttgtgctatgatgagtttggatcttgggttggcagtggctttactaaaggtcagatccgtgggaaccagcctgatactggggtgggagcctgagtccattggagctagcctaaagcctggagccacagggaccagccatgtttagtggttggcctggagcttgggtctatgtggaccagcctggagtctcaggccttgaggccttgcctatcactagggtaggcctgtaagcttggtcattgggtgccagcctggcaccagggttccctggggtgggcatggtgctgggttctacagtgaagttaggtgtttacttcactctcttctgccacatggaaggtatttctctccacactgtgctgtgtaagcctgggagagtagtattgcaggtaatgctaaactattcttcttacactcttcaatgcatctttttttatgtctgtgttccaccagatactgtaatctctcacctgaattccttagcacttgtgaaggaattttttagcctgaatgattgttcaagttgatgtttccatgagggagcaagcactggaaatgcctattctgccatactgttgacatcactcctctaatttgcgttttaaaattaccactatggttgaatattttaaattgtctctgttaatttccatttcttttttgtgaattgcctattgatgtcttttgtccatgtttctattgaaaggtgcagctgatatttattgatttataagaaattttatatattgaagattttaacataaactgcatattttaacattgtttaaaatccaaaattacagtttcaaaccatacaaaaataatgaaactaaaatactgccatattattttcccacatctattgatatcatggtaaagcatttcaggaaacattaagaaaaaattttgactccttttcaggggtgatatgaaattgagttaacttcccactgcctaccttttctttaaagagaaacttgcatctttttcaaaaatagtgagcaaagcttaggacaacaaagtgatccattttgacaaaaatgctaagaagattgaagtagacaagagaaaagattgtagaaccagtagaaaatatatacagtgtattttacttcagctacatgtgacccagtaattcaataaaatttaagtgtcattataaaaagattttgcagatgtacatgtattttgaattggagggtttttacagagttcccatttctctcttatgtacttacctgagattgatggaaaaaatagcttgaataatcaggctatgacaaatagtggaatttttccctatgcaaaagtaacgggttggaataaaaacttaacctataacattggcctcattagtccgatattccagtcaaattacttcagtactaaatgtcattgaaaagaagaaatggattacgtattctcttggccttaagtaagactgaatcagtgtggttgggtgaaacaagactgaggtagaaaaatagggtcctagtgtcagctctctgtgtcctaggtgcaaagcatttcctttctctaggtgttattttcctcttctgtaaaatgaggagattgaggcaaatggcttgtgtgtggtgtgttctttccaaaatatccttttaattgcagaacacttttagacttacagaaaagttgcaaagatagtacagagaattaccatatactcctmatttagtttctcatatatttttttagatagtacaaaggctgtcatagtttcttctattgtcaacgtcctatatcaccatggtacatttgtcacaactaggaaatgaacatcaataattactcttaactgcatttgacacttcatttggatgtcaccagttattcttttccaggatccaattcaaaataggatattatatcgtgtcatgttttcctatcttcccatggtctataacagttttctgacctagatgacattgacaattttgagtagcactggccaggttgtttttttaatgtccttcaatttgggttttgctgatgttgtgcttatgtttaaactggcagtatgcttttggagaggaagaccacagaggtgccattatcattgcatcatatcaggtgtctgtgccataatgtacatgctatcattgatgataacccagctgaggtagtgttttccaggcttcttcactttaaatgtactggccccctcctttctaaaccatactggattactctgtggtctttttgagctctaacatagcatgattttattgttgcagacagattcccttacttgtgcagatcaatttgatagagtagaatccatcacccaggattgcatacttgtgctgggtaactcagctgaaagttttcttgggacccatttcatactatatagctacgtgagaattatcagttattattcataaaatgagactctaactgctttatgctaacctttataaaaagtgtactctactaagaaatgatgataccttttaaaatcttagggatgctctaatttctggaatccttttaccaagaaaacccaaaacctacaacttccagatccccagtgccctgatgatagaggaaaggaaattaaagaaatttgcagctttgggggatgttgatggggatgggaacataaatgaatgtctgttgtatattaagtcaaggatttggaatcaggaaattaggtgaggtttttgttttaactctacagctgtgtgaagatggcagctgaagttctctcaaagaccggaggccctctgtgttactctcttcagagaatcacaactacacaatcatctcctagggcaggaaagtagagaattcaatgagtcaatgactttctacctttctccacttccaggatggttttgtaaagggatcaattaaacaggcttaataatgattgctaacctttattgggcatttagtatgtgccaggcatttttttctaggtactttacatatactgactcatttagtgttcacaacaaccttatgcagatgttgttattgtgcacattttatggtgaagatactgagaggcagagaataacttacccaagattattacacacactagttagcagcagagttgagatttgaaccaagaaaccttggctccagagtccctgctctttattataccatatgacaactgcctccctttacacagagtgaaatccccaacagggccagttctttttgcaaccaaacagtaagtgttgtatcctcagcaactaggacaatgtctaatacataggatccagccaacaaataattactgcattaaaggagaagacttgaggatccggatcatgaatcaaccccatttgaataatacattagtgactctttcagaagaacactgtcatggtgtcacttcagaaaacccagaacaaactgggtccttataatcaccacttcactctctctacctcctcatctgttcacatcttataaggcagatgagaaggtttcatagtttttcatcactcatcgttttccatcttctctatcatatcctgtcttcccagccttttataagccctgctccttaacgttaactgtgaataataagttaatgacagggtttttaaaattccaatatctaaaagtttgcagaaggacacataccacatatttatggctatgattacatgatgctaactcagaaaagtgagtttcaaagtatcagctaccagaggttgtggatataaatcaatgaatacatttctattttaaaaatttaaataatatacaggtcaaatgggtaagaggaagagatagctgtgtatgtctatttcttactctctatagtcacaagttttatttgggtctttttaaaagaacctggttactattgccaataagtactcaaaccaggaaagagagtaggagaatatttaggaatctgagaaactcccatcatcaataatgaagaagtgattggcagtgatttggaccatagagaaagggagaattagttgagcagaaaatgaagtaaaatagaaaaaaaataaaattttaaagaagaattaaaagtactgattcatgtctaaatttatatttttgctacgttattcattaaactgttttttaaatttatcccatcattatgctgcttattcttcctgactccacaaagcaaataataatacaaaaataaataagatttgagttatggagagcacttawtggtgctgtgacttgagatgaaaccactaaataattgtgtctgtctgataaggaatacacagatgggcccgttatgcaactgcaaatggagatcatatattaaacttgtgataaggtacctaactagacatgttatttataaatattgctgtagtcttggaatggaaaatataaaatacgtagtaaatgaaagttttaagataatataatacagaactgggatattaaaatgatttattactctgataggatcttttccatcctgagtattggataaaactagcaccatactaaggcaaaagaaaaaagcatgctgcaatagagaataattcatttcatttaggagaggaaaagtagggattcaaacacgtggagcaacaaaaaaggtgtcctcattgctctgttatactatctcaatcttttcttaattggcatttaattttaatgtttcatcatggcagacttgcaaaatgtgttttgtaaaacagttcaagttaaaatgccttttgttttttttcttttaattagcgaagttctttctttcaaagggaattctacctatatacgacacaacagcttttcgggttttcaaaaatgtttgaaagagacctcaaaaccatactgactacatttaaattgctttaaaaagaaacatttaagtatgttttatttatgttcatgatgtagtgcaagcacaaataatatttttagtataaaatgtatatgtatagccctaggaaaaaaagagaaaagttgaatgaaactgctgaggcaatagtagataccataaataaacatgcattacttctttaatttagttcttgaaaaatgcttctctgaaactaatagttttcaatcctgcatgtaatatggttattatcaggataaaattcagatctgaaggtaatttatcaaagggctatagttcactcatatgccaatttgatgtttaatgtaataaaaatgggatttattttaagatgggaagataacctggtttctgtaatgttggcagtcactgcatttaattcaagtagcatttatttttgcagtgatattccttattgcagaagcatctagtctcacatcatggccactgaagtatcggtctggtgaaattgcttcccacgggagttagttgaaagcctgaagtcatcaggggtcaccatctgggtaatgtacttcgtatatatttcaggaagggaactgtccaacatacaagcagatctgtagttttgacaagccttggaagtaaagtacaacagctgtagcattccctagcctgaaggaacatgaagggaactagtagggggagaatgctgacaaaaagggaaaacaaagtatcttagaaaatattatatgcttttgtcttggcatgctgcgaagcaggacatgatccataatggtcaggactttatttgtaagataggtttcaaactttctaaataggtttatttagtggatttagaaaataaaaacccaaaattcttgcaacaaataaatataacacccctagmtgaatatctttgcatttcaaggtgcaagatgaattccttgaaagcaaagttacatttgtcttaaaagtcttataatttcaaggttaacttgtatatttattatcaaagccctatttattgttaggtgtattcaaaaattacctgtaagagagtggacacaaaaccccaaaagatacataataacatgaaaaggggtcctgtctcctgacagtagcactataaagatatttcaataaatttaaatacctaaaaggaattcttcccaacacccaaattttccttattcagatattttgaagataattttgtaggccactagatttcaaactatattatttggatcttttggacagccaatccctttcagtcaaattctgttttatctgttttatgtatctgggaactgttcatatttaattgctgaatggttctgctgctttgaaatgttttgaaaagcccaattttagacagaaaatagcaataaaagagatagaataaaacaatgaaactattcattcagcttaacaaaggtttgttgagcacctggtattttaaaattatataataatacatgaatacattatcattgtaaaagattctaacaatactatgaaaatgtcaaagtatccttttggttttcacagctccctactctaaacatcaatagtttggtattcatttttcaggtctctttctatgcatttaaaaaatgtaaatatatataaatacatattttctactaaaaccagatcgtagaatatgcattgttctacaatatttttcataaaatcttagagcttgtttcatttcagtacatacagatcatccagtgatgtgttgataaatgtttaacaagctctctggcccaaaaagcctgatctgccrcatttcctaattcccaggatgtaaatacaccygccatggtcaatttcaactgccaatataaagtcattggaggtggaattgggaagagatgtgcacagttggcttttgtaaaccagtataagccagctccagcatatcacttgatcagtcctttttctctctctttttggctttttattttgaaataattttagacttacagaaaagttacaaatatagcacagaatcactgtattcctgtcactgagcttctcccaatattagcatcttgcacatagtacaattactaaaactaagacattaacattggtatgaggctattaactaaacttagagtttaattcagagttctccagtttttccacagtcttttctgttacaggattctttctagatccccatattgtatttagtcatcatgtctccttagtttccttcaatctgataatttctcagtatcagtccttttaattcttataaaggatttcatagtaagcgtgtaccactcttccatagatgggtatattggttgttctaatttttaactacattaataaagtcaatatattaacaatgcaatggcgaatttccttgcacatgcccctttatgccccacatgtgattatttctttagtacagactcctagaagtagaattccttggtcaaggaatattctcaatttaaatagtgatagatatcawcattgtcttccaaagccactttaccactgtacactcctatcagcaatgaagagtacttcctgactaccaatcacagagttaggtaccagaaacagaaaaatgcagaaggcattgttcctgcctttggagtgcttaataatgatgagacagacatgtaaacagatatctttaatatagtatggtagattctatgatagggtgctaaaagagaaacatcatatctctttgtgaaatgtaggtagtccaagatcatcactgctcaacagaaataattgtgaaccatgtatgtaatttaaagttttagagtagccatattaaaaaagtaagaaacaggtgaaattaatttaaataaatattttatttaacctgatatatccaaaatattatcatttcaatgtgtaaataatataaaaatattaatgtgatcttttatattttttcttttatatcaagtyttcaactctgactagccacacttcaagtgtgcaacagacacatgtgatgagtggctaccatattggatagcataggcctaagttattcagcatgtatttcccacatttacttctgacgcattcctgtgggatttttttttttttttttttgagtcaatgagtgcctcttgaaagagagtgggatgggaaaggattattgattataaatgttgctagagaccaccagtcttatttatgagaaacatagtccaacattctaacagtacgcagaaagaaaactgcagagagacttggaggttgctacagaaatgtgtacgttaagaagaggaagagcttctgtacatggggtcagcctaccttgagttccaaggtgcttgattgaatttggaattgaggagagccaagacaatccattcattacctgaactttgtaatgaatttataattttagagcacagctctttgcaattggatagaaaaggaaggagaataattgtaaaatgtacagggctcagcatcagggaacatttgctaaaagagcattagggactgccatttttaatctgctgaaaatacaycattcctggaatatttgagtagacataaacattctgtccaaccattgaatttcagtgaaatgcaaataacaggatgggtactccctcagagatctgggtagcatccatctccattcattgagtawatatatatatatatatatatatatatatatatatatatatatatatatatatattttatatatgtcttagggaacagtaactttgaccttgcttacagtcaagagtgcttatattacatctacttcaaccagcagtgctcatttggaggtatatattctggtatgtgagattttaggtttattactttctaattcttatttgttggtgaccagcttgcaaagttggctagcgtactgaggtaacaagattatgggtccaggacttatgtgtatgagtgttcctaccactctttgcctttctgactgagctcacactgggctccttagtatttctcacacacttcatgtaagacttcagggctttctataaattctgttttgtctgcctggaagattcttccactagatattcacaatggcttcacttcattctaatcttggttcaaatgttacctcctccaagaggccttctctgaccacccttacctatttttaccttcatagcacttataactacccaacgttatcttgtttatttgttgttttttgttttttggtttgttcccttaacgttgtattctatcttatattttatatcgtgtattttttatttgcctgtcttaacccactaccctctcatgtaagttctgggagggtagaggtttttttatgtttttgctgctgtaaactcagaaaaaaaaaaaaaaacagtgcctggtttaaagtaagcactcaaaaaagtatttgttgaatcaacatgtgaatatgacttaatattgccctgtttgttcattactaattttacccttattctagccaattggctcataatgtctattcttgggtttgggggactcacctaaacagtgtggctctaaacacatagcataaatctggatgggaatccactagaaactaaggaagctgtctttatactgcatctaaagctgacattcagccagtgtgtacacactggttagactgtattagttgtttatatctgatagccattttggttggccagtacctatgtttggaagaaataaaaggccagtagccttgccatgatacctgtctgtggtctgtagcaaataattaactttcattatatattcacacaaacatatattacaaacagcttgttccctgggaaagatatagtaagttcaaaaaattacaaagcttcactgctctcaaagagtgttctactaaatgtgcccatacctctttatctgtcttgattggctggaagcagtccatttcattcgatggtgaaaaattaatccttaccttatatattttgaagtgaatctcaccacatgcattttctcgcattttcaagksccgccaggaaagtggyycaacttaaagtatataaaatagcccccttagtcttctaaatgagatctactattccttttgttatatatggtccatctaatttcacagaagtaattgaacccagggaatgaaacacattttcaatatagctcctactatccatcatattcaaattatttgggaggcagagtagaccaaattttctgtaaaacggaaaaatacctctaattggaacaggtgtgttaaactagagtccattggcaaggaaatctcaaggatgtcactaatatagctttattaatgtgccataccataccttactcagaaccactatcctttgagttaaaattatttccaataattgcaagagaaattcatcaggcagcrctggccttaatccaaagaaaagggtagaaaccagttaaatgcttaaaagttttaaggataaattaggaagtaggtgttagaaatctctttagctccaactaaaagtggatgaatgatttttaaataggctatccttctctgttctcggtcactaactcaaatactatacatgagtgttacacatactaattagcccctttcagttcacctaggaacacaaagagaaatacgaaatggcttatgagcagattcacttttttttttttttttttttttttttgccytttgataggatttggttgatgttgaaaaatgcaatgagaaaacaaacaagaggtttctccagctttttgccctaggaactgttttctcctaacattctctcccttcagtgacttcattcactctcacaacttcaactattgcctctgtgcatatatgacttttcattctttttctagctctaatatcctccagaacttcaaacctcctatagttagcattcactatctggagggcccatcagtcccagacacccaacaaccccaaaggctgaattcattgcattccttgcatcttctcatcctgtctcaagccacatattcaaatagtcatcaatcaacaaaacacaaatccagtaccaactatttgtagcaagtgctagactaataaagaattctctaactctattaatggttccaccattgtttcagttagactcaaaaccttaaccattttggattcctccctcctttctctcacttttttctacgccctcccacagcacacctatacacatgcatgaatgtgtatacaaacacacacagagacagagaaagcgagagagagggagagagagagagaaagaaacttcttgccaaatcctgaaatgccatttatgcaatttctccttaagaaatctccttctttgcattcccactgcaaataactgagacactcctgtgacactactctaattggggcactaattacttctttcctaaattattgcaatgccatcccaattgatttatttgccaaacctttaggtctccaattcattcttctccatactactactggatttatctttctgcaaaggatgtttttattatatcagttatttgsctaaaaaccttcagtgctccccactctcaaattaatcatccgaaaaattctgatcatatcactcaacctgtcaaaaaatagaaatgcctctgcgttgcctaataagttgaatccaaatgtataagtgtggcaccagtgtgctccacaatatggctctaatcttcctttctggcgttracttccactggcaccagcacatagctaagctccagtgaaccccagcaacttcttttgcctcagatacatcatgtactttacaaagtcatattttgttcagccctgtcccttctccccaccaatcgttgtcacctgtcaaagccctacacatccttcaaggtctatatctactcccacttccttcaaaaattattcttgatcagcccaacctattttaacctcctgttcctttaaaccgaaagctttctttttcacagatggcaaatgttacacatgttcattgtaaaaaaaatatggaaaacacagaaatcataaaaaaaataaaaattctctgtaagcttcccatgctgttaacatgttgctatatattcttccaaacctttttttctccagacatgaacatgtgcacacatacacaaacacacacacttcagatcacactatttataatgtttagtagcctaatgtttttcatttgataccttatgaatatttcccatgccattgcatggtcttctgcaacatgatttttagcagccgcataatcttgtattatttactatctcatcagttatttgattaatcccctcttgatgaatatttagattgatcataactttctaatattgttttcagatgttacaatagacagcattgtactttggcaacattcatagttaattcacagaaattaaattgttagctcaaagggtaaatcagattttaagttcatttaataaatggtgccacattgccctccaaaaaaggtcactgtatttttatactctcatcaggagtgtatgagagtgcccatcttcctgcacagtgaccaacactgggtactttttaatcttctgatagcagtttaaacctgtcttatgtcaatcattctgcataatattattttatcctggtattactaccaaatcccaccctaataagcatctacattttaacaccggcagcaactatcatagggctttattcatactaggcgttcaggaaatatttgctgaactgaattgaattaaagccatagagaaggtcttccatgttctcatggtagtctgtccaccattactctgtaatagtttccatatggaaactagtgttacatgactaaggggaatggaaaaggaaagggtcacagcagtgagaagttaagtctaattgtactatagttgattccaatttctaatcctatcattgggatagctttagcctcaaaatgttaacaacagctactttaacagctgttaacacttatatgtgtgtcgtagcatgtaagtagctacatgtatgatgtataggtataaactcccagttacttggcctaactaaaagaaaactgttcgtaacatttttaggtgcaaagggatacctggcttggagatgttctcagtgagtctggaataaattaatgtatggcttgttctcttgcagcagtgcatttgttcggcctgacttggcagttgcaaccagttgaaggagagctgtatgcaaatggagttagcaaagggaacagggggaccgagtccayggacactacttactctccaattggaggaaaagtttctgataaatcagagaaaaaaggtacagtgatcaaaatgattgattgttgattacttttcttctaatttggtcattagaactgtagctgggatggtttcacttcacattaaatttcatgatcacttgaaagaagtcctctacgtggacagaataaatgcatgtaaatatcttgtgaaagcaaattttccttgtttccagtgccttgagtataaaccaattaaagttttcaaatatgttggcaattttgaaaatagataaatatttacagaatggaggcttcaatacaatggaaattgcatttcgcatataactaccctgaagcaacgtgggattttgattacattctctgtgtccaagcccagcatttatatataacattttacaaagggtatatggaaatttcttctgtttgtaatacgaaaaagctttttctgcttaatgtaaaggtgaatgtttatgtcaaagttggataacatgatttttttctagtttgggaacatgaattcttcctagttgggagaaagaaaaaaaaaatcactttgagtcctgaactgttaagtttaaccaacatgagcttgaactacctgacttatttataataaatgtcacagtaccagcactcccaacatcttattcacactgaatgatcttagtcttaatatacaagcagtgaaaatagctggaaatttatatttttattgaaataggattcagtacagagggacttgagccttgtaaaattccaggaagtcaatttaaacggtagaaattgagaataatatatatagccagcaatatcctgagtaatttttggagaccaaacrtaaataaatgaatgaatgaccaaaaccttacctccaagaagcttacaattttatacaggtggtaacacagtcttattttggttcattagttgcaactaagacatcattttttaatacagtagttatttgggttactactcttcccttgkgtttttaattcctttcgtggtggcgggggggttgtttgtgggttttgtttcctcttgtttttgkkkgcttttgaaaaggtaactgtaatccatgcttcagtaaaaattaatgcttagggttcaggaaaatattatggtttgctctagttttcaattcatgatgcagtttgctgtatgttctcatttcaaaatacttgtttctagcctggagtgacctttcccagcagtttcactgttactcctgagagtggctgaggagagtagaggggtcagaggtggcagataagaaagtctgccacactcactgctcagatttttcttccttatctcccttacctgctttttctcccttaccttctcttctgctgttttatccccttatatctgaaagtacaagagctatcatttggtattatctgcctagggtttcttgccattcacactaaaaatcagaatttatctgtctgaggaaaatgaaacatgcaagacagcaggtcatcacatagttgtcattatagtatatttgattttatattctaattcagacctcttttgattcctttccataaagtaagttgatgatgatggctaaaattaaattaaaattaccacgtgtcaagaattgttccagaaactttacatggattatatcatgaaggtcacattatggtccccattgtccaaatgagaaacagaggcacagagaggttaagtaacttgcccagtgtcacagagctagtaagtggtggtctgattccagagtccagtctcttaacttctacactgtactaaaatcctcatatggaatatctgtgaagaccacaaaaaactttttacacaatgaaagcaaagtcccagagtctattcrtgatagattttagagaaattctactcacctctatttttaatgtgttgtgacaagtctcataaatgaaaaatgatttaagtttctgctcaattataacaacaaacagagcaaaccgacttcaattaaatmctttattaagaaaaatcattatgggttgatgcctcatataccaagttgctagcttatcctgactttttctggaagcctgaacaaaaccttaactataactgcacatcatggttttgctgtattaggtctttactgcatattacttaccaagtaaaaacatagctccttttttttttaatgccatatgtatactaatccaaaccttgcagaagatataatacagtagaaggatattttcaaatgttcagttgtatccttttatgattttctacataagacacatcccataaatacagctctagaagcttgtcctgatactgtatgcactaaaatatgaaactgacaaccagaccattcttcctaaattgttttctctactctcctagaagattgggcattatagcactgtggttaaaagcctggattctggagtcagagagacctggctttaaatactaactgtaccatcattatctctccaacctcaagtaattgacacaacctcgcccagccagtgccctcatctgtaaaataagggtgataataatagtacctgtctcatatggtcatagtaaggagttaattaaacaattgatataaagcatatagcacagtgtctgacacattgcttaatttagcagcagttattatcggaccaaaagattggaaaatcrccttgaggtttttgaacttcattgacattccgttaggtgctatagaacctgctttcaaaccactatgaactttgcagtgaatgatgaccttcttgagatcgaagtgttttctctctttaaagtttggtctctactcaccaatctaaaacctattatttttaaactgttaccactatcatcatcagataatgatgaatggcactttcttttattatactttaagttctagggtacatgtgcacaacgtgcgggtttgttacatatgtatacatgtgccatgttgttgtgctgcacccattaactcgtcatttaacattaggtatatctcctaatgctatccctccccactccccccaccccacaacagtccccagagtgtgatgttccccttcctgtgtccatgtgttctcattgttcaattcccacctatgagtgagaacatgcggtgttcggttttttgtccttgtgttagtttgctgagaatgacggtttcccgcttcatccatgtccctacaaaggacatgaacttatccttttttatggctgcatagtatttcatggtgtatatgtgccacattttcttaatccagtctatcattgatggacatttgggttggttccaagtcttcgctattgtgaatagtgccgcagtaaacatacgtgtgcatgtgtctttatagcagcatgatttataatcctttgggtatatacccagtaatgggatggctgggtcaaatggtatttctagttctagatccttgaggaatcgccacactgtcttccacaatggttgaactagtttacagtcccaccaacagtgtaaaagtgtttctatttctctacatcctctccagcacctgttgtttcctgactttttaatgatcgccattctaaagggctaatatccrgaatctacaaagaactgaaacaaatttacaagaaaaaaacaaacaaccccatcaaaaagtaggtgaaggatatgaacagacacttctcaaaagaagacatttatgcagccaacagacacatgaaaaaatgctcatcatcactggccatcagagaaatgcaaatcaaaaccacagtgagataccatctcacaccagttagaatggcgatgaatggcactttttaaagaaacatcaaattctactggaattggtttcccattaacagttgttatatatatatattatatatctgcttctcatgagaaaacagaattttctcaccacttagttatccaaatgaaagaaaaagagtatttgattatagacatttagtatgctaaaaaatttacgaacactctagaatttcaataagcagatataagtcacaaccacatactgtaatctaccagaaaaatctcagttgtcagtattaaatatttataaaattgaaagtattgtaccaaaatagtccctcactacattagagtcttacaaactagtcataatttttttttttttttttgagatggagtctcactctgtcgcccaggttggagtacagtggtgcaatctcggctcactgcaacctccgcctcccaggttcaagtgattctcctgcctcagcctcctgagtagctgggactacaggtgcccaccaccacatccagctaatttttgtatttttagtagagatggggtttcaccatgttggccaggctagtctcaaactcctgacctcaagtgatccacctgcctcggcctcccaaagtgctgggattacagacgtgagccactgtgcctggcctataactatttaaccagtaaacattatgtaacaactgctttaaacagagcagaggatatgaacaaataaaagacttattcctagacctgagttatataatgtctataaataaaattaaaaataactacccccacgtaatttatcaataaattagaatgttaaaatcttaaagattatcaaatccaatatccttatttagaaattaagaaaattaggtccagaaaagttgagatcacatagaaagagctgggactaggagagaaggtaccgagtttcacgttttatatttttcacctgttattgtaatagtataggataaactaagtatataaatttctgaaaaggttttcaataagtatcacagagaaaaactgaacaagtaaaacaattgattttattcaggctattgcaatagggaggtttgtcttggtcttattaggaaggggtagatgggttacatgtgagatgatttactggtgggatcgtgttgcaatcaggggaagtatcagttagctgaacaggaaatgtgtatctttgtttctagctagtttcagggaaacagacagttctaatctcaactaattattcatgagacaaagaataggaaattggagggtctgtatacggcctttcagtgggttcaggcaataggggaaaagtctgtgtttggtcttttcaggggtggaattataggtgagtcttagggaaatcatgggaaagaagggacagagagttttatcttaagtcatttagggaagggtgttttgtatgtgtttgtttggacttttgtttgtttgttgtcattgttacggtttttttgcataagccatttcccaggacacaaaaaagtgggagaatttcggaaaacaaaaggttggggaatttcttaagcaaaattgttttccaggagcattaaggctcaggtaaagtcttgtattgtcagtagcaatataaatggagatgaaatttattgggtagttgaggatactgaattcctgcaggttggatgccaaaatagaacactgggaacaaagaaggatgggtggggaaagacagaactaaagaatactaaaagcagcctttatctccattacaattttgcataagcctggccttgggggaaagtggcatttcttttaaattcatcctgcacaatctatctccacaaagttgaaaaaaaatgacgtttttctagtcagtgtctgctgaatataygaccatgtaaacaaaatacagctgattgatatgacacaatttatagcctgtcatgaagatgctttagccaagaccaaatagtgactactgcctcacctctctaggctccagtttctcatctgaaaaataagggagttggctttcaaccgtttctaggggcagagaagaggcggggctagcaggcagtgaaaacgtttttacaaattaaatcttacccagaaattacaaatttaaatagaaaacagataaaagccaagtttctccagatatggcgagggaagggggcagattcctggcaaaactcccgttcccttcctctttgctttatttgccctctattctctcagcagctgctaaggctttgacaaaacacaaggctaacttatctgtaagatccctttcagctgtacacactatgcgttagtgttcaaattctgcagttaaggaagaataatgagccaatacaagtaaaagtggacctatttttgcaaaagggatatactcctggaaagaggttgaaatgtatatctataaagtttgtaaaaccacatttgccatttaaaatacttgcagagaattccgttgcaattcaaacaattaattcccagtttcctaccttataagtttggagttttgacatgtatataacacagcttgcacttagcatttacaattgtaaaatactttaatgtcttttatccacataatagttttattctgtggcagctatcgttaccttttcttttttttttgagacggagttttgctcttgttgcccaggctggagtgcaatggcgcaatctcggctcaccgcaacttccgcctcccgggttcaagcgattctcctgcctcagcctcccgagtagctaggattagaggcatgtgccaycatgccaggctaattttgtaatttttttaatggagacagggtttcttcatgttggtcaggctggtctcgaactcccaacctccggtgatctgcccgcctcggcctcccaaagtgctgggattacaagcgtgagccaccacgcccagccgtgttacccatgttttatagttgaaaaggaaaacacaagaaagttacatgacttgccttgcgcaatagacaatagacataactaaaggcagagctgagattgtgatccagtttctccttactgttagcacccttccttgggctttttctttcatttttcaaaaaaattcctttctcaaagccagtttgtttaaataacggctatcttgattaaaaatctcaatgcatacagttcaaatactgtactcttccttaagagtacttggcaaatcttatatttcacatctaagatctcctttcagcgagcattctccctcctccacaaagcaaaagatacacacacacacacacacacacacacacacacacacacacaccccacaagtactcttgggaattgaaaactaaatgacagtgcaaaatgtactgtttacagccacctttcattgtggacctatccagaagaggggtgtgtttgtgtgtgtatgtgtgtgttttgcttttttttttttttttttttttttcttttgctttatctgagrcataaatgccttggaacattttatacaatgccaattgtggacctgaaataacaggttaaattttaatttacttaaggtttggcaratatttatttcacagacccaatcagtagataaagattcattatgtggtaccaaactaaaaaactgcaccaaccccacccaggtaatcattgtgcattcagatggaacgcagtcctgcagtataattctgtggttctgcaatattggttcataggacatgtggatattcagcagccctttgagtcaacccatagtttcagtatcttttatttaaaggatattatagcccaagatattgaggtagaattgggaataattcatgtaagcacaacaaaccacatgaataaaatagaagtaatgcgctaacaaagacaacattgttgggagtgtaacagtattatttttaaagattgatggcgaattacagtaaatgtttcctataatgctatatagatgtttccctaacagaaggtttcagagggcccagctagagtgctgcagcttgttttcaactatattaaatcactttatcaatatacttcagttttaacaaaagctttcctaaagcatactggagacttgacttctaaaacagatttatggaaagggttccctatgctgaaagacaaacttatttattgtattaaaaattcacgttaaatgtccttggtcatatatgtttagtgtttcattcttgtttcattttcatcctcattttacttaaaaaaaaaaaaaaaaactaatacacacctttcctgtgatgcagtaagaaataggtctgtcttgtggtccctctagtctaacagtctgcatctgacagggtcactaagtggtatgctatagaatgccatgtttatcctcctggactagtcctttcaaagctaagggatcttcccataacatttttacaacattttagttttgtggaggagctagtccattgtagaggtttatcagccatgtgtatatttaattctgttgagtatccatttatatctttgaacctgtattacttttcaaggaagtttaaacatttactagccttttttgtggagtccaatgtaattctagttacttgaagtttacttttgactatgaagttttacagttccagaatttaatgcacaaatctgcatttttcctgcgtgtaacttttgtaatctcctagatgataatcacacattcttttttagcctacacatgtctaatattaagagtccttgcgtttacttctgtattcttcttgtagcttccattttcccttagtcattttaatggtcattttctattttcattataattatactgaaagtgtcagccacagctatacacagataccatcttctcttcttggttctaggagagggaagaataacagttaaaaagttgagttgaaagagaaaccatacctgaccacctcaaatgctccattaaactaatagcaagggaacaaaaatgaaattcttagtattcagaaacacagaagctcataatttttaatcctgtatcagccaagctgctactttaactgtactaagtactgtggaaagctaacaaataaaacagaagacatagtgcttgcccttgagcagattcccgttacataggagagctggaagaaacatgcatacatacacatacaatacaaacaacatgcaacaaactgttgtacagaaataaaaataagatggttaggtgattaacaggcttaaaagaaagaagattaaaatacgactgtttctggagaagtagtttgcgccagaccttggaaaacaagaaaaatcactcctagtgatcttgaggagtacatttttaggagaatggaataatygaatggtaagggggaaatgcagatggtaatagcctaggtggtaagtggataatgaaacaatagtgcagctgatagaaacagttcagcaaggaaaggaaggagataaacagtatgataatttgacaaaagggcagttgggtcatgttattagtttttttacaaatttttcaaaagaagagagactttttttttttttttttttttctgagatgaagtctcgccctgtcgtccaggctgcagtgcaatggcgcgatcttggttcactgcaacctccacctcccgggttcaagcaattctcctgcctcagccacctgagtagctgggattacaggcgcgcaccaccacgcccggctaattttttgtatctttagtagagacagggtttcaccatattggccaggctggtctcagactcctgaccttgtgatccgcccgtctcagcttcccaaagtgctgggattacaggcgtgagccactgcgagagacttgtgtttgtttgaagacaaagaatgaggagccaatagagagggagacaccgagtatgagtaagaaagaagattgcaaaaagaccaaagtcccagcataagcaggagagaagaggagggaggagccttagagataaactgggacatcaaattggatggcatactgagtatgaaagaggcattttggtattttagaaataagagataggaactgaaaaagaggacacagtaagtgtggtagcatctattattattattattactctctgacatgggttttgtctgtgagaagttttaattcatgtaattgaagatttctgcatgcctaaaaggtagaaatcaaaggctatagcaatatggcaagtctggaggactagtacaagatatgccattccctcattactctcaactatgtcatgggtagttcatcatataattgtttttattaaatgcccaatgagtagctgtcgaaaatttagacagatgtgaatgttctatcctctggggacttatattctaaaataaaggagagggaactggattaactgagctataatcagccatcctgccaccatccaaagttaagaatgatgtgataatgataactgacatataacagtatctaacattgtatgaaatatagaaaatgggcatccctgatgtgtactaccaatcacacattctaaaatactggccaggggatagttcagcttctaggtagcaggtaacattctaaaaccacttggaaatacatcaaaactcttgtgacagtacatgatggtttttgtgtatatgctatgccaattcacactatctaactgtatttttgtgacagctttattgagatatagtttatatagcataatataattgtgcactaatttaaagtgcgcaattcagagatctttaccctattcagagttgtgtagcaatcaccaatatttaattctagaacattttcatcacatcagaaagaaacctcataggcattggctgtcactccatatccccacctccttccaacccctggcaaccactaatctactgtctctatagatttgcctatttctacatttcatatagaatcrtataatatacagcaatgtatcaatacttcatttttatggctgaataatattccataatataggtataccaaattttgtttatccattcattagttgatagatcttttgtggattttcacttttgggctattgtgaataatgattctatgaacattcatgtgtaagtttttattagaaaacctgtttttaattctttggagtatacaccaagttgtggaatgacggggtcatatggtaattctgtgtttaacattttatgtttaacagttcttcaactgatgaactgctttccaaagcaactgcaccattttacattcccaccagcaatgtatgagaataccagttctccacatccttacacttgttattgtctgttgtttttattttagccatcctaatgggtgtaaaatggtatctcattgtggtttttatttgcatgtccctgatgaataatgatgttaagcttcatttactgttcttattggtcattagtctgtcttctttggagaaatgtctattcagatcatttgctcttttttcaattatttaactttttattgttgagttgtaagcctccttaatataccatagatacaagccccttatccaatatatcatttgcaaatgttttctcccattctgtgggctgtttttccactttcttgatagtgtcttttgaagcacaaaagtttttaatttttttttttttttggagatggagtctagctcagtcgcccaggcttgagtgcagtggtgcgatctcggctcactgcaacctctgcctcccgggttcacgccattctcctgcctcagcctcccgagtagctgggactacaggcacccgccaccacgcctggctaattttttctattttttagtagagacggggtttcactgtgttagccaggatggtctcaatctcctgacctcgtgatccacccgtctcggcctcccagttcaatttatgtatttttttctttgttatttgtgctttgatgtcatgtctaagaaactattgacaaatccaaggtgacaaagatttatgcctgtattttcatttgagaattgtacagctttagcccttacatgtaggcatttgatccattttgagttgttttttgtatatggtatgaggaagggggtcacgtttattcttatgcatgtggatatccagttgttccagtatcatttgttgaaagtattattctttcccccattgaattgtcttggtgaccttgtcgaaaatcagttcaccataaatgtgaggtttcatttctagattctcagttgtattccattgatctatatatctatcctaatgccagtactcattatcttgattagtgtaggtttgtaatcagttttgaatcaggaagtgtgaggcctccaattttgttctttttaaagattgctttagttattctgagtcccttgcatttccatattaattttagcatcagcttgtctatttctaaaaaaaaaatgagagttggaattttgacagggactgcattgaatctgtaaatcaatttgggaagtactgccatcttaacaataataagtcttttgatccatgaacataggatatctttccatttacttaggaaatatttaatttctttcaattatgtcttgtagtttctcagtatacaaatctcacagtttcttttactgaattattcctaagtattttattctttttaatgatattacaaatggacattctcttcttaatttcactttggagttttcattgcatatagtcatatttattcataaatctttggatttttttgcaattggcaatattttctttcaagagatattttattccaccttgacccatgagtctgagtaaatgtttgaatatgtaacaacttgatgatacatttgtgctttatatcaattttagttttcaccaagaaaagtcaaagtaattggctacttcatgtacccatttgtaatccgtatacagaaacgtctacaaatgtaatttgtattacaccgtgtgagattgtatagcaagtcacaagagccttaagtttggaaactcatttttctgaatgctacctaatggtcaayagaccacaccagaagaactgtgaaactaaagtttttgggaatgtggaagtttttacaacaaaatttaaagaaatccttctaaatagagaattgtgtcttttaaatgatatagcttcaamaacagatatacagagtcaaaatgcaactcaaaataagtcctttaattaaggataagattttagcaatgccattttacttctacctgagaagatgtaagcaatactaaataagctactgtactggtatctgtagtcttttggtgtttggacataattgtttacacttatacaagtaatgtatttctcaattgtaagattagttaattaacttttctacacagtgagctatctattatcagtgtcatatcagaggattttatttacaaacatattttattcacagttaattgccaaggcctatgtgtgtaaatagttataattcttcctctcaccagtaaattcttgacatctacttactggacatttaataaaaacaattatatgatgacctacctatcacatagttgagagtaataaaaaaagttgtacgttttgactaaaatgtcaaatatattatcaaaattactatcaacaaaaaaattatcaacattactaatttattaatgtatccaagcagtgtttaccaagttcccaccaggcgcaaggtttattcttttctttttctcttgactacttttgggtaatataatggatacaaaarcatgtgtaatccataacccagaaaatctacccctgaaaaattgagagttgaatacatatttctcttcgatagttcacgtaaggaaaattacattaagctacatagatggaaacagtagctttccacctacctttcagatggcttttgctatacccctttgaaccctttaaagcatttaatcacagggaagaggttagttccacctcccattttgctccaagcactgctaatctaaatttgcgaagacttgttactgttaaacaagtattatattcagaggaacataaagaagatgatacttatatcgtgagacacacactaggtctaatttggctgaaaaacacaccaatatcttttaaagattttgagcatgttatagggtgaagtaaaggacaaatatgctctgaatgcatatatttcttctctttggaaaacatagcttagatactttgtgaaacttgcaaatgtctttaaaatacaactcagattgctgttatgggctataccatagcctttaacttgatcatttttaccttaaaatgtaatggtggaatctttttaatgaccatgtttcactatcttctatcaatattcaaccgagttttgcataggatcattgaatgtaccacgtctagctatattaaatagaaaaaataaatatacacatatgtgcagaatatagttatttacctcctattttatatgaacaatgtcattagtaatcatgtaattagtattcaagtgtgtgtctgagtctagatataatggagtcttgatttaggtgataccgccactgcacacattgtctgtcaccaattccaggcccctttttttttcaccttccaagtatcttgaccttttcttttggaactgagttaccatcacttagtgtgccctctttcaacacagcctgtctaccattggtttttcctgctcagcagttgatgcctgtgttgcaacctataaagagagtgtttagctcaaactaaattggtggatattggtgagactgtgataactacagtactgcacagcttgatatgatctgtggctctctgcatttaatctcaaatttgtgcaaggaagtgttctataactggagaatatggtcttcctaggttttccagtatgctttagtaaaataagagattaaatgccaattagaacaggcatattgcaaaaataaataaaattgtacctggatgctgtattctatctctgctgtttacaatttgcaaacaaaggatcagagtcagtgttaagtttggccaaatagatcccatttacctatattaatacagaaatttttggaaaaaaaatccttttttttttaactggagacagggttttacaatattggccaggctgatctcgaactcctgacttcaggttatccacccgccttggcctcccgaagtgctaggattayaggcatgagccaccgcacctggcctcaaaaaatactattttgtattgtttttctacatttaatttccttctctttagtttgccacaccttttggctacattaaggaaaatagttaaataatgaattcatagttattgtactatagtctataacaaattttgagagatgataaaatggagcagtctatttagtggtctagattgctaacagggaaatatcttcctttctgatgcatgaaactctaaarggtaagaggctgagaaattttccacctacaagctgtgagaatgtctcttctctaataccaaatcaccacaactagcttgctttgcctatttttatttaaattacagtccacgtgctcattcgtatgttgtcatctctgttcatctaccttgtcttagctgtaatgaagctttcaagggatgagatcaacttcttttaaaattattttcatgaataacttatgcatatgtactccagatacatagacttgctaataaacagagaagcccaacaacacaacttcctttcttttgatttattgaataacatttaagtagcttcattatgtaatatatgatgctataaagtgcagaataaagagatggtgtagtatttggtaaggttttaatataaaggttaatgtccatcaaccagttttgttcagatttttaaaaaatgacaatatctattcattaaagtctattcttagcacctttaaaacagtgtttgtcaaacctagaacattttgaattgttttatatttataatattgtttgcataaccaaatgatgcattttaagatygataaaagcccctaatgaggatagcagttgaataaactgaacattaacttgcgaacagaagtgccacataaacatggtctgttaattgtctgctcattgaagacattgtcagctctaggacttaagagttaaatgtataatcagccctttaggggccaaattgatctgtctcacatggaaaaaagtaactttcagtgaaaaataaggtcctcagttggtcatttatcatttcaaagagcctattttattataaatgtcaattccacaaaattatgtgtcctgtaatacataattatgtacaaaattgcatttgaaatctattattaacagttaacagtgaacattcttaaaatagttattactgytggccttaacacaaaaagcaataatggaggtattttagggagttaaaagctgcaaggcattggccactgaataaagccactgcaggtgtgtttcttaatgggctgttaactttataatgggtgagcacaaagaacagagaccatgtgtgttttaaaactgtgtttggtctggagaaggagttgatggctgaaaaaaataaaggtgatgtgaaatgaggccaagttgagctttctcacctgagatgtaaccctccttgcttaaaatcaaggcaaactaaatcttgctcctcctcttgtattcctaccctccccattaccacaaaacaaaaaattccatgaaaacacatattaaactggcacatcagaaatcattggaaaatatgacaataaataataaagctctgattgcccaaactcaacatcctccctcacagaccagctcctgtttttgctattagcactgtctaaatcccccaactcacaatcacggggttagctttgaccctccattggccccaacacttaatgttctctagagctttgcttctcagggtgtgggctgtagaccatgcgacatgggcatcacttgggaacttgttaaaaatgtctgactttggaccttctgaatcagaattgtattttaaaaaactgccttcttgtacgcattaaagtttgagaatctctactgcagtatcttccttagcattgtctctcatatcttctccttctttccattcacrtgaaattatttttcactgagatgtagtttttctrtatgagctgtttgggcataccctaaatttagatcttcatgtcatttcacttgaatcacccataattcctatgtcattcttgtgtccgtctgctctaattcgtcccacctctgcctcaagattagcctttctaatgtacccaaacctcttccctcttctgaaaaacctttaatggctttctatcctttattaaataaacccttttgactggtcctctaggccctagacaacatgatttccttcttccctccagccctaactccaactgctcctctctatagacacataccctacaccttagctttacagtttctttcctctttttagttcaagccatcctttccatgtgcgccactcttcccaataactcttttgaaatccttgtcctcctctaaggctcatcttcagtgccacttcccatagtaactttttctcattcatccatttgttctatgaatacatatgtatcgtctatgttctttgcctacagttgcctacattgttctaggtactgggaatataccgacgaataaaacagccacagtgcttgtccgcacagagcttactttctattgaggaaaaatagacaataaacaataaataagtaaaatatgtagtatgttagatggtgataagtgctaaggagaaatacaagaagataaagaggatagagatagctagagatgaggagtatcctccaaccaaataactttccctctttcaaatacacagagcacttatttttctttacagtgaggttatatgtgcttgtcctattttccctattttcaatgctccttgagagcaacaactgcctcttactcatctttgtatctcttgcagctaccaagacagcactcagtaaataatggttaaaaggagtgaaattgattgaaataaatgcaatagggtttgaagagaagagagagactgacatagtgggtggttggggaaggcttcttagatgatatttaatttgggcaaggccttgaaagacagatggggtggggaggaagaaaaagctgagtaagttattttgatatatctgttcttgaaaagctaaaaaccattgctttataaattaagattaacatggtgtgtaattttctctacctttaaaactagtgtttcagaagggacgggcgatagacactggagaagttgacattggtgcacaggtcatgcagaccattccacctggtttattctggcgtttccagattactatccaccatccaatatatctgaagttcaatatttctttagccaaggactctctgctgggaatttatggcagaagaaacattccacctacacatactcaggtatttgatattataggtattttcttaaacccttttcaagggtgatgggttgaacagttcagggtttgtgacttatgaaatatgtggttgtcaaaggtaaggacagaaaaatatttgtcatgaataaatatccagaataattacactgaaactaatgaaaaaaatgacatggagaaataaggaataacatttagcagagcagattcagaaaagaaagtttaagacamaccctttaaatttgacttctgcttcctggaaccggctgttcatgagcttcccagacctctcatcttgcttagctttactgcccacagtcccttcactgatttcatacatctgtgtccccttttcccaatgaaggaacgcatattaatcagaaattagtgagaaattagtcaaaaagttaggttttgtcttacaggtagaaatttttctttactgttgttaataacttaaatgtgtaaaacttctatgatttttatagcccttccataaactttaaacatctcatttctcttattttcttctccttattttttccccacatgaacccatttcgagcactacttcatctaagaagtagaaaaagtgatcaaacactggggcttgttttttccccaacagatatgactatagttaaaaccttaccttcagttagtcaagagatcatgytaaacaaagaaacaaactaaaaaacaaccttaccttctgggccagaatagaaacggaattagaatgcattcaaatgtgattcaaaaaataaatgttcaaggaaacatgtgccaggtccttgtcaactgattagaaaaaatggagaggaggggccttttgaatatgtaaatatgtcacccacaaacgtagtaaattatgatgaatgttctcaaatttttgactgttcatttattttaaagactatacaactgtttttaatttgtagagaaggtcacagtaacatttatgagtggaaggtgtattttcaagtatcttctatcagatgctttagtaaaatgtcaagattctcctgcataatactaaacaagatttctttctgttttttatttattcatttttaaacaattattttgaatactctcaaactgaaaggtttataatatttttaattacagtgagggtttcttcataattaataatatgtttttgagtttaaatatgctctttaaaaaacttttaaaaatttttataaaatttgttgcccaggctggtctgaaacccttgggctcaagtgatcttcctgtcctcgcctcccaaagtgttgggattacaggcatgagccaccgtgcctggccaagtctaaatatacttaaaaattgataacctcctcttccaatttgctcaacttcaaagcaaagaagtaagaaatagggcagttgaagttagggatgtttatcagtctagaagaaaaagtagtggctcatcttcatgtttgtatttgttccagtttgattttgtaaaactaatggatggcaaacagctggtcaagcaggactccaagggctctgatgatacacagcactcccctcggaacctgatcttaacttcgcttcaggagacaggtttcatagagtatatggatcaaggaccttggtatctggcgttttacaatgatggaaaaaagatggagcaagtattcgtgttaactacagcaattggtaagctgctttgcctaatatgttgaattgacagttcaaccctagaaagacacaatcagtgatgacagtgtcctgggggttatttaagcttattgctcactttragttgaagtcattattgaggaaaggttactatgataaaagtttatattgttgttrtcattgatgttgtttaaatgctgattaagattttttttaatgctactttatttgttgctcttctaggacacttgccatacatctttttatgtgctctcaacagaaataattaccttagtaatattattaccaaggctacatagatgaacaatttcagtgaaaaagggaataagcaagttaatttaagttctgttatttttaaaaagcaatgaatacctttttcaaatagaaaaaactagtatcagtacagttcttctttagaacaactggttctagaagcattagggctttaaaatacaacataagattatttacagaagaatattaaggataataacttgagacattcaaagccctttcttatagaatattttagtttgaaattcatcacaatgtctctttcagtgtgctcagggccttttaaaacatgttctttttaatgcgatgcctgcctatactcattcactttcaccctaattagtttcagacgtctcactcttttgtcattttaggataaatagtcctcgtgaccctttgtgtgaataaagctgagctccttagcaattttagrgtcctgaaaataaacaactcatagacacagtatcgtattgtgtgaattttcctaaaacacatgtcttttaaaagacaagaaaatattttacagctgtcaattttcaatacaatcctcaccactttatcctttagttaacctgttcagccatatgtttaggaagatgtgttgactttaatagatataccatctgctctttttaacaattatgttctatttttacttgatgctgaagaccttgagtcaatagaaaatggtatttcagccgtaagattatcaaaactttcttctaaagtaatcagaaagtcaatacaatggaaatgatgatgtttcccctagagaaaaactccactgatcttatatcttcaaaagacaaaatatttgtttgttaaaatagaaaataaatttttaagtcatgtcactgttttgctattgacaggctcagtggggcaggttcaatggatgaatatttcatggcatttttctatggaggcttaatattaattatgtgcatgtcgaggagttataaaaggttgagtttctcctaaaaattagataaattagaagaaataaaatatttgtgaagactttctgtcttcctattattcttactctttcagctcaagttaaaacactaaccgatctattaaccttccaaaaatcaatagacccagaaacatgcttagaggttttttcctgtcccttacttcctcccccaaagaacctaaactttgagatacaattcatatcatccacatatcaagctgtcagtttcatatacaacaacatatttgctctttgcttaatgcaagtcagtctctttacttttctcttgtctttttaaaattagaagcaacagaaacgtttctgctaccattccacttaaagaaaactcaagtaaattttcccaaaatcaaaaggcttgtaagtcattcaccctaaattctcctctttcttttttttttttttttttttttttttttrgagacagtttctctccatcgcccaggctggagtgcaatggcacgatctcggctcactgcaasctycgcctcctgggttcaagtgattttcctgcctcwgccttcagagtagctgggattacaggcacctgccaccactcccagctaatttttgtatttttagtagagayggggtttcacyaygttggccaggctgctctcaaactcctgacctcagatgatccacccgcctcagcctcccaaaktgctgggattacaggcatgagccaccatgcctgacctcctcattttatttttgtttttgaastttatcttaatcagagtaaaaagaagccaatatacttgattaaacaaagtcagatttgtatgaatttgctctaaacgctgctcatttatctatttcatgataatgttagaatcagttgattgatctcaactatatttggtctgctactaacaaggatgaagacaattaataactaacatttactaaatgactaatataggtcaaacactggcctaagttattatatattattttccagtagtataggcagcattgtcagtatcccttaatctcaggcaacttgctctgtagcaggataatagatagcatttatggaatgccactctgctccaagcactgtactagatgctttacactcagttatcttgtttgattctcatcacaacccagatagctcaggaatagtgatacatatattacaaataactgaatggaggcttgaaaagattaaataatttggcaaggtctcacagacagcaagtggcaaaattgaaatttgagaaccagtatgtctgattccaaattccataccctttagactatactcattctataagagtattcattacatttagtttctcccatgagaataactaccagaaacaaaacctatcatcagcgaagatgcaaatatcaaggggcttttgactgtagcataagaacagggtttaaacatagaacttcaaaattattctcacctctaagaaactggactctaggaagtaattctgaagtaagatttaaaagatagaagtcaaagattactggaggccaacataaatagaaaaacacatttttttttcatggctagttgtttatgtgttcctgctgcagccatcttcctcctggagtccctcggctgttccaatgtctctttgatacccagtggaagtggcagcttcaaagcctatattgccttctcttctcatttgcattgctggggttaagctttgtaaagccctttgagctcagggacagttcttaaataagtcaataagatgtacggatttttatttattttgatagcaagctttattaaacattttttccagaagagctacattcccacaaggctgcttccataaagtttccaataggatctggtatgaaattaaattcaactatayttatttttgaaagcttcctctatggccttctactaaccatccagcatgggggaaattcaaatgtagacttaagaagtggcactactgcttggtacaaggaagctagataagtagaaaacagataaataattgttccatctctgaatgataaaaagtctytttatgccttttcataactacttgtcaagtaaattagtgattttctgatgataactagtgttttaatgagttaaaaatagttggctctttgctgaatgctacatttcagtcagcccaggtgtggttaagtgaatgtcaggtgttatttgcttatccatttgagttttctaacactgtgatgagggaccagactggcataaacccgcaaaaggcatgtgttcacatagtggttagacaaataatatcttcaattgataatagggtggctatccagccactggattcattctcagcttttaagaatcccccaaatggactagatacctctttctttttcttgtttttattcttctcaaggcaaaaatgcaacatttagaacaaagttctctaactatggaaggttactatttaaagcattggttctcaatgttctcatgtggtgattgtcagaatgtagatgactgggctgcattcctctgaagcaggtttggtagatctagagctgaaacacaggcatctccattttaagtgccccaggtgatctactgatacaagtaatccacaggccacaattgtagaaatgctatttctcgaccctcattataaattctcactcttattgttcagtggaagatatcaggaccacctcctagaatctctccttctaatcagaaatagcttatccaagtgaaacttggtgaagcaggtaatttagattgaaaagggaaaaaatggtacacaagaaaagtgtgagtttaataggccagaacactaaactcagagtccaagaatgctgagtatgagaaatttatagaaaggtgtaatgaggagacgataacacacacacacacaaamacacacacacacacacacacaccacaaaaaaaaatccctgcgagaataaagcataggtaccataatagttcagacttagaatttgatcattattgtgctcaaacacaattttaaaatacaaacattttttcacctcattgtcagagagactgacatttgtataatattatagattttcagagaagttactgtaagtcttataaaagttctgttgcacggtacatatttatgtcaccagaactacctatcggtaccttcaaagccatctcaattcatctgaaatccattcttctctaagaatggattgaaaggaaattagtggcagaaaacggataagcatttacagttcagaaagcatttctcaacaaaatacttaggttctaatgcttttagtggtggtgaatttaatatgaacacttactttaaaagccttccattgtcacttattaatgaaaatgaaatactgaatatcatatttaagctgtcaagatagtagattaaataagttgctagagaagaaactttatttgctaaaacctaaatttgaaaaataaacagtagacttagtcatctgtgttacattttaaagcctgttttgcttttgagaaatgccctgtaatcctggtacattttttagctttatcatgaatgtctcttaagaatacagttgaactagaacatttatgtgctttagagataatgatgttttttggttccactcttgattggccaaktcagcaaacccagggccctttttatamttttgtactgcatgtgacatcttacagatgtctttgtatgtgattttgagcagtaagtgctccacaaacagcaaagggcaaaattgtcataggtccagagttcctgcaacttaaaaaaaaataaagactctacagcctggagatgcgttcattttttttatctttttctctgtattactagaaataatggatgactgttcaaccaattgcaatggaaatggagagtgtatctctggccattgtcattgtttcccaggattccttggacctgactgtgctagaggtaatgttgctctgttattctgattggtttaggaaaatagatgtgatttcataacccaraattagtagtaatagtcatagtaagtaacattagtagtggtgacagcaacagcagcagtgttccctatggctgctgccaaaagctgagcacttactatgccaggcactgttctamacactttgtgttccgtcttttaattccaacttcctacaatagccctatgagataggtctgctattatccaatttttatgggcaaagaaacaatgccagagagtttaagtgacttaaccagggttacctaacagctgggatttgtagataggttgtctraccagtcactatgtgatgcttgtatttccttcagaaactaattcataatgagctgactttaaaagtgaactaagttgataactgcttgtacacaccaatgtatgtggaaggggtgggttatcaccaaatgagtaaggagcctacaaagtaacgactggaaagtcagaagtcaaacttagcaaacttcactcttcctggacttgcccatagtttaatttttgaaaagctttaggtaaatcacatcatgttttcccgtagacttacagttattatttcagagatgttttctgctcattttcactgtattcttaaagttcccagtctgctaatattttaatatcaggtttctcagrcacttggtttctttctattaaattccattcagtagcgaattctaaaacacttgctaggttcccagcaccatgatagatcttgaggaggtgggggttgagtgtggaggtgatggttggtattaaaaaatcaataagacaaaaaatacaggccttgtcctcaaaaagtgcatagttttaataaggagactaacaatgacaaagcagaattagcattctaataaaggtctgcacaatgtgttataggaacagacatctgtccaatagaaatctatttaattacacaactttttaaagataatattttataacattaataacttcatttattgctttttaaattttcagattttgcttcctaaaagtaaacacatatctccctgaggaagaaaaatataagaaagaaaaatcctagcttaaaataataacaataacagtttaagagtagggtgagatcaaatgcaagtacttgaaataatttctccactcaggatatttttaatttacctttatttcactcccataagaggaaaattctgtttgtaatcatgaacatgtgcctatttaataaagggtaagacagaaatagtacaattttttgcctgaaatacgaaaatcaatagagaattgctctttggagactttgaaagcattatgagamcattacaagttcatttgccaaccttcarattcctgccctgtgctgtgtggtgggaatggagaatacgagaaaggacactgtgtctgccggcatggctggaaggggccagagtgtgacgttccggaagaacaatgcattgatccaacatgctttggccacggcacctgcatcatgggagtctgcatctgtgtgccaggatacaaaggagaaatatgcgaggaaggtcagaatcccattttaatctattgcttcaggcttttctctcactcagttgtccaaggtgtcattctrttctcctagtagagatgcaagtggcctttgcaaacaataaatgctcagcgtcttagtacatgcagcagagggtttgggtcagcggagctcttgtctcttctgacagattctaatgttatacatgaggctgtatctgtgacactttcagagcaataatgaaaaatagtattgtacatccctaatttctctcackattttctaggttragaatgtccatattgatgattttaggtgttaactcatatgatttcattattacagaatgcattatgctacatctcactttaaagcacataataaaaataataatatatgcacrtttgcagccattttgcaaatgttttctttgggagtgttttgtaattaccattactattattgctttatattatttatttttacatacctcatgctgaaacttgacctccatgcctaaggaagcaggcttactactaatgagtttcaaagccatgcctttatattaaattcaccccaaaggagtctttatccccccaaaattttgaaatggcaagttttatcatttaaagagacgcactggaaaataagtttactagtaatcagacgtttttcatgctacattcctcaaacaagactgatttcagaaataatattaaaccattaccatgggagatggtctcatcataactgttgttcgggaaagaggctgctggaaatgcacaataattgctttttaaagatggctcattaagactattacacagcattctaacgggtttaatctcattccactccatgaacaagcaagactttagcttttcacctcccattagcgatagtagaattttggtgtgatgattatatctgccatatatatatatatatgtatatgtaaatttatatatatatgtctatatatatatatgccatatatgccatatatatataaatttatatatatatatggcatatatatgtatatatctgccatatacatatatatatgccatttatattatatatacacatatatatatatatatatatatatgccatttatattatatataaatggcatttggcctagacaaggcactggagtttctgagttactttcagaaagtgtttttatggtgatccagctgaaataattatatttaagttgcaaattcatatgctatatagacccacacagtgttagtaaaaaaatactatcacatctacaaattgccatgaaaaacatgtaatctaattaatttagacccctctaatttaaattttgtaagcagtttagaaaagagttcacttaaatttgtcttctccggggtcactaagaatatctgtagaataaccaagatattaaggaataatgctcagtacatttaatggtataaatttttccaatgcaatagaaaaaaagatgttttaagtcaaactttgcagcaggagcccacaggctgaaccaggcctctgaatgggttttgtttggctcacactgtgttgctgctgttgctgttgtttaatgtgacttatttgccaaaatttaaaaatagggaactgccacatgagaattcctatttctggcttctctaaacactagaaaatctggtgaccctgggcccacattgctacgtggtggcaatcaactggagccaagtagcagcagttctttttaaaagggcgcttgctttcagtttgctcccaacacaccctttttttcttccatatggcccatttccttcctgtatgccacctgcctggcccctttagccatatgattttgtgcttctaaattaaatatgacatgaatgatttaaatatgacttccatgaatacattgaagcaggcttcttaataaaataggctgtattaagttaaatactactttattaaaattattattctttaatataacaaaatggccttcttctgaaaacagattctatactttggactttccctctctcttcaaatcatgaatcaaattagatgtaccttctggtatttatttgcttattagctcagataataaattattgtgctaatgactccaagctcttgggctaattatagtggcaataacaccaattataatagtgcttagttagacttactctgttccacagacccaagccacaccctaaaactaggcagtcttggaaatgcaggcgggttgtcacagtctatttgcattgctggagaagtaattcaaatcatacgtcctcattacgattagttattttagtctcattttatttgtatagaaagactagaaatttggaaatcaacctttctatttcccatggaatggttactagttaaaatcacaaaacaatttttcccccaggcaagcacaagaacctacctctaaaacagtatacacatttgttagaatgtatacaaaaatttccagactcacagaatcagagacaaatggaattggatctgtgatattctaagacactgaaaactatgtcaccgtgttctcatagaaggagaagccatgaagaagtgaatttttaaattaagtttaaaatattacattttcagtacttttaaggaataaatgagagattataataaattgatgtaaattttattatttcatgcaacagcattcacctcacccaataccttgaataatccaaatttcaaaaatttatataaactcctctagacatatcaagtaaaagtcttctctgggagctatcgcttccattttcagaaaggataaggaatgacttagcaaaaactcttgggcttttttgcgaagctgagcaattcctgttgaaggcccacagtactccacccacttatttgtgtgggggtactgcacactgttcacagtttcacacagcacatgtgtggtttccttttccttctcaattgagattgcaaccattgtgataccccaccatgttttgaagtgttaataatatggtttggacagagtgtttgcatgagtcattttattgcctaattaaagcagcattgatgatataaactaggaaatcaatgtaatctccgtttcatcatacyaaggtatgttggccatacctgttcactattaatcacccctcccccccacttttttgtgccttcagaggactgcctagacccartgtgttccaaccatggcatctgtgtaraaggagaatgtcactgttctactggctggggaggagttaactgtgaaacaccacttcctgtatgtcaagagcagtgctcaggacacggaacttttcttctggacgctggagtatgcagctgtgatcccaagtggacaggatctgactgctcaacaggtgtagtggagttaatttccttctccttcctctactcttaaattctaactgttccttccttaaggcagtgtttcttaaaatatgatctgtacacctttgtgagtcctaagaggtttccaggtatgtcctaggttagtattttactgcatttttatttataatacgctgttacctatttttttcatcttgtttttccttgtaggtctgtgcttgaatttctgtcttcattttgtattctcctacagttatttaatacattcccaagtctcctactgtcagttctatgcagatgatttcaaattatatctctcccaaactcaaataatctggcatttccaaccatctgcgaaatatttctactgggtgtcccatcacttaaaagcacaacttagcccaggaactctatcccattttacatattgctatattgccactcaattgctattcctacaacattgctttccttttttcattccctactctagcatcttctatagtttcccattatctgtagataaacttcaagtgtcctagtctatgatcaaaagcctaccacaaactattccaaaaatctttctccagcctatcttctatttttgcttcctgcataaatcgttcctttgccaaagtaatctatgtgctctccttacccttaatgaaccatatttttatgcttttctccatgccttttcctcttcatgagatgctattgtacttccacctagtgaaatccaacccgtccatcaagactaactataattttagccattccataaaatgtttcctgatcacatcaacagggatcccctgattttttttttttttttttttttggagatggattctcgctctgtcgcccaggctggagtgcagtggcgcaatctcggctcactgcaacctccgcctcccaggttcaagtgattctcctgcctcagcctcccgagtagctgggactacaggcgcgtgacaccacgaccggctaatttttttgtatttttagtagagatggggtttcaccgtgttagccaggatggtctcgatctcctgacctcgtgatccgcctgccttggcctcccaaagtggcaggattaaaggcatgagccactgcaccggccaggatcccctgaaatcttaccatgcacattgctaaagagcacagaaaacattgtgatgtagatatgtgtgcacatggcttgtctttttgcctgaattataagttctaaaaataacaagtcattctttataccatttttcttcaaaccatgtactcattaaataagtataattaataagtggtaactcttagaaagcctctgcctatgaattttgttaaagatgtaaaatgacgtggtaagcaggaaagattgaagcactgtgggactttttgtaccactggattagctcatgagctgaaaagtctgtgatcctacaccgtaaggaaagaggagaatttctctgttaaaaggcttaattttagcgtaataattcactgcaattctaacaatacttcactgaaattttgttgcctcacatagacgtaatacaggaaagaggaatacattttacaatttcagaaaatgatcaaaatgctaaaggtaatctaataataacgaaaatgaaaatcttaaaaaccatatatatctatatccttaggtataggatatagatatgtatatctctatatacatatagaggttatatgtatatataacctctataacctttatgtctaacaaatatacatgtgcctgctaagtgcttggcatggtacttgatgctagggttatagtagtgaacacggtggatgtggtccttgcacaaatggatcctacagtttagtcagagagacattgaacaagttagaaaaaggttacaaagggaaagtttctgggtattatgagactgtacaatagggacctaacttgattattaatttacttactaaatgttactgaatactttccatccttccatgtttcagatacactatcatggcttagagctttaagttaaaaatgataatattaatgttattattattgtagcaaacacataataattattatgtattagtcactattgtaagcattgtacatatattaactcactgataacaactctgtaagtatgataatcatgcttactttacagatgaggaaaccaaggcactgagaggtgaaataacttgcccagagacaatcatataatcatatagcttctggcttcacagttcatacatttcaccactatactgcactgtcctctaaaatttattatctaactcaccacatataaaaatgtatcattgttggaccatgtccagggccctgtgtcacagagcacaaaggagggagcagtagactatttttgtgagaagaagycttacagtcaggtaaggttttgtagaagtcttaacatttgaattaacaccagaatgatgattgcatgtttatcacatggacaagagaggaacgaacatttcaggcagaaggagcagtttaaacaaagaaatagagctatgaatctaaatgacacatttggggacttgcaagccattgggtatagctatagcctaggagtgcagaaggagataaaactggtgagatgagcaggggccagaaaatagggagttttatttacacactatgctgaggaatttgcatttcttcttgttgcaataggaaagcattgagtgatttaaaacaaaccacctttgagatagactattgagaagaccaattgtagctgaatgatataaggaactaagagacatgtgcaatgtgattattggagtagtcaaggagcatgatggtgagaagggcctgaattgaagctgtagttgtgagaatggtgaggtggaaacagactagagaggaatgaccacggtagatgtagagaaaagagacagggtaactgctttggatgactaggcaaaagtaagtgccgccaactgagagagaaaagacataggccgaaaagtaggtttggggcagaggggccagctatggtgagctcagttgtggacatgctgtgttgtaggcatctgcagaagatcccgcttgcatatggccagcgaggggttgatagtcaataatgaaattagagaagaatcctgagctacagacaaatatttggaacatagtttgggaccacaggaatgcaagctactgtccagggagagtgtggaaaatgagaatgaagaaaatcagaaccctagagaacaccaacattaatgtctttactatggtagggtgctttacagtgagtcaaaagcttgcctctttatatatgatttaataaatacatattgatcaaacagtgattctgaatcatataattgctccctcagatcactcacatcctttatgtgcccttcctgatgcctcagaattagataaaattcctggtaatgtactactctccagttgcataaattcaaatatttgtatttccattgagttaacattaaattcaatgtactgagagtttctctttccctgcccattcctactccctaacacacaaagacatgcactagtcctgttggccaagaagaaaatcacagaatgggaggaaaagggtaattatgaacatgcctgtatgttgccccctccttctctctcttccagatgaagtaccctaaaccctaccccactcctttctcaccccaaacaacccttacccaccaaaacaaatgaaatgatgagggaaaaaaatgatagccctatagaatattagatctggaaaaaagtgtaggtatctgattcaatattcattaaatgttcctcttccatccatctcagcatccctatggattttaatgcactgaggcacagagaagttaagcagtttgcctcacagtgtgagaactactgcactagtcaaaacctcctcatttacttgtttatttgcctaacatttcttgagcctgagcccctattatgtctccgacagcatgtgaggcaatagtatacaaagaaggatgaaacatctatagttggggaggcaaatgtgaataaaggtgaaaataccttgcactaaatgctaaaagatagagagagagatacaatgtgcaaagagtctttaatatttactgatggttgaggaagtgatcacaaaagaccacagatcatgaaggtctctgtatgccatgcctaggagcttggacttgaccctgaggacaataggaaagccatttaaggtgtttaaagagggtagtgtcatgaccatgcttgcattttagcaaagtcgttcggtaaatgacttggagattaccattaccattaccattcggtaaatggtttgtagaatatagtcaaaaaaatgacgcaaacttgatataagggaatttaagtgtagatggaaaggaaaggacagacatgagaggggttagaaaatagcacttggggccaggcgcggtggctcacacctgtaatcccagcactttgagaggccaaggcaggtgcatcacgaggtcaagaaatcgagaccagcctggccaacatggtgaaaccccatctctactaaaaatacaaaaattagccaggcatggtggcgtgcgcccatagtcccatctactcgggaggctgaagcaggagaatcacttgaacccgggaggcggaggttgcagtgagctgagatcgtgccactgcgctccagcctgggcaacaagagcgaaactccgtcacaaaaaaaaaaaaagaaagaaagaaaagaaaagaaaaaagaaaatagcacttggtgactatgtgggtataaggggagacaggaatttcactgactccatgatttctatattgggagactatatgaatggtaacactactaacggagatgtgaaatattcatctattaaacaaattttcattgaatatcttctttgtgccatctgctacacttttgggatatatcagtgaagaaaacaaagattcctgcactaatggagcttgcagtctgtcagggagagacagatggtaaaaaatgaacaagaaatatatgagtttttgaaacatgaagaaactgagaaccagaaaggttaaataattggtccaaggtcatagacccggctaattgcaaacctgccagaagaaaccaggtctgctgattttatgtaatgtctagcattcttttcagccctcaggccctactcctgccaaaggaagaaggaaaagttagacaaggagacagaactcaggtgaatagattagtttgctgaaaaggagataaaggacatcaaataccaagtacataaatgacacatttttgtacagaggtctggaccaaagccacattcatccattctggatcacaaagaaaaaagatcactagaatcatctcttgttcacagaagcaaaagggtggataggtatgacccaaaactcagcagcctctcaggcaaaaggcttcctaataaaactagcagattgaaaaataagggaaggaaatgccttccaaatctccagtgtcatggtaggaatagtccttctgtgatttttaagctccataaaggttgttcccacagagcatatttaaccatcgagatgatctcactgtgcagacttttaattgagtgtgctcagtacaggaagcaatttaacatctgattcttataatggatcatgtcatttccaaggtggatatgctctttgccattgatcattttcttccactaagcacatgaagcttagctgttagcatgttaactgtgctgctctgataccagggggactatagtgaatggtttactgattattttcagtctgtatttctaggtacattgagtattgttaacagctctaaaatgatatttgatataggcttctttaacctgatggcctcacgacacttcacaaaggttaactcattctttaaaaatacctgaagaggaatacaatagcagcttgttataatatactttagatttggatatactacaggtcaaatcatgctcccttaaaacataactccttatcatgaaatctcagtaatacatttagcctattctaagggtattggccctagcctctgagatcagcattgcacaatgtatctgctatattccttttgtaaaatctgacttgtcctggtcacatagtctttgaaagagagcataaaagcagtttagaactttgtactactctcttcttgatgaaacctcctttgaaccactccctctatcattacttgcaaataactgacagcaaaatttataagtggtaggcatttaatagagaggccaactcttgtcctttctctgctacaatcctctctgattatgctgtatcttagaagtgggttaatcagctggagagatgtgaagcattaggcctggaggttcttttcaacatactatttgctattcagcagaaatcatataaggtattatcatgatgtgccccttctaaggaacgttagttccttaacatgtcagaaggctttgttataaggatatttctttttacactatcctatgacatgtgtccaccttgtccatcagaaagatatcagtatatgtgtgggtgtgcatgtattcacacacagtgaccatgaataacttaatttcttttagtcttagccacctcatttgtgaaatagtggaagattagcaaaatggcccatgaggtcttttccaacactgagatctatgattcttaatactgtatattgaactattgacactgattatgaatggtccatagatttagttcataaactctcttgagtttattaattgtaaatagctttgttttcattataaggacatccacattttgatatatagactatgttatttgatgatttccctttatgtatggagatacacatacatacacacataaacatgtgtatgtgtgtatatcttcattataacaatgtctcattacgttttgaagtgttccctaatggatgacgatatgcatctactaataaaacagataattagaggaggaggttgtaagaggtttatataattgttgttgctgaggaaactttccttgattatacaagtaccatatgctttaaaaacattattagttctcccgtttattgaaagtgccagtaatcaaaagatttttcacatgactctgcgtgtctagcacatgtaatgcatcactttactgcaatttctaggaatttattaggtcttatgaaatgattcatgtgtacacagtgtttttttttcctttacacataacagttacagcaggctcatacatgccatctgttaaagaatctttgttcaaaatgtaatgcaaacaccatgaggataactacgcagctattcatcatgccactgaagggaaaagcccactcacatataagatatytagaatttagcatcttcagtagacaaagagacagttaatgtcaccatattaggaacctacgattgcaggtacattcttctctgcagctttggacacacacctgggtttcttagaaatagtaactgagttctcagaaaaaaaaagtttctattagttagcaataatgttaatattatcataatgctacaaattccctggacttaaagttcatttctgcagatcatatggggcaataaaaaagttgaaatataggtagtcacagaaatatgataggaggatttatagtgctttttagtggataaaagacaaaaagcttatgcctaattcatatgcaggcttcattattttcatcttgatattcaaagtatgacaacctgtgctcacatttatttttaaataattctttttctactcagtaaaaaaataaaagataaacattaaggtgactctgatttgattggttaaataaaacaagcatctgcataaaacatggtagctatttcattaacattacagtgagattaaaacattaactctagattattgaagtaaatgaaattcattggtggcactagaaatacaattcaaaagcatccttaagacaattccaagtcaaattaagtgtgtaagactgaatctacaggaatatctttgggaggtagatatgaaatggaaaaaaaatcacactattatagtggtatcatagccatacatccgactcagagatgatttgtcaccccaggccttttttggcccaaatgaaagtagaaattgaaccacaaaatagtctcagatccaaaaattctttatctttatacaaaagttcatttaatggccataagattttataattatatatatatatagtaatttaagattgtaaggcaatttaaagcacatcaaatatcaaatgttttcaaagacatcttttacatttttgttctgagacaataaaaccacacgttataccattattagcaggcaacaatgcaatatatagtgaaacttttgacaatttgacaagtttgaagtaaaaggtaagtttgcggctgcctctctataagtctgagctaactctactaactsttccaaaccattaaagctttaaaactatttttcaaaccagagacatatatttaaataagatggcaattgtgaagcaagaaaatgtaagtaaacctgagtgcatgtttatttacataaagtacagtacagtaagaatccatttggacagaccaatggaaatgtcaaaagaaaacaggtaaatcttgtgtttcattattccccttccttcaactcttattctgaattctagattcactggctatttgtcatttttctcaattcatttttagctatatgaagtgacaatagatcccaaaaggaagtatttacaaggtgtgtctgtccctgtatatgagagatcctatggagaaagtgtctaccactacagcttgccctgctgccatggaaattctctgacaggggaggataaagtagaaaggctctgtggtggagatggctgagagaggttgaaggaagccataattcaattgtgtaaaaattagtggccatggggaaggatcagaataaattatcccaatcctgtgttccaaaatcaggtgattggagatatagaagagtaccccatatgcttaccccaaataagctgaatgatactattcctgtaataaaaatatcctgcatttatctgattgttttattttttttctccaaatacataccagtgtttttttttatttcatcattatggccatgatccagggtcattattagagtttggattgcatattgagctttgatgatacaaaatacctacaggactgttccagagatttgatttacatatatatttccctgaatcattagagagaagsagaagagggatgggaaggacataaattagttcttcagtaaagagtgaggacaataaattttcacttagaaacttgttaaggtcaggctcatagagactctgaatgggtagttgagtctgctataaagaacttgacttgtaccccagctaccaaatttccagtatcctagcaaaaatgtttctattagtctcataacacccacacggtatgagtagggtaagtaatagtttcttcatattagagttgaatgaactcctttactttgagaggcagggcaagttactttattgtgtatgcttcagagttgaggccactggtagaattcacaccccaatatcctttcttaaagatcagtatgggccgggcgtggtggctcatgcctgtaaccctagcactttgggaggccaaggcgggcagatcatgaggtcaggagtttgagaccagcctgaccaacatggtgaaaccctgtctctactgaaaatacaaaaattagctgagtgtggcggcatgctcctataatcccagctactcgggaagctgaggcaggagaattgcttgaacccgggaggcagaggttgcagtgagccgagattgcgccactgtactccagcctgggtgacagagcaagactgtcaaaaaaaaaaaaaaaactgtatggatttttttttttttttttttttgagacagagtctcatactgtcgcccaggctggagtgcaatggcttgatctcagctcactgcaaccttcgcccgtgattctcctgcctcagcctcccaagtagctgggattacaggcacatgccaccacacctggctaatttttttgtatttttagtagagatggggtttcactatgttggccagactggtctcgaactcctgaccttgtgatccggctgcctcagcctcccaaagtgctgggattacaggcacgagccactgcatccagccagattcattatttttatcctacttcggacttgctgagcttcttgaatataagaacccatgtctcacataaattatagaaaaatttcagtccttatttctttgaatcttgattttcccccttttggtatccttttggaagttcccttagactgtccattccattctagcctccatgtcctttactcctttttcttacttactatctttgtttccctttgttatcttataagcaatttctccgtatttatcttctagctcactaaatctctctttagctatgcttattgtaatgtttaacccttttattaatttttcatttcaatgattactttttgtttctaaaatatttacttagttttttaaaaaaaatatgcctcattattttgggtaattttttgcatcttaattgtgtttttggttacatgaaacatggttattttatatacagtatctgataaatacagcatatgaagtctttgtggatgtgggtctatggtttgttacttctttgaactcttggatattaattgcattcttgtttttggctttcttaaattgtgagctcaaacaggttggaaatctctctaagtcctgtatgaagaaagtattcttctggtgaggatttacatttgtttctgtcagaaacctgcctacgctacaaatcagcgtaaactttaaaatatcatgttgcaattctttaggccaaataaagagtacaaatacgaaccctaaacccacatgaaacctggctagtggccatgaggtctcagaggaggcttgatatttaacatcctcatagacccaagactaagacagatcattttcttctactatgtctctgcaacacgcattttcttccagattggatatatatcccaatatatatccctaatcttgcacaggcccaaggtagctaaaaacttttgctcactctggaccctcatgaaatctctgggtcactcaaatcagcagatgacccatgtcctggcacagctctgactttccatataatcttgggcacgtgaaccactatgggtctcaatttacacatctgcaaactatttgtaacctaaattcacatttcaattcatttttagtgattagcatttttcctctaagtggataaaacaacttaagttccagtaaaattaagaatgtagtctactaaggtatgggtaacaatattagatccagttccacaaaactagaagagcttattccatgctagcaaagaatgttctaagaaatattgctcaaaagacatttcaggaaccatagcagttaaagtcagtgaggttaatagtggagtcaagaataagtagtttcaacaatcaaaacaagcttcccacacttctmtgctaggttcattcagtttttttcttttttaccaagaaagatattgaaggttcattcattttttaarttgaattctgcatatcaagcaatgaaagttaaggcactctaaatatgattgcctactttcttttccaacagtcttctttttgttcatttctttttttgacagacttgtcataatcatagaatattgacaatagatgagattttagatgccacctagttctgccctttccttttatagatgaggaaactgagttccagaaaggtcaaatgacttatggacagtcatatagctcattaggcacgtagttagtatgaaaaacaggtactgtgatttctggtttagatcttttatccaatataccattcagagagccttctataaatttaacagattctacccattgtcaacagttccactgaatctctagaaagttggcaatgagcatatatggggaaggatcctgggacctttttcttgactatcagaatgttataaaagttgtcagagattcagcatggaaaaattcagacagaaatgaactcaaatcccaggcctgtttccaagttattgtattaccttgagtaagttgcttggattctctgagcctctcctgtaaaatagggaaataattaatattttgtaatatagttgtaggggttaaatgagataacatatgtgcaacacatagcatgatgcttttcccatagtgggcactaaattataatgatagattgtagctattgttggcattgtatgtcaattctcaatgtaaagacacatttcaaagacaaatcttttgtaagtagaagataaattagtagatgataaatctcaaggaaattcatctttaaacactgtaaagctgaattaatttgaagaagtatgaaaattctttctactccaaagtctttatgttcttttgtcactatccaaatggtattgtttcctgtgtttgcagaatacagatatatgttttactggaaagtcagttaacaagtagctattctgcctcttcactacctttactttgagccatgctgtttattataaaatcacattcaaggaaaatttacattcctgatgtgtcaactaagattatagttcagtgattggaagtacctccccaaggggaaaaaaagagataaacaagatagaagtattattttattttaggcaaaagaaatctagaggcaggcagtccagggcttgtatggtgacttcagaaagaaagcttcttccagctcaccactgtactatttctaggatggagcccttacccttatagtacacggtgggagccagtgctctagctattacatcctcactataggcgaaatgaagaaatgacgaggcaaagggacttctctactttcttttaagaagacctcactgaagctactgccagaaacattcacttacattttattgatcgataacttagtcatgtgaaaacacctagctgtaaaggaagtgagaaatgtaatctttatttaaggaagtcatgtgcatagctaagtaatgtctaattgtactgtagctttctaactccctcttagccaacacaagagggaaaaatgatcaattatgtaattcacagtgtcctcaagatagacaaactcatagctcaattaaaataaaacttttcttttcattgaaaccaatgagacacttctcctttagctcctcttcaagacttgtatggaagattaattaaaatatctccttattaatttttatattgattacattatgaaatgatattttggatatattgggctaaataaaatatattatttaaattaattttaataatttttactaaataattttgttttactttttaatgtggctactagaaaactttaaataatatatgtggcttgcacttaaggctcacattatatttctcttgggcagcagtgctttagcatatggcagtatcaagtttagcctggaaaatgtaactacatatatattccaaattaaactgattctattccaacgccaaggtaactaaacaagttaacttgcagtatgaaattattgacaaagtggattaaagatggagaaggtctaccaaaaatgattatttgagtcttaatgtaactgactaacaatcctttttggcaataataagacagcaagggtaaccattttaaatctacttctagtttatgacaataaaatcgtatccaggaaatataaaggaataaatatatttatatttcctaagacaagaggaacatcaagttgttaatactcagagctctacacaagatgataaagaatacaaatatgaaatgacagtggaataattaaatacctaacgataacctgtttcttatatagaatataggctggggaaactcaggctttcggtttctcaagaaggaagccagcatatgctttagataaaatgtctaataaagtaataggtttgtaacttggagagagyagaattttaatgtcataaaatgagttagacacactctgggtccagccagccagaagacctatggagataataactataaacaaactggtaaggattagagtttatcatttagaatagtctttgaatagttctcccaccatgaagtcttcctctgatgctttatttagcttgtgtgtttaaaaaatcatgtgtgctgtataagggacatggacagaggtggctcgggatcaccaagctgtcagttggcatctgagctgccatgacctcattctccaaatccataccttgtgtaactgccacggagcctggcctttttaggggatgcaacggccaaattcacattttcccacgaggtcatattaaatctgaggttttacttagcaataagcttttcatatatagacttgactctgataaaatccaaatggccttttctaaatttatttttgctagtcaccacattaacttggccagaatttttttgtttgtttttctctgcccatcattcttatcaaaccacatactatgacagtaggacagagtgtatatatccattttaattagcagcaattcatccataatgggagctgcccctcacttaaggcacatgagggcagggttgaaatggtccttgggagtcaatggaatgcccatagtgtgtgaaagcctctcaatccatcaccacctctcagcctccttacatagtaaatcaaaatgtaaatgcaaacatagctctggaacagctataccaaggatcaaaatagtgaagaartgattaatgtctacctttttcagaatatccatcttaacgatgggtagttagagaggagaatctaatcctagtcaatagtcctatgcagcaagtaaaatctataatgtttgccaccaggctagatacagacaaactttcttacagatttatcccacatcctactattcagtatcagcaggattggtgtataaatacatttttatttgtgtgaggaattttccttttgggttattgcatctccctctaaaacactgcttcatgggaaagcaactcacacagtcccttaagacttctggtagaaagcaataggatccaccaccattctgaaattcagctcccaaggaatgattaactctaccataaggagcaggtaatagataaaagtttaaagatgattttaaaaggaccatatatctaagcaaactatgtgcaccttggcaggagatatacaagaacaaaggcaaatcatttctagattgctgggaaactgaatcaggaccaaaaggaagatcatccagttgtatgagtcaggcattcagcagcagtccacctgacatctgtcaagttttatggtggctgttgtttcttagataagtggagagggaaagagacaaaactcatacacgggaagatacctgtgctaaaaacaagatcgtatgagaacattaaaaccaatcagaaagtgcaatacaataagagtgcttgcctgtggaattccaacctgaggagtttcaaaaaaaatcttagttatcaaagaaccttttggtggctctaaaaattctattttaataaatacatacattcaatggaattatgtggtaggttgtctgctgaagcttctacctccgttggagtagctcgccctaatctggcaaagraaatcctctggctatagagtttgtagacccctactcctaggggtgtattagacatgccttttctcactcagatcaccgacactctggtaggctttttaaattttattttttaattgacaagtaaaaaattgtatatatttatggtatacaacatgatattttgacatatatatacattgtggaatggttaaatcaagctgttgaacataggtattccctcactgatatgggttggatctgcgtccccaccaaatctcatgtagaattgcagtccccagtgtttgaagtggggcctggttgatggagcttctctaatcatggggttggatttctcatgaatggtttagcatgatccccttgatgctgctcttgtgatagtgagttctcatgagatctgcttgtttaaaagtgtgcagcctttctcccctccctctctcttgctcctgcttccaccatgtgagacaccttcctccccctttgccttctgccatgattgtaagtttcccgaggcctccccagaagcagaagccactattcttcctgtacagcttgcagaaccgtgagctaattcaacctcttttgtttatgaattacccaatctcaagtatagcagtgtgagaatggactaatacaatcacacacttattttgttttttcatgcgaacacttaaaatttactcttagcaattttcaattatataatatattgttattaagtgtcgtcaccatgatgcatagtagacctcttaaacttattctttctaatcccttcttaatgattatagtgatgattatggtaattataataataatactgttgcatttattgagctcttactatatatgtgctttacaaatattatccatttaatctttgggacaaatcagtctttccaaagtatcttctatataatccttttattgcaagatattatagaaaaataaaaatgcatttttatagtataatgaaagggaaaaacactgcatatgttagctcccacttggaaattcacaaagcacattcccgtattagagatactaaaaaaagccctgtataaggaaatctgtttaccagagtttcccatggatctttgatcaggaaacccagttatcacctcacatttttaaatatagtgtgcagatagcagtgttctttggagtatactttaggaaaaggtgctgtaaaatgctaccttcattttgtagatgaggaaatgaaaacttagagaaattcagcagatttcaatcaaatagccagtaggaggcaaagcttttgaagccaagtttatttaatgctaaaacccatactcatcattaacaataatggctcagataatagctatcatgtattaactatctaatatgttctagacattttatgtatattttctcatccttataactcctgcagtgagagtaccattatccccattttataaatgaagaaactgaggctccattagatttattgacctacccagatctaaccaaagaagcttatacaggactgtcagcagggatgtagactttattggttctgcttctgtatcattaaccaaattacctaacctcttgaagcttcattgtccatatctgtaaaatgggtgtaatatgtgtaaaacctctggcacataatagttattgagcaaatagtgtctattacacagacagtagtgagtttttamccaagccagtatactctaaaataagtacatagtgaatcttaacatcggaagtatgattcataaattggatatattgcctctaaagtagatttgaacttgacatcaaccaagtttttagggattgttagagaagacaattgaggggcagagagtagcaggcaggcaaagaaaccccattcccagtgagggaagatataaatactaggaaggtcatacctttcagcatggcgtaattcaaagaatacagtgttagagtgagacaaactcaaaattgataccagcctctctcctaattagctacatgaccttaagcaagtcatttaacttctctgagccacagcacctcctctgaaaactggtactaacactatcttgcaaggttgtagtgaagattaaatgagataatgtatgcaaagattctagccctgagcctggcacttattacatggtagctttggcccccagggctttgcctctaccttctagagcagcatgttttaaccaacaaaaggaaaatgttatatcaatgaatgagcatcaggctcattccagaaatgtgcctagtgctctctgcaacttcaagggtggtctggggcgaaaacagatgataattatagtcttttaaatattaatcccaaagtatcctcaatcgctttgacagtggcatgtgtcactgtgaatgaagaattctgagagaataaagtaatcaaaaatgtttttaaagggcaatgaggaaggaaggtttcccaactttggcagctgatttacatctattaaactgatattaccagatgcagattttgaatatagctattttttccctgcaaatttcaagcaaggtataaattgwgtgtgtgtgtgtttaatgcaaatatcttatagatgtattatagatacagttgggaggtgcttcatttccctcattttattctgaggttagtaaagkaattcttagagcacactctaatgactgcctaaataaaagtacaaataacatttgatctccaagcatgtatttgaaacagaaagattcacacttgcatattcatacagtcaaacacactatcacaaagtcaagcgaatacacgaacacacatacacccaaacacactcatgcacacactcatgtacatgcacccaaacaacccttatacactctcacattcacatatactcagactcttgcacactcacacatatatgcacactcacacaatcacacatatacacacactgttgcacgttcatgcacacattcaagcccatgcttacccactcatatacacccatgcatatttacacataaattgacacactaacagattgttgctcttacacacatacacacaatgggtttgtttccatttataaagaatattgtccttagtttgaataaaaagaaaattattttataataatgtcctcatcctaagctgatgttatatgcacactgaacacttaaaattttatttacttaggttacattctacatcagagagggcagaaaattttaaaggccctaaattgtgttcatgccctttaaaagttaactctctctcattctgtcttgaaatacagaacatctttaaatgtgaagtgctttgggaaaaaatgtaaaattttgtaatagttgtaaattggtatgtgcactgtagagtaatttaaaatcattagaatgatgcattttttaaagtaagtgctttgctagaaaatgagtgaagcaatatcacagtgtattaatggagctcaagacatctcaaattgattttgaaattaaacatccgaaactgtaacttgaaaaaaaaataattaggtaaaccattatatagcaatcaaaaagaaaaaaccctcttgaaatttaggaaattgcaaattaagagtgtcagtcatcctgatatggcaagggtaaggattgtcaatgaaaagaaaacatatgcaacttaaaatattcttgaaaactgaatcgcgcacacagtttgctactctgttttgatttctagcttgggtatttctttcacttaaaagaaagacacatcattgtgagagcatcattcaacaaaagtcttgcatgtcttgtcaagacttgaccttgtgagcgttttgcaaatgaagctggcggttgacactagactggaggaaatggtcaggctatgcgtctctccctcttttcccacccctaatattagattgaactgtatgaaattgctgatattcgacctatgaatgtgatattttcacaaagttcaatctaatatttctagtttaactggatttgggaggaaagggagttgtaattatctggaaagtggccttcttgttctgatgctagcagtgtaatgaaaagtaacctaaaaataatttctgagacatgtagctagttacttaattgataataacttatttgtttaaaaaatggaaatagtgccaatctgccatacataacccaaaacttagtaggacaaaattaaataagaggtatgttttaagtagtccaaattacaacacaaataaactcaagcgcatcctcacctgtctggatcttttgtttattcagactatgctcagttgtaagctagcttgcacaaagcatttctccatttttagtatcagggccaaatactttaaaattggaaatatctccagtttttgctaaatgctaaaaacattcaccaccagctttccctacatgagaggggatttatgaaatctttttcaacattacaagttgagcatccataatctgaaatcagaactgctccaaaatctcaaactttttgcgcactaacataacaccataagtgaaaaattccacacctgacttcatgtgatgggtcacagtcaaaatgcagttaaaactgtgtttcatgcagaaaattatttaaaatattatataaaagtactttcagactatgtgtataaggtgtgtatgaaacataaatgaatttcatatttagacttgggtcccagttttgttttgttttgttttcattttgagacagagtcttgctgtgtcacccaggctggaatgcagtggcgtgatctcagctcactgcaacctccgcctcctaggttcaagcgattcttgtgcctcggcctcccgagtaactgggactagaggtgcccaccaccatgcccggctaattttttgtatttttagtagagacagggtttcaccatgttggccaggctggtctcaaactcctgacctcatgtgatccgcccgcctcctgcacaagtgcttggattacaggcatgagccaccgcaccctgcattgggtcccattttcaagatatctcattatgtttatgcaaatatttcaaaatctgaaaacgtacaaaatccaaaacacttctagtctcaagcatttcgaataagggatactcaacttgtgtctagatttctctattacatggattgaacccagtctctgacggtgaaggtgcctataattctgttttattcttttcctatctctttgggccgctaagtaactccttgttaaatggaatgacaagatataatccactcccttcttctaagtaactcctgtattcttcagtgacacagtggtgatattttgtacattgtttggttgtggccttaatcatgtataataattatttccataagataagacgaatcatttcagctctggagaaaacttgactcaggctctatgtaagacaacaagaatatattaagcccctactgtgtgctgaatcctatgcgttacatgaatgagatatacaaacagaatactgtagtaatccatctagtttttctagatagaagtttggcaatttggttattcacagcaattattcaaagtaggaaggagtcaggtacatcttaagtgtgcaacagaatcagaatggttaggtaaattagggtgcatttggaatattatataactattacaaatatttgtgaataatttttaatttacattagaaagtttttaaaggcagaggaagtctaaaagtatgctaaaatgtgtatttaatatctccacaaggtgcgtagtgtacagaattaacggaaagatgccaaaatatcaagagtgttttttgctaaattgggagatttttttttccttctttactctttttttgtattaaggactcagaggatttggaatgtagaaagcaacataatttaaaatcatggtcaaaaacattattgaggacaggttgaggcccccattcattccgagaaaagagagttcagaagagacttagtaataatcttcaagtacttgaaaagctttaagatagggtatggtgaccaggtcttctcccattctttaaagaatagaaaagaagtaagtaatatacagagaaatcaagtttggctagaagggagaatttcatttgggagagagaataattcaaaaattagaatagcttatgatggcatatatgccatttcctttttagaggatttgaacagcaatttttcatctgcctataaggatttaggaacaatccaggcagtctcctgattgcagaagggttggctgattgtactcttgaagtcagttcaagtcctttgattgcatcatttgttccatgccgacagagtaagtacatggtgtaactctggcctctgaatattataccttttactatgagccattctgaaatctgttcaaactcatattgatagttttttaaatagcaagggaaaaagatgctcgattcactagttatcggggaaataaaaatttaaaagagacttttttacactcttccatattgacacatcagtgaagggtatctagaaacaagtatactcttactctgattgtggttatataaattggtacmatattttatcagtacctatcaaaacttaaaatacatatagcctcaactcagtcattccatttctaagaagtattctagagaaatgctggtacatatgcacaaagaggcattgtttacaatagaaaaaaggtttaggaacaatctaaatatccatttgtaaagggctaaactataggacatatccagactatgatggtatgttacataacagtctaaaagaacaagttaattttatatggacttaacaatatgtcttggagctatttcccagttctagaaaaatataaacaatgttataccattcaggttaaaatatacccacaaattagttatgtatctacatgcatttattaatgtaaatgtattaaaaagtacagaaaagtatttattaaagagatattaggggttaccgtctcacgaaggaactacaattggcagctcaaggtatattattgttttattcatagcagaaagttttacaatatgaattgtatttttcaattcaattcaatatgcattaaatctttattattttgttttttatttatttttgtagagacagggtctcactctgtcacccagactagagttcagtgatgagatcatagtccactacaacatgatactcctgggctcaagtgaacatcctgccccagcctcctgagtagctaggactacaagtgtgctccaccataccctgctagctttttaaaattttttgtagagacaggatcttgctatattgcccaggctggtctcaaactcctgagctgaagtgatccttctgcctcagcctccctaagtgctgggattacaggcatgagccactgtgcccagtcttgaatgtacttttaattacttataatagcatgtaattaaaaacaaacatgagtaaaacttaggaaacaggtgtgtaatatggaaatgaaggcaactggttaaaatagatgtttgtggcttttgacaaggaaaaagagtggccagatctagaaagaatgatggcaacagggttatggagggagacagaaaatgtaatgggaaaaaataatgcttacaaaagcaaacaaaaaagaagttagcattaaataatacaaaaaatgtgctgaaaatataatgacaaaatataatgggaaaaaataatgggacagaaaatataacaggaaaaaatcatgcttacaaaaccaagtaaaataattttagcattaaataacagaaaatgtgcagaaaaatataaaactctactgactaatgaatgaggacttgccctaccaggtgtcacaatgtgttataaagcttaagtaaatacaacaagttggtattgatgcctcaataaacagatcatggaaaagtagaaagtctagaaagcaacacaggtacatatacataataatttggagtatgataatctgtaaggataggatggataatccaatatattccagaaagcttcatcccagtccaagcagcgtgaatgtctaaccatatctctctgattaagtgggaaaatgaaggatggaatgggaaaaattacagaattccttcaactaggagtaattccacaggataaagaagtttgaatgctactgacttaagtatactgacatttcataattcttaaggtctatatttttatttaaagattttacatttctgtgatgacatgaaaaggaaggaaagttcttaaggattattatggctatgaatggagtctgggtattcttttcccttcatttaaccctctctttcatttcactgacagcttcttgcctcttctggtgaagttttaaagatggtctctttgtcccggaatctcagtatttcttatagactctaaaagaactcaggggaaaaactaactggtgaactagtttcctttctgggaaaaaaacaaaaaagaaacagcattatcataacaggaagaaaaacttaattcaagtctccgaggaatttaaagtaaaaatcatagggcmscaggatggaaacccctaggtttctggaactagtccaagctgaactagaagggcctaatgcagtcattcattgatttgagagacaggatatgtcaaaggtattagagttacaacaaggcaacctccaaggcggaggctagcctgccaacctttacttgatcatttgctgcttgatattactggcaggagggtcagaaatattacctcttccctgccccctttcctctttgtgttatatctagtcaattctcaatttccctctgcttcagctccagttacctcaaaaataaactttctccggaaagtctacctttattacacatatatcattttcctcatacttggcactgttcagtctagtcaggtatgaaagttagggagggacaattagaaatccatttgatccttttgtctgaagccaactttgtcattcctctttagtgatacctattcaggattgccttttagggcatatggcaagataccaagcaccttaagttttacttaaaagaaggaaacttaattaacaccatcagtagtaccagcactcaaaactgataccgccaacaagaaattttaaaattataaaaacagcctaagactataaggatcttaataacagtggaatttcatatcctggggaatctcagtggattcttcatctttctaaagatcacttacccttgttagatgcttttctttccttagcmccaagaggcaaaaggggagaggactcttaatatatgtttgkagtctcccttcttcagataggcacatcttgggcaggtagtttccttcattttttttcttctttgaattgctgtagttctctactgtacattcacatgaagtcaattttctatgtaaggtcttccactgatccattctatagctatttacaaaatactatgtgacaggcactatgtttagatgctgcacatacaatagtgaaaaactccaaacccatttcctgtcttcacagaactcaagttctagagggtccagtatgtagagaccatgtgttctatttctactatagaaccctacaaagaacaagcacacatacacttgttgaatgtgtttcttaaagctctgtaagaggacagattctacagcagtgtttcttaaattcgtagacataactgagtgcctgttgcatatgcagatttctgccaccaccctccccacagaaagcctaatacagggagtctggaatgaggatcagagagcagcatgtttaacaagctacccaggtgattgtaatgcaggtattacaaggacaacacattgagaacactgtctctactcttcctgatagttaattagtattttatatagtttaatttgaggctatcaacttttgttcagtcttctcagaacgcagaaaagagatgttcagcatcttcttcatataagaagtccaggcatcgcctgaaaatgaccattttgtggtcgatttggggctttttggtcatattaatagccagttgctgtggtatcaattagaatagatatgtggccaatttatccattcagatatccaatataataactgagctggtagcgccatgcaggcaacatttagacatgaccaaagtctggcaagtcacaccaaagacagtttaatttctttccttatcatagtgacaaggattaaagaatactttaagtaatttccattgaaacagtttttgtgtgtgtgtgtgaccccaccagtggctggttcagatctgagtgtttacagcttatcactgcaaaaaagtgtttatgtcctcatccctaaagaaacataataataccaacttgattgaggatgaaatgacataacatgtaaaaatacttattacagggctctagtagatgctcaataaaaatattttctctgtgaccgagacttcatagaagttaacctatatccaaaagtcatcaagtagctgtgatagaagtatatatatatctcactactaaaaaccaagacagaaagagaggaaaaaggacaaaagcttaggtaattcatgcattatcattctttttccaggttactctctagaaattgttagattttgtaagatgttttggataaattgttactttttgtaagatgtttcatctaaaaataacggaaccttacttttgtatggcattgtacttttcaatgctctttgccaattgttattatatttggtacaacaacctgtgaggaaatgattgttcacaattgacagatcaggaaactaaggcacagagaagataagtgatttgctcaaatttccccagtcatgaagcacccagagtaaatactaagtttcttgaattggtagtacagttcgccctccacagactgtttaattactgggaccatgcttgagtgtcaataaatgtgtttgaattttaagtcttttaactcagggtttgaagccaagacactttcatacaggaacacctgtgatgtagacatgaaatgctacttcaaccaacatttacttagctactttgcctgtcattctacatccaaggttacatatttttttaaaaagtaagcgtaaattctttgtgttatcatcaaaacactttgccgtcttcttccatttgtgggaaaaacaggaattaagaatgctgttgagaagatggcttctaggcataatattgggtagtttatagttactggcctgatactaaatctygggcatgttcctagctcttgaagcatgatcaattcctcctggtctctatccttggctctgccttctagttaccacttaatgctgctttttttgtgtgtgtgtgagacagatcttgctctatcacccagggtggagtgcattggcgtgatctccgctcactgcaatctccacctcctgggttgaagcgattctcctgcctcagcctcccgagtagctgggactacagacatgcaccaccacgcccagctaatttttgtatttttagtagagacagggtttcaccatgttgaccaggctcatctcgaactcctgacctcaggtgatctgcccgcctaggcctcccaacttgctgggattacaggcgtgagccaccacgcccagcctgttaccactcagtacttctaaaatgttgtctgggtaaccccacttctagcttgaataaaccctggctcctctcctcctatctcccatcccatggacagccaccccattttagtctagtcttattttacatgcatgacccagaartaggagaatagaagattgttttcataagccagtgagcatagcatggagcttcctgggaggtagatgtattaacttcttaggtgcaatgatctataccatgaccaattttctagattactttgagatttcatatagggggatatcaggagagaattttacgtaaagctgcattcttttcaaatataattggtacagatagggccatccttaacgtttgtggaacatagagcaaaaatacaaatagagaccttctgcctatgttctaacccctttctcctcccagccctgactctgttccatattatgagaggcttcatatacatggactcagccataccagccaaactctattgacataccacgccaccaccccaacccccccagaaaacagttgtcctttagctatccttcaagccttggggcgcatatatcggcaacatagtccaaacttgccagagtcctccataggccctgaaagtaggcttagggccatgtagacagggcattctaggcacccagcttcccacggagtagtcttattggggatcaggagtgcaaactccagataagcttataccattggcccagtagacttttcaccccaaaagaggagggtagctgaaggaagaccagatgatgccatttaaaataggtcaaaatagaccctagttgacagatttaagggcaacgctagggtcagaaataatatactctcttacagttttcagtatctttaacttaagtcaaaactacctagagctgtagaaaaaaacattgaggaaaagattcccatgatattatcaaatgagatattaccaagcagtgaaagaaatgaaataaagggtgaggtggacatatttagaggacaccagaataatttgaagaatgaaatactttataacctcctgacccatatgatagttggatctcccatttgccactgtctcttcattttgtccctgggttctatctaaattttcaaagacatgattttttaaatagtttgctgatataagagaacttgaggaaccattctgttcttccttttttttttgtattcagaataattttggtttacatatacattaaaaccaaacacaatgcgatcagcagttgtccctttcctggattttcacaacctcacttcttatccgggtcatttctattttttcctcataatgcctcaggcctggaaaacaggggaagtttaagctgatgtacatgacttgagacattatgataattaatcagaaaatgctttgtaaaaggtaaagttctatacaaatgtcagttgttcatcatctcagaaggaagcatctttctatagcaaccttatttcaaatagtacctctcaccaccaaaatgaaactttgaggtagggccttcactgaactttacacattgtagaaggcaatgaaaggtaacgttccatccataggatggaattaatgtggattttattttctttccagctctgggaagaaaatagattgcaggactggtaaattgattcactaatctgctggatgatcagcagcatacttatatgtgaaaagtctttgcattcacatgtgaacatgaaattgatgtgggagtgtgctttggtagatgatgatagatagatgatcaatgatagatagatgatcaatgatagatagatgatatagatagatagatagttgggagaaaaggaggaagggagggagggagaaagcaaggaaaagaaggaggtcattcaggttaataggttctcctctcccctctgcctacccaatgtggaggcctggaacaaaaatatctttattctgtgtagttatgtgatctgttgtcattttaaacgcatagcacaagaaatctcttctcttttgggaatttgttgttgggtaaaaaaatggcttgcttgttatcaacatagtttgggatgggtgacactgctggaaggagaattctaggtttaattcttakaaaaaaatgttgccacagatgtttatagtacagaacactgttccaacctagtagatttcaacatttttattctacccaactcacctcagggctatgacaggctactcctttcataaaaagtaatggtgactttttaaagtacagattctcagtttggggtgagttatcagaatgagggtagtggagtatgtgtagtttgaaaagctccccgccaccccagtggttttgatgtgtcccctagcacacacacatatgtatgcatgtacacacacacacagacacacacaccttgaaatcattgttctaaccatatttattctatgcctaaacaagcatccctgaaatacacatatatttttatttttctgtcttgattgaaaatgttcttcgtaaaaactagtgatactgaattaccttcctcatctttaaaaggatcattttccttccagccacaatccaataaaataatttttgttttctgaaaaaatcatattttaaaattcagcaaggctgaaaatgtacaggcatattatattaaaacatttactcttgcatgcaagtcaagttgcttagtactaagaggcagctgtggagttcaaaatgaatctaaaactgtgtgcctcctttagaaattagtttctgaaccatgctgtgcacttgagacttagcattcgttatgggtagcattatgtgcacctaatacattgtgacatgaaaagtcacaatattcttgaagattttctgtatcacagtgggagaaccaaagtctagtgagtagaacaagagataaagaatggatcattctgtgatctgttcccactttagcttctattttatctcatgatcctgaaaaacattattggtcttcttatctttactataaagatacttatttggtgtgctggctttctttgtatattggaggcagctgattttgaattgggttcactgaatcctgatgttctttaaaagtaccttaggagcttccaaagaaacaaggagtaagttaagtaggtttggatctccctactttatatctattttatatagtggggttctgattaagacttcatttgaatggaaagtattctggtagacatattagtgttcaccaagatcccaattgttttatcctttggggcacagtgccatttcagttaggcatcatcacgtgacttgctctggcctatgaaatgtgagcagatggtatgtgtagcatttctgagtggaagcttttaagagccattgcacaaatctccattttcttttagcctgccttggaaggccctaaaagcttcatgctgagatgacagtgtcctaagttgtgttcagagcaccaccttctgaactgcattgcacatgtagcatgaatgaaaaataagcatctgttgtttccacccactattatcttgtggggaggkgggtcatctgcaacctaatctaacctatactgactagtccaagtgtcccatcaagccactgctgtagtggaaagagtctgaagctaagagtcaagagtcctagatctagttccagcactgctactgagtaacccgtgactttagtcaaatccctcatttctttgagcctcagtttcctactctataaagcataaataaggaagtcgcatgcttcctagcatgtttgggagataaagtgatttattagatattaaagaataattaattataatatcattttagaaactataatcaatatagatgtttacaaaccagtataaccctcaaagtttctacgaaggggaggacaaagatctaaatacctccctggcagaaaagatcttgtgtgaatgaaggagggaggtatcatcccttattcaggccactgtttatacctaaatctcactgattcattttaataaggacccaccaagaaataacatttcctgttgatatttgattacacatgcttagtagtaggaagaagtacaatacttattgtaatcaaagagttgagttgacaatacactttgcaaacttgttaaagaccagaagactaaggtagaattcatagcttttctgtattatgacacttatttactgaaaaatagattccaaaggcagtgaaatttgaatatttaaaacttatgttcctcctttagtgacttcgtatgttcaaaggtaaagactgaacatctactgtctaagctgtataaatacgtattgcatggaagaattacttcctattattgcactataaacagaatctgataatattttgagttgatatattgtcagctttctgaaggggttcaaagaaatacagccaaattgctataggattttggacaaattagcctgggcctctgttttccaattatcaaaatgaaaatagttacctatctcctctccrtctaatggagtgattttgtgcctatgtcaacctaggctagtgaattagaaagcactatgagctattgtgagaaaggcccccttataaattgattataggaaatatcaattattgtcttctggtcacccacagcgatcacaacatggtactcacaggcattatcgttattgcccagactgcccttggctgattccagcataaaatctatatctgaatttttagtatccacctcctatggtgactgtacattaacagcaatagccatctgttttccttagattcatgcctccttggctttaggcatcaatcttatattccagggtcataatatttagggacaatggtgcttttttctgtactctagctgaattatttcttctagtctcaaccctttgtatgctcctgcactgtaggttttcactacattttactccagtgggggcaaccaagagttatgtgagcatgaggcagaggtaagtccaggttatatcttttgattaatttcagttcctcacacttaagcccactagaaatggtgaaacacagttcctttggtattgctacagttttgattaagcatgttaaaaggcttgttggctgcaatttgaatccctggcaactactgtcttacaatttcacttgtagcatgtcttgctcaaaaccaaaggcgtagcatgtctcgctcaaaaccaaaggctttagatacatgtgtgaggaaaaaaaaaagcagcatgggttcaaggatctacaaatccatctcctctaaaagctgaatttttaaaaagttgatcttggcttgggagactttttttcttcagcgactatgtcagtctaattttctaccctatcagattaaactttttttcatttatagtaaacgatttcccacaatatccttatttgatctgccaacttgtacratctatggcccttaggggaaatggggaaggcaagttctactattcaaaaaccccctgtgtgttggccacagcataattgtatttctgctttacacctatatcatggttgggtaaacaaagttatacccaatggtgaatgagtaatccttttcagtggtatcaatttccagagctttggccccatgaaatgaaatatctgttagtatgtttaccattaccagtccaactcataagattgtattgattagatttttgcgctgcaaaaataccattttaaaccagagtgaaatcaatatgggtgtgtattttttatacacaaattagatttagctcaaaaagaatattctttgttggagcagaaataaatctggaaagaaaatctgataaagcatcctaaaatgaaaaaaaaaaaaaaagcttactcttcctggtgcttcagttctttcccctgactattaatctgagctcagttcttgctgtctgaakggakatttctcttctgctcaaagcagatcaatgtttgcacaaattagaamttcagataacatcatcagtgtgcaaatgccttctttagatttaaatgacaaaatagagttccattcagctcttgggaagcagcacaaactgaagtacaaaacagccagtgaggctcctgacagcagcgcgcttactgtaaagcaaagaagctcttttccttggagcacttaatgcttcagaaacatcccaccagatggggtagcattatttccagaaaacaattaaggcagttattggagcgatggtaaggcatcactctgagtaagcaaatagcaaagttgcagcccctcaacttgtactagtttttatttgatttggctaaagctgaagttcagagataatgaacatggctttggaaagctgaaaactgatgtatattaactctgatgtggacttcccacgcattaggaagactgcagcttattcccaaaataattttacaagcactcgactaaaactaaagacaatgttctctggtttccttataatactaacaagagcactttactaataaaatctcagcgcacctgttattgggcttctcacacaggagtgcccactaaatgttagtcggctgactccttactgtagcaatcgatttacacatgtaacttatcctccttatacttgccactcttttagtcttccccatctcactaaatgcaactttgttcttctagttactcagacccaaaaccttgggatcatcattatcttgcatatctacatctagtccatcagcaaatctaattggctccattctcaaatatatccagaatctgaccatttctcaccagctacactgctcctgtcctggtcccaggccaccatcacctctcacctgtattattgcaatagcctgttaattggtctccctgtttccatcttttccccctagagtctattctcagcagaacaacaagagtaatcctttgtaaatcaggtcctgtcattcctctgctcacaagcttccatggtcttcccacttcactcagagttaaaggtgacttcctcactataatctacagggccctacccaatctgcttctcccacctctgtgacctctctcacaccatctcctactaacctttcttcctctctttcatgctgctccagctacatatgcagaattctggcctccttttttttcttcagtattctcataatgctcctgttttagaacatttcttcttggtattctttctgcctgcctccctccaaatagctgtgaagttctcacacttcctttgagtctttgttcaattgataaattattagagaggctttccctgatcacccaatataaaatagcaactacccacctttcattactctgcatccctctcaccctactttaattttcttcagagccattattaccactgaaaatatcccatattcatttattattctctgccataccatcaccccctacacatacacatacacatcagaaaataagctccacamaagtagaaaatatctattttgaccaccactgtatagccattgcctggaatagtacttggctcatcatagattcccaacagatatttgttttcaaataaatctgaggtaccaaatgcccaccattttgtctcattccttaatgtttcctcccttatcctcctcctccttgtcctcctccacatcttcctccttttcgtcctccttctcttctgcctctccctccttctcctcatcctcatcctcttattccttctcttcttcatcatatccattaacttactgagcacctgttgctgggtactattgtacatagtgtactatctcttttaatcataacgtgaactctgtgagaatatatgttatccccatgttaataaacaaagaaattaaagctcaaagcatggtataatttgctcaagatgacataattagtatatcagagctatggtctaaaccctaatgtgtctgattctagaacccatgctcattccattcctccaaacctagtgacttctgcagcttatcttactgtcctctttttccctctcctactctctttctagcagctgaaacattcatgaaattataaaatgttggatccagacaaaatcttagacattaatgtatctaaccatcttgtttcctctcccttctttcctacttttcaccattttgctgttggtgaaaataaagctcagaaatattaagtcttgtccaatgtcacatggaaaataaatggcaaaatgaggactagaatcttcttatttccagtcctgtgtcctaaatggaacacttaggtatctttaaayagtcaatgggacagcatgttacttagaaaggattaagattatgaggatgataaaggttcttatagaggcaaagaaatgagaaatggaagagtgtcaactctctcaacaccaaatcagtgatcctgtaattttagaatacattacctagaatattgttaaaagaaaaatttccaggcctcaccctcacattttgactcagtagatctgcagtggggcccaagaatatgcattttttaactggatcccaagcaggcactctgtgggccatactttgcaaaatgcattgtaatctaaatacaccaggtttaggttaacagcatatggtctttttgcaaaggtaccatagaaatgattgaaagaagaaaaacatcatgttgcttcatttagaaagcttggaaaaaatcgaatttccatttcaatactgaaaatcatttggagtggttttcaaagttcagactttaatatacactgctacaataagaattcagcttttcaagtcagcaaaaataacaagatgagaagaagtcagctggtttgatatatgatgacaaaaatatgtatgctaattgaaagcctcacatataatagaaactgtgcatttattaatgatgcgcaacattggtattccagtggaacagtagatcacattccatattatccagtgcattgyattactgtaaatatcccaaggatgagtaatgtctcattatgagaacattgagtttaacatcattgttaggttactggacaagtgacattagtcctcagaggctgaatatacagacaacactgagaaaagcaaacattactgaaaacaaaaatggcaaagcaaaaccagaagggtatttgaaaatgtttggtagctgtgctttcaacattggaaaaagatactggagattagaaagtggaatttgctcctgaagatcaccaacaattctcttgcccccttgactccatatacaacaaaaggtcctgtagatcacacctggaattatttggaggaatagaccaaagaagaaaaaagtkgttttatctgtgatttttaaggtgaaactttctgttggacctagaaaaggatgaaaccgttcttatacacataaagtcacctagtcaaaagtagtaaaactcactccttttattttctttactgaaagaaaagcccatctagtatggtgaaagcagtattgaactttctagatattaaaggccaattttccaaaatgcagcctcatttttggttggctcaaattgatttttctaagaaaatttgaagcctgacactttgacttcacagtagtccttgcagcactgttcttggggcttttttgaagagtcccaagcaagggaaacctaccattgatcctaaatggaatcctctatttgctctgaatctagagatgttcttcagaaatagggcatgtaagggagaggagrgagaaaaaaaataatatatgccagtcagtgtactactttcataaacgtcgtctatttaaamaacgcttctaagaagtatctcctttgacaggttaggaaatcaagggaagagtattttctaagcccacacagctactggatctaggattcaaatccaactctgtccattatgaaagttcatgcatttctatgtatcaggattactttggtttactgcttgagttttcaaagtgtttttcaaatagttacactatatttccaacattcctgtaagttaggatggatgatagcatcctcattttacaaatgaagacgccatcttagacatgctatgagcatatcccagttcacatggctaataagtagcagatctgggactcccagttaggtctattaattctaactcacacatcaacgattttggacctgaagatgagtttctgccccaacagcttcaaactgatcatttctgggcattttcatttaagaaaagtaaagaactctatcccttgaaggaatagaattttggaaaataacaatgtggttctgtttgaggaagccagcattttaagatgtctcaaacagtgagatattaaaaaatatgggattgaacctactacacattattactcttttatgtcgttgttagcttctcaaataaaatatcattaagaaagaatgccaagggactggagctgtctaggcagaagggtttcctatgacagctgagcaatccaaacatcaaggtagagcagactgcctttatttttgaggagcaactactaattttgagatagcaccatattactatgtcattttgctattataccgattattttatgtagactgaataaattgacaacagaagttagtacaaagatgtgagaaagaaggaagaatatgatcatattaaagggtgaacatgttattgtgatcaaaagaaacaactactacatamggtgtaatgattttattaaagtatcctttgcatatactatagggcaaatagcttaaataaaaaaagtaaaatgaacatttttattaaaacaacatccctacttaattctggctagggtaagtatggtactatcaaagttatcattttttgctttactcaactctagttacttgaagtaagtaacaggacatgtcttgaaaagcttttgtttctttgtgatacagatttgtgtctattgtatagcaatgaaatgtctgagtttagattgaacttgaaaacaaaaatatctttattgttcagccaatcagacttatttagaacrtaagttattaccaactactgtggtgtatccaaatarcttctgaaagcagtttagtgtagtggttaaaagtgtgggctccagcatcaggctgtgtgggttcaaatccctgttctactgcctggtggttgtaaaaccctagacaaagtgttaagcctcagtcccctcatgtgtagagtgaggttaataacagtacctctaacatagagctgttctgaggactcaggaaaataattcatttgcatcattcagcacagtgcttagtatctaaaattcccgataaatgtttgcagtggctgctactattgtaattattgcttaatgccaacaggcctgcatgtttarwtgcatcatgaggtcttgataactacagtgcaactgctatatgtttaaatgacatgcttagtatatcagtttcctagagctatcataacaaattaccccaaaccaggtgactttaagcaactgaaatttattctctctcagttctggaggctagaagtctaaaatcaaaatgtcagcaggtccacactccctctggagactctggggagaaacatttcttgccttctccagcttcaggtggctggcagcrttccttagtgtgtgactacataactccagtctctgcctctgtcttcatatggccttctcctcttcccttttccttttctgtctcttatgaagacatttgtcattctatttagtgcccacaaggttaatccaagctgatctaatcttaagattcttaatttaattacatttgcaaaaaccctttttcaaaataaggtctcgtgcacaggatttaggaattatgacaaggacgtaccatttaacccaatacacttggtaagacatcttcagtttcactttctctggcttcatcatcttttaggttgccacatcctgggaaagggttgtatcattttatctcagatattcccaaggcaagaaccagtaccattaaaaccgtgaaaatagcaaagtttctcttcagtggcctataatctccccttaggctcctgcgtttccctatgtggctcttctgtccttgtccctcacccttgcaccataacaccttcattctgcctaagactcccaacagccaccctacctaagtcttgcttactctgagcaatgcctcaagttctagacttatttttctcccttcaacttaccaataatcttrttattatatattttaacaaagcttcattagctcattgttccaaaactctggtgaggaagataatacaggcattataattgaaatttttggaaaattggtcaagggtttttttcaacagacccatcagtggttttgaacttcattttttgacagcagaaacttccagttaaatcttcttctgaactccaataaataaaatgggtaacatttaagcagctcacgtagaaacacaggtatctgaattatgatgagataatactttagttttggggatttcaggcactatgggatagctgtccttttactttagaatcgatataattaacccattttaaatggcctgaacagataggaccttctcaacctaaaattatgtaccgcacttcaaagttctgattartgatgccaaatgagcaaactactgaacattattgtaatttattgggaagagtaagattttcagcttgaaaagtatccaactttgaatttttctaacacttcagaagtttactaagttatagttgcagtgctttttccatcagtaaaaggttagagaagttctatataagtaggacttcctttaagaaagaatgtagaaaaatgtattctcccaagttccaatacaaatggtctatcattttaatccctcttgcaaatactctaaaatccattgccccattggtccttcctgaaaagcctcaaacaatgaattatgtcaactctcagccttgcccctacctatacaagcagtagccaagccctattggaaaaaaatcatayggtttgggtagactgataccaataaaaattcagccaccaacctcacttgggatgtcaaaagtgcctggaaatattactgtattcctcaggttacctcattttgttattctccacagacactttttcagaatttctcttctcaaacttctaacttctcctctgcccattcattctcaatggatgcccttgcctcctgctgcacagaaaaaataaccatcacatgagaactccctcaatttcctgccatcaagtctgaaatcaggttggatctgcacccaggctctctttcttcctcccattacagtcctcgaagagtcctgtgaaaggtcagtcccttcaccagtgctctggatcccacttttctcccactttctctcacacgtaagtttgactccaaagtttctactagatccttctcaagagcttttaaacatggttttgtctctcccacttgaaaaagaaattcctttttgaatcccacgttctcctctagctagttaattatctcttgccttctttaatgtttcaacttcaacttctccactttcttaccttccattcaccctttactttttatttggtaacaatcacaagcttactgaaaagtgaaagtacagtacaaataattttcccctgaaacactcaagaataagttgtggacccttttctcccaaattctttattgtgtatttcctaaaattaaaggcattattctacataaccacaatacagctatagaaaacaggaaattcacattcatacattactaatgtctaatgcttagattctattcatatttcatcacatatcccagcaacatcccttatagcaaaaggaactggttcagaataaagcactacattttagttgtcatgccctctagtctccttcaggttggaagattatctcaatctttccttaactgtcatgactgatactcctaaagattacatactggttattttatacaaagcccctcaatttgggagttttctgatgtttcctcatacttagatttgggttgtacatctttggcaagaatatcatagaattaatgttgtgtttgcattatatcctatcaggtggtacccattatttatttggcccactactggtaatgttaactttgatcatttaattaatatggtatcttccaggcttctccactgtactcatcccatatgcacttgtaattaagaagtgttttgtgaggaggtactttgaagctatgtattgctcatcaaactttcaatttattaattcatttattcatacctgtgataactcaggatttttcatattattcaatgaattatagtttcttgctatttctgtttattttgatgctcaaattgttttgtaaacagtgactgactgccacttcaaggtggactttgcatgtttttgacatgtcctcatctttctctgagcactttttgtcttaataggatattccagtctcaccttgcactttccctgccctgtgcctggaatcaggcatttctctaaggaggctaatttcttttctcggcgtggtatttagaagccaagttctgttctcggcactaggtgtgttcattgctattggggtattgctattcccaggccctcatggtgaacagaggtaggaaatatacacatacatttatatatatatatacacacacacacacatatatatatacatactaatttctatcaatattcacctttttatctatttatatatcatctatctatctagaraaaaccatgagtttccattattacctccaactccagttcaacaccacagggttcattcttgttttctcctttttcatatttgtaactctcttctctgacaatgtaaaatcaagatccccttatcctttatatatttactccagtcacttgttaacctatttcattctggcttctacccccaatcactccgctaaaacagctgtcactatgttaccagtaatcaccattttactaaatatgacagacactttttaatgttcaccctacttgacttacagtaccatttgggatacttaactactcctaatcgtggaaaactctctttcactggtttctgtgatactacattctcttgatttttcttttacatctatagaaaatccttctctcttttgctggatctcctcctccacttgacctttaattgttaaagtcccacartcttaggccccattcatttctcatcacactcatcacaaattcccttggtttcaatgaccatttttactggtgacttaaaaatttaatctctgcccgtgaaacctcttcctaattccagacccatagatccatctgcctccttgccacttttagttgaattttttacaggcacctcaggttaacaggtctaaagctgaactcatccttcagcagtccctatattgataagaaatagagtaaacacccagagagttgcacatgccaaactaagacatgatgcatggcttttccatatcctttgcactctttatctgatcagtcaccaagtcttgtaattctacttcataaaaatattttgcatacagcagtccccattatccactgggggatgtgtttcaagattcccagtggatgtctgaaaccttggatagcactgaaccctatatatactatgttgtttgctacacatacatcctaagtaggtgtatatatttatgggrtgcaaaagatatcttgatacaggcatgcagtgtataataatcacatcagagtaaatgaggtatccattatctcaagcatttatcttttgtgttacaaacaatccaattatactcttttagctatttttaaatgtacaattaatttactattgactattgtcaccctgttgtgctatcaaatagtaggtcttattcattctttctattattttgtacccactaaccatccccatctccctcccacaccattcagccaaaccccactacccttcccagcctctggtaaccatccttctactccctgtccacatgagttcagttgttttgatttttagttcctacaaataagtgagcaagtgcaatgtttgtctttctgttcctggcttatttcacttatcataatgatctccagttccctccatgttcttgcaaatgacaggatatcattcttttttatggctgaatactactccattgtgtatatgtaccacattttctttatccattcatctgttgatggacaacttaggttgcttccaaatcttagctattgtgaacagtgctgcaacaaacataggggtgcagatttctctttgatatactcatttcctttctttgggatatatatccagcagtgggattcctggatcatatggtagctccatttttagttttataaaaactgactgttctcaaaactgttctccatagtggttgtactaatttaccttcccaccaacagtgtgctagggttcccttttgtccatatcctcactagcatttgttattatctgtcttttggatgtatgccattttaactggggttagatgatttctcattacagttttgatttgcatttctctgatgataagtgatgttgagtaccttttcatatacctggttgccatttgtatgtcttcttttgagacatgtctattcaaatattttgcccatcttttgatcagattattaggttttatcctatagagttgtttgagctccttatatattctggttattaatcccttgtgagatgagtactttgcaaatattttctcccattctgtgggttgtttcttcactttgttgattgttttctttcctgtgcagaagctttttaactttatgtcattccatttgtccatttttgctttggttgcctatgcttgtggggtattattcaacaactttttgcccaaatcaatgtcctgcagatttcccccaattatgtcttgtagtagtttcatagtttgaggtcttagatttaagtctctaatccattttgatttgatctttgtacatggtgagagatagggttctttttcttatttcaataggtttggggggaggaggtggtgtttggttacatggataagttctttagcggtgatttctgatattttggtgcactcgtcacccaagcagtgtacactgtacccaatgtgtagtcttttatcacccrtcttccatcctctatccctctcccacccttcccctcaagtccccatactccgttatatcattcttgtgcgtttgcatcctcatatcttagctcccacttataagagaacatgcaatgttcggttttccattcctgagttacttcacttagaataatggtctccacctccatccaggttgctgtgaatgacattactttgttcctttttatggctgagtattattccatggtatttatataccacatttgctttatcctcttgttgattgatggacatttgggctggttccatatttttgcaattgcacattgtgctactatcaacatgcatgtgcaagtgtctttttccatataatgacatcttttcttctgggtagatatccaggagtgggattgctggatcaaatggtasatctacttttagttctttaaggaatctacacactgttttccatagggttgtactactttacattcccaccagcagtgtaaaagggttccttttcactacatctatgccaatatctatgatatttttgatttttaaaattatggccattcttgcaggagtaaggtggtattacattgtggttttgatttgcatttcccttgtcattagtgatgttgagcattttttcatatgttttttggccacttatatatcctcttcttccttctactccattctctatattatatccaaagagatctttctaaggcaaatatgatttttgttactctctactacctttcagggtttttcaattgctactataataaagtccaaaattttagcaaggcctacaaaggcctgaattctctgacctctgcttgtccagccccatctcataccattcattctgcctctctctcttactctccttacgacacatattatctatttcatttccccatcgccacatacgtttgcccattcatcctgtagttttcaacttaaatgccaatgcctaaaaatggtcaaaatcctgacaccttcaaattaaattaggtcaccctgtgacagtctcccattgcactctgcattgctccttcatagtacttttctcaatttgtagttccacatttctttgagtatgtatgcaatagattccatgctccataaaggcaggggccatatctgtctttgttgttgtattctgccagttagcaccatgtttaactcgtgtgaatgaaaagtcaaaaggaaggaaaaaaggatggaatgctgatcctcacaatgacaaatgtttggatagaagatatctaagagtcaaacatttaggtgtatccaaaaactcatatatttggggtttacagaaatataggcaaacaatttttttttctcttaagtcagccatcagagcaatctgattggctggcttctaatcattwcattttgtgtcattcagaaatcgctttgtgattttgaaagcttttcttaattcagttgcttaaaaataaaattggattgtttcctggacacagcaggaaggtaatttaaagaacccatgaacattgttgaaattatcatgcaagcttattaaatgcaatgcatatttaaattgaaaaaactttctttattaaacctagataggtgaatttttacagcttcccgtgctaaactatattagttttcagagtcaggtcagattaatttctaatctttatggaaatcatttttattaaaaaagtggaaagttaagaatgtgacagttacagggtttggataattctaaaagggtcatcatttaaaaatgcaaggaaagtataatcggagtgctttcatgataaagatgatttattttatatactcatctttaaaagctgttttaatatttaggcttgttaaggaaaatctgaaatgtggttgaatgtattaaaacctaaataagagttttggcttttatttctttttataagagccgaccaagtaaaccacagtctgaacttagatgctaagaagaaaaagattaagggtatattttcatttttaatataaatgatcaatatatttgtttttatttgtggctatagtctacaattgtcaagtgagtattcatatttcttacaaaagaatattttacataattggaaattattagtcaatcatttgcatttcagattgtttcctttcttcttttttactctagctttgttgagacataattaacaaataaaattgtatacatttaagatgtacacagtgatgattttatacatatgcattgtgaagttattaccacaatcaagttaattaactcatccmtcacctcacatagttacttttgtgtgtgtgtgtatgtggcaaaaacacttaagatctattctcactgcaaatttcaagcatactcatattgctttaatttaaaggtcattttgttttcttgtggtaattggctcagagatgcacaaaaactctgcaaagaaacttcccaagaagataattgacaacagagtgggaggaagctgcttctttcctttgaatttggactgctcttggtgctcttaaaagttagaaaccaaaccacaaaggagtacaacacttttgtccttcaaaagagcaaggacatttgtctgtgtttattgatagattgcaagtggccaggaggttataacgtgtgagaactgacctttgaagcctcaaaaagaattaactatcctgacattctaggcctttcaaaccagtgattctatagaagtcctcactgaatggagatatgaatgaaaacagagattcaaatgtttacttttgagtatcaaacagagaaatttaggagttttccaagtacatgagaaaagattgactttgttcatagtcattagttttgtggactacgtaataattttattgtatatatttgaggtttataacatgatattatgggatgcacatagatagtagaatggttactatcgtgaaagaaattaaaatatctatcatctcatgttactttttgtgacaagagcagctaaaatctatctatttaaaaaaatcctggaggacccagtgagaagtcagccatccacaatctggaagagggacctcaccagaacctgaccatgttgcaccttgatcttggactttagccttcagaattgtcagaaataaatttctgctgtttcagccacccactctatggcatttggctattgcaacccaaggtgactaagacatttctctcccagcctggggtccactctcctctgacatgagaagatttkttttaagttaaaaaagcattattctgggaattgtgaaggacactccagatcccagggaggtgaatgctggcaaacagcccctatgatgtcatccagctgataaaagtgagtgaagcccaagtacacaagggggcagagagcttccctctgtgactcacttttccacagtggatctgaacaacctaggccaagggaaagcactttgttttgcccaagccctagagctaacttagaaagaggcttggagatgctgtgagagaaagataccaggaaaagctgcagatattttcccagacccaagaatgagagccagatgccatttttaatctgggtgcatacaaaatcagccattgcttggcaacctagaagtgtggccacacaagcattttagcctcaggccagagattggagcacctgctctggagtagggtaggggcctccacagccagaactacggaaagcacctcagcagaaggcactggaattgtgctctccccgactgcaatcccggattggtaggagaactgcagtttcccttgggaagtgagatttgcagccagggccagcttggcaacctgcatctggtctgtgtatgccattgctaagtgccccagcctgctcccctgaggtcatggtgcagcagagccctctccactccaccccaggcagaaattcaggtacttagaacattcacttacttggaccagaagcctgagctgctccacccttcctggacatagattttggtccagtagggccctctctgccccatgcccaggcagaaatctaggcatttagagcacctgcttgcctagactagcagcctgagccgcctcacccttcacggacataaattgaggtgccgcagggccccttccgctccacaccaaggcaaatctccaggcattcaaagcaactgtttgcctggttcagcaccatgagctgctgcaccctttctgggcacagatcatggtgtagtgaggctctctctrctccaagcccaggcagatctccaggcatttggagcaccaactcacctggattggcatcctgacctgccccatccttcctgtgcagagatcttggtgcagggaggccctctctgctgcatgcccagggagatctccaggcattcaaagcacctattcacctggtggctgcccactggattatcacttggcactggtgcttgtgcctgacattggaagatctgtaggtggacctgcctagtctggccccattcatcttgtcccccacaaccctagggctgagcagagttcagagcactctgcactgcatgaatcagtccattgcctgagagaacagagagtttctaccagtaaacaaggatgaaatatatatgcagccacattagctgtagctagctagctcttacctacaagcaccatctactggcttgtaggtctaactataaaacctgctaagagaagtgcatagaactatagaagcaaagccaaaagacagcccatacccagcattctctgcagtcacaccccctagggagggggagaaaaggaaagggaaattaaacaamccaaaaaaaaaaaaaaaaacagtaaggcctgggcatggtggctcacgcctataatcccagcactttgggaggccaaggggakcggtggggtggggagcagatcgcctgaggtcaagagttcaagaccagcctggccaacataggaaaccgcatctctactaaaaatataaaaattagctggacgtagtggcacacacctgtagtytcagctattcaggaggctgaggcaggagaatagcttgaacctgggaggcagagattgcagtgaactgagattgtactactacactctagcctgggtgacagagcaatactctgtctcaaaaaaaaaaaaaaaaaaaccaataatattataggtaaagaatgatgaagaaaaaacctactggcaaggaaataattacaaaaattagaagtgccaacatctccagatgagaaggaaccagcacaagagttttggcaccatgaaaatctgaatgtagcgacagcttcaaaggatcacactagcaagtccagcaatggttcctaaccaaaacagaaattcagaaattacaggtaaagaattcaaagcacaattacaaagaagctcaatgagatccaagacaaggttgaaaatcaacacaaagaaacttctaaagcaatccaggaaataaaggaagagattaatatgctaaacagaaatcaatcaaagcttctggaattgaaaacacactcaagtaatttcaaaatacagttgaaattcaaatacaattgaaagctttattaatagactagaccaagccgaagaaagaatttccaagcttggagaccagtcttttgaactatgccagtctgacaaaataaataaaaaagaatgataaaaaaatgaacaaagtatttgagaaatatgggattatatatagcaaccaaaatgtgaatttttggcattctgggagaggaggagaaaaagcaaaaacctggaaaacatttgagggaataattcaaaaatatttctttaatcttgctagaaaggtttatatccagatataagaaaagcagaaaacacttgagaaatactatacagaatgaacatcaccaatgcatgtagtccgcagactatccaagatcagtgctaaagaaaaaaatcttaaaagcagccagagtaaaaggtcagattacttacatagagaactccatcaagctaacagtagacttatcagcagaaaccttacaagccaggagagattaggggcctgttttcagcattcttaaagaaaagaaattccaaccaataatttcatatcccacaaaactatgcttcataagtgaaggagaaataaaaacttttccagacaagcaagcactgagggaatgtgttaccactagaccagccttaaaagagctccttaaggaacacagcaatgaaagaacaatacctgctgccacacaaacaccctccagtacatagcccacataccctataaagcaagtacacaatagaaactacaaagcaaccagttaacaacttcaggataggatcaaaacctcacatgtcaatatttaccttgaatataaatggtctacatgcccccacttaaaagacacagagtcacaagttggataaaaaaacaagacccatccatctgctatctttaagagactcatctcacacataatgacacccagaagctcaaagttaagggytggagaaagatctaccatgcaaatagaaaacaaaaaagagcaggggtcactattcttatatcagataaaacagactttaagccaacgacagtaaataaagacaatgaaggtcattacataatgataaagggtccaattcagcaagacttaactatcataaatatacacacacccaacattggggcacccagattcataaaacaagtacttctagaattattaaaagacttaggcagctacacaataatagtatggttcttcaacaccccactgacaacattaaacagataattgagacagaaaactaacaaattctgaacttagcttagacactcaaccaattggacctagtagacatctacagaatactctacccatcaaaaacacaaaattcattcttctcatctgcacatggaacatactccaagaggaaacatatgctcagccttaaagtaaatctcaataaattcagaaaaattgcaatcataccaccatactcttggaccacagtggaataaaaatagaaatcaaattaccttgggcagtatggccattttcacgatattgattcttcctacccatgagcatggaatgttcttccatttgtttgtatcctcttttatttccttgagcagtggtttgtmgttctccttgaagaggtccttcacatcccttgtaagttggattcctaggtattttattctctttgaagcaattgtgaatgggagttcactcatgatttggctctctgtttgtatgttgttggtgtataagaatgcttgtgatttttgtacattgattttgtatcctgagactttgctgaagttgcttatcagcttaaggagattttgggctgatactgagaagatctctcaaaactgcacagttatgtcaaagttaaacaacttgctcctgaatgacttttgtgyaaacaatgaaattaaagcagaaatttaaaaaaaatttttgaaataaatgaaagcagagacaggacatacccaaatctctaagatgcagcaaaagctatgttaagaggaaagtttatagcgctgaatggctacctcaaaaagttacatctcaaattaatgatctaacttcacacctagaggaaatagaaaacaagaacaaactagccccaaagcaaccagaagaaaataaatgactaaaaycagagcagaactgaataaattaaactcaaaaatccaagcaaagaattaacaaaaccaaaagttagttatttgaaaggataaaaaagatggatacaccactagctagattaaaaaataaaaaagggagaagagccaaataagcacaatcagaaataacaaagataacattacaaccaatcccatagaaatacaaaagatcctcagagactattattaacacttctactcacacaaactagaaagtctagaggaaatggatacattactggaaaaacataacctcccaagactgaacaaggaagaaattgaaagcctgaacagatgaatatcaagttccaaaattgaagtagtaataaaaactctagcaaccagaagagccccaaacagatggattcacagccaaattctaccagtgtacaaagaagagctggtaccaattctactgaaactattccaaaaaatcgaggaaagtgactcctccctaactaattctatgaaggcaacatcaccctggtaccaaaacctggcaaagatacaacaacaacaacaacaacaayaacaacaacaacaacaaactacaggccagtatccctgttgaacatagatgcaaaaattcccaacaaaatactagcaaactgaatccatcagtacatcaaaaagctagtgcaccacaatcaagtaggcttcatccctgggacgtaagagtgattcaacatatacaaatcaatagatgtgattcatcttaaaaacaaaagtcatatgaccatctcaatagatgtggaaaaagctttttataaactccaaaataccttcatgataaaaaaaaaaaaaaccctcaagaaactaggcatcaaaggaacatacatcagaataataaaagcratctgtgacaaactcacagccaacatcatactgaacaggcaaaaactggaagcattccccttgaggactgtaacaagacaaggatgcccactctcaccactcctatttaacatagtactataagtgctagccacagcaattaggcaagagaaagaaataaaaggcatccaaataggaagagaggaactcagactatctgtcttcatggatgttatcattctatacctagaaaaccctaaagactctgccaaaaggctcctggaactgatacaggacttcagtaaagtttcaggatacacagatcaatgtacaaaaataaatagcatttctttttttatttttattttattattattrtactttaagttttagggtacatgtgtacaatgtgcaggttagttacatatgtatacatgtgccatgctggtgtgctgcacccattaactcgtcatttagcattaggtatatctcctaaagctatccctccccactccccccaccccacaacagtccccagagtgtgatgttccccttcctgtgtccatgtgttctcattgttcaattcccacctatgagtgagaatatgcagtgtttggtttttttgtccttgctgtagtttactgagaatgatgatttccaatttcatccacgtccctacaaaggacatgaactcatccttttttatggctgcatagtattccatggcatatatgtgccacatttttttaatccagtctatcattgttggacatttgggttggttccaagtctttgctattgtgaatagtgccacaataaacatacgtgtgcatgtgtctttatagcagcatgatttatagtcctttgggtatatacccagtaatgggatggctgggtcaaatggtatttctagttctagatccccgaggaaatcgcyacactaacttccacaatggttgaactagtttacagtcccaccaacagtgtaaaagtgttcctatttctccacatcctctccaacaccggttgtttcctgactttttagtgattgccattctaactggtgtgagatggtatctcattgtggttttgatttgcatttctctgatagccagtgatggtgagcattttttcatgtgtcttttggctgcataaatgtcttcttttgagaagtgtmtgttcatgtccttcgcccactttttgatggggctgtttgtttttttcttgtaaatttgtttgagttctttgtagattctggatattagccctttgtcagatgagtaggttgtgaaaattttctcccattttgtaggttgcctgttcactctgatggtagtttcttttgctgygcagaagctccttagtttaattagatcccatttgtcaattttggcttttgttgctattgcttttggtgttttagacatgaagtccttgcccatgcctatgtcctgaatggtaatgcctaggttttcttctagggtttttatggttttaggtctaacgtttaagtctttaatccatcttgaattagtttttgtataaggtgtaaggaagggatccagtttcagctttctccatatggctagccagttttcccagcaccatttattaaatagggaatcctttccccattgcttgtttttctcaggtttgtcaaagatcagatagttgtagatatgtggcattatttctgagggctctrttctgttccattggtcaatatctctgttttggtaccagtaccatgctgttttggttactgtagccttgtagtatagtttgaagtcaggtagcatgatgcctccagctttgttcatttggcttaggattgacttggcaatgcgggctcttttttggttccatatgaactttaaagtagttttttccaattgtgtgaagaaagtcattggtagcttgatggggatggcattgaatctataaattaccttgggcagtatggccattttcacgatattgattcttcctacccatgagcatggaatgttcttccatttgtttgtatcctcttttatttccttgagcagtggtttgtagttctccttgaagaggtccttcacgtcctttgtaggttggattccaaggtattttattctctttgaagcaattgtgaatgggagttcactcatgatttggctctctgtttgtctgttattggtgtataagaatgcttgtgatttttgtacatggattttgtatcctgagactttgctgaagttgcttatcagcttaaggagattttgggctgagacaatggggttttctagatatacaatcatgtcatctgcaaacagggacaatttgacttcctcttttcctaattgaataccctttatttccttctcctgcctaattgccctggccagaacttccaacactatgttgaataggagtggtgagagagggcatccctctcttgtgccagttttcaaagggaatgcttccagtttttgcccattcagtatgatattggctgtgggtttgtcatagatagctcttattattttgagataggtcccatcaacacctagtttattgagagattttagcatgaagcgttgttgaattttgtcaaaggccttttctgcatctattgagataatcatgtggtttttgtctttggttctgtttatatgctggattacatttmttgatttgcgtatattgaaccagccttgcatcccagggatgaagcccacttgatcatggtggataagctttttgatgtgctgctggattcggtttgccagtattttattgaggatttttgcatcaatattcatcaaggatattggtctaaaattctctttttctgttgtgtgtctgcccggctttggtatcaggatgatgctggcctcataaaatgagttagggaggattccctctttttctattgattggaatagtttcagaaggaatggtaccagttcctccttgtacctctggtagaattcggctgtgaatccatctggtcctggactctttttggttggtaagctattggttattgccacaatttcagagcctgttattggtctattcagagagtcaccttcttcctggtttagtcttgggagggtgtatgtgtcgaggaatttatccatctcttctagattttctagtttatttgtgtagaggtatctgtagtattccctgatggtagtttgtatttctgtgggatcggtggtgatatcccstttgtcattttttattgcgtatatttgattattctgtcttttcttctttattagtctggctagcggtctatcagttttgttgatcctttcaaaaaaccagctcctggattcattaattttttgaagggttttttgtgtctctatttccttcagttctgctctaattttagttatttcttgccttctgctagcttttgaatgtgtttgctcttgcttttctagttcttttaattgtgatgttagggtgtcaattttagatctttcctgctttctcttgtgggcatttagtgctataaatttccatctacacactgctttgaatgtgtcccagagattctggtatgttgtgtctttgttctggttggtttcaaagaacatctttatttctgccttcatttcgttatgtacccagtagtcattcaggagcaggttgttcagtttccatgtagttgagcggttttgagtgagtttcttaatcctgagttctagtttgatggcactgtggtctgagagacagtttgttataatttctgatcttttacatttgctgaggagagctttacttccaactatgtgatcaattttggaataggtgtggtgtggtgctgaacaaaatgtatattctgttgatttggggtggagagttctgtagatgtctattaagtctgcttggtgcagagctgagttcaattcctgggtatgcttgttaactttctgtctcgttgatctgtctaatgttgacagtggggtgttaaagtctcccattattattgtgtgggagtctaagtctctttgtaggtcactcaggacttgctttatgaatctgggtgctcctgtattgggtgcatatatatttaggatagttagcccttcttgttgaattgatccctttaccattatgtaatggccttctttgtctcttttgatctttgttggtttaaagtctgttttatcagagactaggattgcaacccctgcctttttttgttttccatttgcttggtagatcttcttccatccttttattttgagcctatgtgtgtctctgcacatgagatgggtttcctgaataaagcacaccgatggatcttgactctttatccaatttgccagtctgtgtcttttaattggagcatttagcccatttacatttaargttaatattgttatgtgtgaatttratcctgtcattatgatgttagctggttattttgctctttagttgatgcggtttcttcctagcctygatggtctttacgttttggcttgattttgcagtggctggtgccagttgttcctttccatgtttagtgcttccttcaggagctcttttagggcaggcctggtggtgacaaaatctctcagcatttgcttgtctgtaaagtattttatttctccttcacttatgaagcttagtttkgctggatatgaaattctgggttaaaaattcttttctctaagaatgttgaatattggcccccactctcttctggcttgtagagtttctgccgagagatcygctgttagtctgatgggcttccctttgtgggtaacccgacctttctctctggctgcccttaacattttttccttcatttcaactttggtgaatctgacaattatgtgtcttggagttgctcttctcgaggagtatctttgtgccattctctgtatttcctgaatctgaatgttggcctgccttgctagatttgggaagttctcctggataatatcctgcagagcattttccaacttggttccattctccccgtcactttcaggtacaccaatcagacgtagatttggtcttttcacatagtcccatatttcttggaggctttgttcgttyctttttattcttttttctctaaacttcccttctcgcttcatttcattcatttcatcttccatcactgataccctttcttccagttgatcgcatcagctcctgaggcttctgcattcttcacgtagttctcgagccttggctttcagctccatcagctcctttaagcacttctctgtattggttattctagttacacattcttctaaatttttttcaaagttttcaacttctttgcctttggttttawtttcctcctgtagctcggagtagtttgatcgtctgaagccttcttctctcaactcgtcaaagtcattctccatccagctttgttccgttgctggtgaggagctgcattcctttggaggaggagaggtgctctgctttttagagtttccagtttttctgytctgttttttccccatctttgtggttttatctacttttggtctttgatgatggtgatgtacagatgggtttttggtgtggatgtcctttctggttgttagttttccttctaacagacaggaccctcagctgcatgtctgttggagtttgctagaggtccactccagaccctgtttgcctgggtaccagcagcagtggctgcagaacagtggattttcatgaaccgtgaatggtgctgtctgatcattcctctggaagttttgtctcagaggagtacccggccgtgtgagatgtcagtctgcccctactggggggtgcctcccagttaggctgctcgggggtcaggggtcagggacccacytgaggaggcagtctgcccgttctcagatctccagctgcgtgctgggagaaccactggtctcttcaaagctgtcagacagggacatttaagtctgcagaggttactgctgtctttttgtttgtctgtgccctgcccccagaggtggagcctacagaggcaggcaggcctccttgagctgtggtgggctccacccagttcgagcttcccagctgctttgtttacctaagcaagcctgggcaatggcgggtgcccctcccccagcgtcgctgcagtcttgcaatttgatctcagactgctgtgctagcaatcagcgagactccgtgggcgtaggaccctcgaagccaggtgygggatataatctcctggtgtgccgttttttaagcctgtcagaaaagcacagtattagggtgggagtgacccgattttccaggtgccgattcacccctttctttgactaggaaagggaactccctgaccccttgcacttcccgagtgaggcaatgcctcgccctgcttcrgctcgcacacggtgtgctgcacccactgtcctgcgcccactgtctggcactccctagtgagatgaacccagtatctcagatggaaatgcagaaatcacccatcttctgtgtcrctcacgctgggagctgtagaccggagctgttccacctcaataagtagcatttctatataccaataatgttcaagctgagagccaaatcaagaatacaatcccatttatagtagccacaaaaaaataaaatacttaagaatacatctaaccaaggaggtgaaagatctctacaaggagaacttcaaaacactgctccgakaaatcatagataacacaaacaaatggaaaaacattccatgctcatagattggaagaatccattgattcaattgaacaaggaaaaaacaaataatcccattaaaattgacaaaaaacattaatgatagactggataaagaaaatatggtacatacacaccatggaatactatgcagccttaaaaaagaatgagatcatgtcctttgcaggggcatggatggagttgggagccattatcctcagcaaactaacacaggaacagaaaaccaaatactgcatgttcttatacataagtggtagctgaacaatgagaacacatggacatgggggggaacaacacacactggggactattggggtgtggggaagggagatcatcaggaaaaatagctaatgcatgtggggcttaatacctaggtgatgggttgataggtgcagtaaaccaccatggcactgtttacctatgtaacaaatctgcgcatcccacacatgcatcccggaacttaaaataaaataatgctttttwaaaaaaagggcaaaagatatgaatagacacttctctaaagaagacatacaagtagccaacaaacatatgaaaaaatgctccacatcattaatcatcagcgaaatggaaatcaaaaccacagtgagataccatctcacctaagtcagaatggctgctatgaaaaagttaaaaaaaataacagatgctagtgaggctgtgaagaaaaaggaacacttatccactgttggtgggagtgaaaattagttcaaccactgtggaaagcaacttggagatttcttaaagaagttaaaacaaaactaccattcaatcaagcagtcccattactggggatatatacaaaagaaaacaaattgttctaccaaaaagacacatccacttgcatgttcatcacagcactactcacagtaacagagacttgagatcaacttagatgyctatcaatggaggcttggataaagaaaatgtggtacatatgtaccatggaatactatgtagccataaaaaaagaactaaataggccgggtgcagtggctcatgcctgtaatcccagcactttgggaggttggggtgggtggatcaccaggtgaggagatggagaccatcctacctaacatggtgaaaccctgtctctactaaaaatacaaaaaaattagccggacgtggtggcacgcacctgtaatcccagctactcaggagactgatgcaggagaatccctggaactcgggaggtggaggttgcagtgagctgagattgtgccactgcactccagcctgggtgacagagcaagactccacctcaaaaaaaaaaaaaaaaaaaaaagaactaagtattgttctttgtagccacacggatggaactggaggccattatcctaagcaaactaacacaggaaagaaaaaccaaatactgcatgttcttgcttataagtgggagccaaacattgaatactcagggacataaagatggcaacaaaagacactgggaactactatagggggaggaagagagggagaagggttgaaaactagctgttgggtagtatgctcagtgcctggattacaggatcattcataccccaaacctcggcattatgcaatgtacttaggtaacaaacctgcatgtgtacctcctgaatctaaaataaaaggtaaaaaaactttttaatgaaataaaaaataaaaaattattaatacagtacaattatattaactatggtcctcatgttgtacattaaatctctagacttgttcatcctgcatatctgctactttgtgtcctttaacctgtatcttcccatttcctctccccaaccccactccataaccactattttattccctaactctgtgtgtatgtgtgtgtgcatatatatacacacacatgtgtatatagacatatatgagtatatattcacatacatatatacatgtatatctatatgtatgtgtatatatgtatatgtgtatatatacatatatatatataagattccacatataagtgagatcatagagtatttacctttcagcacatggcttattccacttagcgtaacatcctccaggttcacacatgtgtagcaaatggcaggatctccttcttttttaaggttgaatagtattttattgtatatatactacattttctttatccatttgtctgtcaatggacactgacagtgtttccttacattgtagccactattttttatgtcgttactttgatttaatgttaatctcagacaagtgccgatgaattagcaccaccctctttcctgcctcttttttgatccacattagcacctagcatgcagctttcccacacacaactgtaagctccaataatagaatcttagcttagtaaatgccyatccatatgccagcttagcaaatacctatcattctgcatcttttgccagcaccttgaattaaacacaaccaaaaccaaacataactcatcctgacttcctggtttccctcaatgatgccaacatttttctagtcactcagactgaaaatttcagatacttttatgttcatcagtaatttatttaatcaaagtatataaagctcaagtttgccctgagctatgcagagtactcaataaatgtttgttaaatcaattcatgaaataatcctacagatatttattgagtgcttatgtgctagaaatgtgtgaaagagaaaaaaaggattaagacctagttcctgccttcatcaacttacaatatagtgggaagaataatgcatatgtataaaaactacaataaaagatkgtatgcaataacaatcataatatatgtgtaaacaaaactctataatagtatagaagaggagraggtyatccctgccttggagcatcttagaccatggactgttgcctgaagaaggtgtcattcaagcttcaagtggaaaaatcatttgtgcaggtagagataggctgtgggaaaggccttgaaaaagaaagggaaaacattgtagagccccaaaagcatgaaaagaaggtgattctactaaatagaatagggctagcagtcaaatttgtctgtagcaaaggatgcaagctggagaaccgtgaaaaccaaagtcaaaaaagtaacaattggggcttggttagagagagtttagatttctaggctaaggattttggacttcagtgtgctttggtgaactatgaaatatttttatatgtagtgtgtgaccagagctgtgctttgtgcagagaagagtaaccaatatgttaagggtaagcaaacaatgtaacatgagcaacatttgtaggactcaagggtggctagatgaagaaaaatttaattgagattaaatagctatcttcaatgatctgagaggctgaccagtagaaaagagagtatgataatttttggcagaattaaasgacacaaataaatctaattggtgaaagaagatggacagcagatttcagttcaaatcaacaaattactttctaatatggctgcgtaaatatagaattgactggctttgtgacgtatagctgaacttttgggaaaatattggaaaggtaggaagtttgtatgtcaaagtgaggggctggccagatgaattttaaagttttcccaagccctaagattctgttgttctagcttatagttgtatgtgggatgtttaaaaagagaacagagcatttgtgaagccgatgaggaggcttttgtgagactcaagacaaaagatggtgaagggccagataagtgtattggaaacagaggcagtcataatttctaacagttatgtaatacttatgtacccagcactatatgtaatatatgtaagcactttacatatattgactcatttgttccttgtaccaacscgattttatagatgggaaaccaaagcatagaaagatttagtgagatgctcagggtcccatagttaatcgatctctgagctaggattcgagaccaggaaatcaggctttagagtccgtactcttaatcactatgctatcctggccttccagagagagagaaattgaagaagtgttraaaacagaagaactgaaagatgtagttggatatgagcataaggcaaaaggaaaatgaaagcgtaatgccaaatatcctaaccttggaaactaggactattatcacgatattaacaaaaatagtaaaatcagactggatgtggtggctcattcatgtaatcccagctacttgggaagccaaggcaggaagattgcttgagcccaggagttcaagaccagcctgggcaacatagtgagacccaatctctacagaamattttttttaattagctgggcatggtggcatgtgtctgtagttccagctgctcaggaggctgaggcgggaggattgcttgagcctgagaggtyaacgccaccgtgagccatgatctagccactgcactccagcctrggcaacggagtgagaccctrcctcaaaaaaaaaaaaaatagtgaaatcaggataaagaactgattcatgagtmgagattaaaatgtaggttataaacatgttgagtttaaaggtgccggtggcttagccaggtagaaatgcgtagcatgcatgttatttgtgaaattgagagtgagccaaggactttaacttcgtgtaaatgtacctagattgatatactacctcctcatagctttcctacagtacattgtaacctcactagaatgtcgatagcataagacaaggatagacataaagtcaaatactttactccattattaatccttagaagaatgggtgtggcgactcataggaaacatatgtctkaagacaaaatatatgtcttaaagttcagatgacactaataaccatagagccttgatgattgccatagagtaaaactataaatttttttaaaactaartgtcttaaatgacactaaactatgcattgaaatactatataaggacatttatatgccttttttcttcatcatgctgaggattttgttgactctgggttctttaygtttcttttctcccctgtcatgcttatttataagggtaaaaataaactgttggtgcatggtctgttgggctatgatggcagctttgtaaatatgtatgcagcccctgcccaggtctttgacagaaagctgctttccatgcctttgtaatgccttgaacacaccttctgcattcaggatgcagaagcctaccaccgttgcaaaggttgyctgatgattgctagtatcgtctctcttgtggactccarttagagttagygttctaaagcatggtgagcccttagcaatagtgttgaatgggatggggaagacaagtctgtgagctctttctcatttagagtaagacttttagtctkcgtgaagtgttcttccagcatacagctttggctttgccactgaagtatgctatcagatttgcttggggacttagacgtgtayttgaagatctttggtttgtagagtttctttgctaagttgggaggcttattgccttagaataacaccatgtaggtaatttagatgtgcrttaaggggactaacaaaaattcattttgaggagagctaatgtcagaattttctgaaaaagggaaagcaggtcaaatatcattcakaaaagggagaaaaaattctgcctggtgcaattttaacatttttaccaaattatgcccaagaatgttaaactttatatacgaaaagtagctttctaacttaccaagaaatagttcttaagtagccactcttagacaagatgcagtataattgttcyagtagtagttttataaatgatatacactatatagtgtatatagttttataagtgagagcactgttttactgatgtctaagacatrcatttcatgcctctgtgaggcagttaagcttgcccttttaggtggtcacaaactgcacctagacggcaattatgataagaaagtctaagtgaaaagctgtagataaaccaaaacaaactctgccatggctgagcaatcccatggcctacyactcatgacagatcatgagccktaaaagttaatatttgcggggctgggcacagtggctcatgcctataatcccagcattttgggaggccgargcaggtggatcacctgagatcaggagttcragaccggcctggccaacatggcaaaaccccgtctctactaaaaatacaaaaattttctgggtatggtggtgtgtacctgtagtcttagctactcaggagactgaggcaggagaatcacttgaacccaggaagtggaggttgcagtgagtcgagatcacaccactgcactccagcctgggtgacagagtgcgactccgtctcaaaaaaaaaaagttaatatttgctcctttagggttgggttttaccctgacaatctggtacctaatgggtcaaatgataagcaaatgtctagatttcaacattctttggcatttgaggatactatttggataggcaaaagtgtcaggtttataatcaaaggattgaaacaygctcttgcagtctgtagctacaaatgagtagaagttcacctcatcttcaatagtttgagcttctgatcactaagctaaccaaaatgtgacatctagagttagggagaatattttatttagcaagcaaggaaacaggatttattccaaaggaaagattctgtatagtgaaaaggccaactgacttattttatcgaattcaaaagttgtaagtcaggcatggatttttctgtcttgtcaggttattcagacctaccaaagaacagttaaccagttcctttataaaggaaatccaaaaccatgtgacagtcaagatccatgaaacattaagctcaaagtcattacaacttttgatcttcacatgctagattccttgggatttttgttcttatccatcaagaatttgagaatcctctcaaggttttatataggctggagtgtgtcgctgttgttaygctgcttgtatgttgctatttgttcagttaaagctagctgacattttgtatcattttgaatctcttcagtttaattgttcagatttaagatagtattaaaactactaagatacattgaagcatcattgtaaagctgaggctgagggacaagtattatgttataggttttctgtgttaaaatgaggagatactattatacttcaagcatagaaaacgtgatacttatcccacagtaaarccaaatctttatcatagcaaggtacttgtaaagattggttagagatggtatttaatttaaccatatgcaataaaacagatatgatacctcatcaactaatatgttcttcwaattacttttagagaaatagacaccaaaaatatgtgtgtgcatgcatgtatatatgtgtgcatgtgcatgcatgtgtgcacgtgtgttctactgatataaagttaacagtgacttatagtagtcctactttctagtagaatatttactactgagaaatggaaggagttgaaatcagtaaaatgaaaatgatccaaatacttggtgaaacaacacacagtmcacaaacttttgtttgtaataatgtttactgttattagttgaatcattgcttgattttagtgaaatttttggtrtacaccaaaatttttttcagcccttaaacaaacagcttgagctggcactgcctacacttgccaatataaccttacttttttttcttactgttatttctaatattaatcatacaaaacaatgagaaaaatcctcatagtttagtttccccaacaaaaattgcagtaaagtctaagaaagagagggtctctgtctattcaggctcattcattctctgttcttccctgtgctttccctttcagcctaatttactctgatctttaattgattctaccagatgctgggcaagtgaatatgtaataatttcttaatttttatgaatttttacatcagaggtgtcttttccttgtttagaatgccatattttaatcttgaaawttttacataaatgtatactttagaaactgataaccagatttaatcttttggggtgccaaatatgatcaccatctaatattggagaaggcagaggggtcaagaataacagagtttacattactagaaacttttgcctaaaaagtaaatctcagagaagtggttctgagggaggctctgaaggatttactgtttaatcaaattgttctttgtcagcatgcaacaaagaagtgttccagttgtatctgagttcaatttatacaagtgttgttcattgttgacatgcataaagaaacttattaaaaatgaaatgtctcaatagaactttaaagtgtctgcctatatttttcatgttcttttccaatacatttgcacagaagaatgtttatattttagcattcttttgtcatattttgtagcctgtaatgttaatgtattttcaacaagatagaaaatattacacaggaaatagaactattcatgagacaaatgtattagagmaaatatcatttctatcttgtttataaattatacaattgccagcatctgtttyctgttagttcttcacccacaccaaccccactgctgattataggaagattgggattgaaaaacatcttagaatcagtccagaaactctatttggaactggatgcaattgcagaaatgttgatgcagttcaaaatgaggaatgcttattgcttaagatctgcttctccatttgtagtaattcattttgtagaggattccctcattcatgaggatattgcttcccacctggattcttactgtgctgaatcctatccgactcgtggttgtggtttgtatctgtggagggtattgtgtaagagttaggttaagtaatatctccagttatttattcaatagaacagtcagttctaaagacagttgttttttactgattctctttttcttttgtaaattattatgaaatatttcagacatgtaagataacataatgaacagctgtaaacccactactttgctttaaaaattaataaatacaaacaaagtccctatgtatacttttgtgatcccatctgcctctcttctctgcagcagaaaccactatcctcagtctattcattgtcatacaatacacatgtttaggcttttccaaatatgtatatatccataaaatgtatttttctacatgtgtttaaatttcatatgaataacttgctttcctccttcatcattatgtttctraagtttatccatattcaggcatggatctctaccttattcaagttaactgctatattttttgcactgcataaatatactaaaatttatatatcctttcccattgatggatatttaggttcagacagacatacacaccccctagtattaataggtatgcttcaaaatgttcttggatattcttggccttttctgtttcatatagattttaggatcatgtttcaagctctatgatgggatatttaccagaattacattgaatttatagagctagtacagaaaaattgacattctaatgatattaagccttgtgagccatgaacacagtatatctttccattgattgggtctttttatgtgttcttcaataaagttttaaaattttatgtaaaggagtatggaaccttttttttgctatatgtgctattatttttaatggaaccttttatttagaaaaaaaaagtacgtgttctaatttgctgtccccratatctaggcatgctattgattttttccttttgattttacatccagaaaccttgtagctttcatagtttacctgtatgttcaattttayctcttccttttcaggcattccaattttttatgtctttggttgcctttttgtgctgactaagatttccaatacaacattgagttagaagctgtagttaattctagtacttcttctgacattaaaaggaatatattactctgtttctgtactaaatatgatgcttactataggattttggtaaatcacctttaccatactcagtaagctatcttttagccatgtttttctaggagattctatcataaataggaactaaattttaaatggtactctttctacatataataataaaattataatttttctttaatcattatgaaatgtgtgaaagtaaaatggaataattcagtggtgaattacattgatagatttttctaaagttaaaccatcctagcattcatgcttatttggctgtgacttctatatactggtgtacgcatgtgtgtgtgtatgtgtgtgcatttttggtttgattaccagatattttcttgaagatttttgcagccatgtttataagtgagattggcctattaagaaatcagttctagagctggacaaggtggaacacacctgcagtcccagatacttgggaggctggggtggaagaatcacttgggctcaagagttcaagtccagtctgggcaaaatagagacatcccacctttaaaaaaaaaaaaaatcattttctccttttcttaccctattttggaactgttttggaactagattatattcttataaaatgattcaagatggtttcccttttttcctgttctctggtatagtttaaaatagagattatctgtcctttgaaaatttgacaaaatacacctgtaaaaccatctgggcaattttcaatgtttttaatgtgtactcaggttttctatttcttctcacgtccatttgttttctggaaaaacatctactttatctaaggtttcagacttacttgcataaagttgttaatagcagtctctaatttatttttgaattttaatctttaatgtttatttgtattctttcttttccttttttctagctctattaccttgccatgggtttctctattttttatattcatctcaaagatgcagattttgattttgttgatcttctctgttgtttctttgtttccaatttcattaacttctgctcttggctttgttgtgtccttcatctacttatatgtagtcctttttctaaatccttgatttggacactttgctcattagatttcaattcttcttcttttctactacatgcatttcaggctgtaaatttcctctaagttactgtctaagctgcatcccacaagtttttgtaaatagyatttcattgttactcaatttctaattccaatgtaatttttgaaacataattcatgaattmtttttaagtgtgtttttaaagaacacctttctgggatttttcttttgttatctttttgtttattgatttctaattttactgcattttgtgaagcagaataatccatatgctgtggaatctttggcatttattgagtcttgctttgtagatgaatctttgtcagtttttgtgggttattctgtgtgtgcttggaaagaacatgtattgtatagtcatagctttgaggtcctatatatgtccattaagttaaagttgtactgcctttgagtgatgatgactttatttattccttttcagtgtttatacaagtttcctttttcttgcataatttcattggctaggacctccagaattatattgtgtagaartgatgatcataggcatcttttctcagtcttaataacacaaaaaaagattttaacatctcactattatggtgtttgctatggggtgttgtagctactctttatcaaatttaaagttccttttagtcttagttttaaaattaaagttgaaagttccttttaattacaagttaacttaaaatttccttttagtcttagtttgctacaagtttttatcataaatggatgtttagtattttatcaaatacctattatgtatctattgagatgataatttgatttttctcttttattccatatatgtgatgaattacatttgttaattttcaaaygtgaaagcaatcttataatatattcctagaataagcacaaattggtcatgatattatttcttgttatgtaatgctagatttgctatgttaatttttgtttaggatttttgtatccatgaatgagatcttcatgagaaagactgkcatatattttttaaataatatccttcagaattttatatcaggattatgttgacctcataaggcatattgttaagagtttcctcttttctattttttggaaaagtttatttaagattggcaatttttctttcttaaaagtttggtatatttacaaatgaagtcatctgagactggaattttctttgtggtaatgttttccattatggattaagtttctttawagaaactattcagtttccactttttcttgtagtttattaagttgtattattctagaaatttgttcataaaaartttcagatgtattggcaaaaagctgttagtaatatygtcttaggatgttttatgtttgtactatgtatagcaatgtcatactttttattcccgatactgtttatctgggtcttctgtattttcatcttgatcagtctccaccrggagtttatcaattttattggtctgagccaatcatcaagtattgactttgttgattctttctgtagtatatttattcctattgtattagtttcagctcttataattagcattttcttccttctactttcttgtatacattggttttctttttctgatttctwagaatcgatacttaggtcatggtttttcagctcgtttttctttctaccttataaatttttctgtacacatggatttagttatattacacattttcattcatttccatctcttttctaattttcatgatgatgtcttattcgtttaatgttttatttgaaagtatatttcttgatttccaagcatgtatggatcttagattcatctgctattacaaatttcaaatttaatttcatactgggcttaaaatatcctatgtatgatttcaatacttctaaatatatcaagacttgctttagagcctagcacgtggtcaatatttgtaaatgttctatatacatttgaaatacattatgtgtattttgtagtcatttatggcagtgttttgtatgtatcaattagatcaaatctgttaaccatgttgctcaaatatttcatattctttctgatttgtttgcttgctctatcagttggtgtgagaggggggctgtaaagtctctgactatgattgtgaatttgtccttttccctttcttcttctttcaattttgcttcatttatttggcttactgctttcttcagtgttgrgttttgtttgtttgtttgtktktttgagacagggcctcactctgttgcccaggctagagtrcagtggcatgaacatggctcactgcagcctcgacctcctgggctcaagcaatcctcccacctcaacttcttgagtagctgtaggcacatgccaccacacccagctattttttgtattttttgtagagatggagtctcactatgttgcacaggctgttctcaaactcctgcgctcaagtgacctgcccacctcacccttccaaagtgctgggattacaggtgtatgccaatgtgcctggccaatgttagaaatgtattagccattatcaattcaatttttttttctgattccatgagactgaaaaagctctactcagcctctgagccttctagctccctctagtataattgacagatgctgctataggaaaagcatccataaatgtcaggctcttctctctgggttttctttttcttctggaacttggcacagtaattctttactgttttgtgaactccactaactcccaaaagatttaaaaatatattttgtttagattttctagttctcatcagaagggaatagtaaaaattacttaggtccckattactagaaacagaattccacctttatgttttcatatgcatacttgacaaagtaccagttacctaactcccgaataatataaggctttccaaatatttcattcaggacactccatcttacatattattaaacgatagtattttatttctacattgtttcctagctccagattttttattattattattttatactcaatagtcagtacttctttgtcatctctctgggctagtgggtacagtttattactcaccatcttactgwgattgcagcctttcaagtggctccaactttatgctggagatttagtccaactccatctgaaatggtgccaagacctcatctcttttttccttgtggacttaagtacccaagcccctagtcgtaattgggtataataactctcaaggctaccagaggattgactgctttggcttttagcatcctctttgcttctggcacttgaagatttctctttttttgtgagccaagacatgcaatttaaaaaattgttacattatatccaacatttctaatggtttatatagagatagtttgaaaatagcctactctgctatttggccaatactgttcatctagtcctattacttttcaaacagaaatcagaatgttatactcctctatgcctaasatttatagttgtacaaagcaatatatgaaaaatgtttgcttctaactattctaggcagagctgacttgaytagctttaaccaattagcacctaatcttataaaggccctttcagttcagtttttaatgtcttgggaggaggccgtgaaggggaacagaatgataatatcagccttactacaaggactgaarttataaatacaaattatcagagattcagaccaagattcgggaccaggggttcttttgggataattctacctgagctaccactttttaagccaaggcccacgtttttaagatacgtttttctatgccctagacttttctcacaacctgatgagtccctgcacagctttccattcacttttccacccattccaatttggcttttcaactacacctttatcagtacagctcttcctaaagtcatcaacgaattccatgttgataaatccaatgggcacttctctgcccgtgccttacttgacctctcagcaatattagatgtagttaaacactcctttattgaaaagtgtcctcttgtgctttagttacaccacaatctcctggatttcttcctatcactcactgccatctccatcccagtttcctttgatggttcctctttttttctacctgatctttcttcagggctcttctattccctgtttagaggtatcaaccagttatttccatgcctttaaataccacctatatgctaatgatggccaattttatatctccagycctggcctgtcagaatcatatattctgctggttgcactgacattttcacttggctttttacatatatcttagggttaatctttttgatcttccacccttatttttcccttagcctttcccatttcattaatgacagctttatctatccacttgtttaagccaaacttttatttttccctttccttcatcccttatatccaattttgagcaagtcctgttggttacatctctaaactatatttcaaatctgtccaacagctttgtgatgtataastattattacttctattgcattcttacgcaaacagagattaagacaatatgttagtaagttgcctaagggtccataggtactaagcagaggaatcaaggatgcagttatctttatttcaaatttactactcttcccatcataccctgaccttcaaagaatacttgtgagtaaaccyatgaacaaattgatccagattataataaaactcataatcatggctttatcagaagaatattgtcatctactgaaaaataactctgctatctgtggagaatattaatatcaatgcctctaaatatattaaactagtttcagaatttgagactgtgaaagagacaacctggcttccagaacaccctcttttcctttcaggaatatgtggcctattgttcccaaaacatatttcattctttccgtaggtttttatcctacttctcttcctccagcaagggaattagatcacgaaagaggcttgccatgcttttatgttggtttatctactgtcatgactttattaatattcagcatttctcaacaaaaagtcaaagggacaaaggaaagaaactcagcagagccagtacacatcatcattattatactgtctaaatacttagtagcatttgaagataagaaggatgtgtactttaatcaaccagggttaattttatatgcttaaaataaatgcaaatattgttagtatgatcagggaaaccagctggttgtcatcattggcatctttaccttttgtatattatgaattttattagaaagttattatctttccaattaatgaacttgtctttctgaatgaagttagggcactgttttattgggatttttcccccagtgataccttatactatcataaaattcctgcaacattatctgtgatcttaatgaatttttagtgaaacccacttggcatttgtttgtcattaatctcatttctaagccttgaatgccattatcattttatagacttctcagaatcagtttggcttagagttttatattattcttagagacttaactacctctttttagagtttcttgcacattcattcagatgctagagatctttgtgacatcttgtttatataaattgtttattaacattttgtttaaaatataagtatgggcagggcatggtggctcacatctgtaatcccagcactttgggaagccaagatgggaggatcacttgaggccagaagttcaagaccagcctggttaacmcagcaagaccccatctctattaaaataataaataaataaaatataaatatagacagggatttttggtaattataatgttttttggaagaatggatgctggttttaacaaaatatgttaatatgtcttctttgaattccccacagagctgtgtaccatggagtgtggtagccatggagtctgctcaagaggaatttgccagtgtgaagaaggctgggtaggaccaacatgtgaggaacgctcctgtcattctcattgtactgagcatggccaatgcaaagatggaaaatgtgagtgtagccctggatgggagggcgaccactgcacaattggtaagtaccaccatactttaaccaaagtaagttggattagttgaagttaagagcagtctagtgagtcaatcacaaggcatttagtagaatttgaggttggagtaggggaggagaaggagggttggttacaagttttaaagttttgtgaactggtaggtttcttcttttgtcgatgacattctacgtatttcttgtgttatttcctttcttattacttcagtattccttatgttttctgctttcaagtgctttgagttactcaagtgaaagatgttacattggaataaggtgtcattagttaataagaaaagtgcttttgtagtgaaggtaacattctctgcccatttttccttttgaaaagtataggttgtttcagttgaaagcacttagaggcaatttcattaaatgggactactttaacaggggccattcgatatcattagaggctgtctttaatgtatatgaggaaggcacttctgacctatcatcaatagaacatgtgtgttgaattgtttatccggtagtgtagagagttggtcctgaagccaccactctcccttcaccccttattgctaatttcacaaagggaaaatgatctgtgaatatggaaaagcctatgtaataattaatttatcatgtgatcttcacactataaaagatattaaaaataaatatttcagttataaaacactttctttttctgaaaaaaagcaaagcccttaacatatatttctatccaccgctaaggtttctatgcaagaaatctttgcatagaaaggttgtcattaatacagagtaacaagtatgattcccattgttcagctaaagaaagggggtcacagagtgttccagtggcattccttgactacacagaaaattcatgcagagcaaaggcaaatgtgggcctctggatacccaatttattgtttgtaggcttttccctcactagactatactacagctttcatttttaggtgaaagtattttgttataatggttggagcttgccaaagtaatgtataatatatataatacatataacatataatcttcataaactgcattacttctctactaaaggtacagtaagtcttgttctgcaactgtgggaaatatttaagattcattaaaaaggtggagaggggtgagattcagatgtgtagcttaagtaattacattcctgtactacagtaagtttattgcctttacataagaggatttaaatattgtgatgattaccataggtggttactccagaactctcttctaaagatattactaataagaagttgaagccagtgctctttcacaggagttattactgaaatgtgaaaatgcagttcttatacttctaatgaaatatgacactttttatgaagcctaatagagtttcttgcagaaatgccattaatattgttctcacagaaaatattrttcacaaactacacaggcccatgtacccaacttttgagctgcaggcatttcagcagtgcgcagtttgctgttctcctcccaggcaacagatggtaaaccattagtacatattgtatagctttagtctctcagaaattcatttgatcactcttttcccctcccttttagctcactacttagatgctgtccgaggtaagatttttctcactaattttataacagaaatatatttttaaaagaaaatatgcatgtaagaaagaaagggtagcgttttttggcatttgtgttgtttgtttttatttttggcaatcttatttaaatataatgttgtcagtttcatgctaaaatagtcacactaaaaggtaatttgttttttcaacatcaaagagtcactttttcccgtagtatagaatggactgataagcagttttaaggactactttttcttgtctttatattgagttctgtgtatgtgtgtgtgtctggatctgtgtgtattacacaggtaattattaaataatttttaataayttaataattattaaataatttttaataatttaataattattaaataatttggttcagaagatgaactttctctttaacataacaatatggctccaagtccatatacaaggactcctaagtccttacaggggcaggagaattatcctcctagaagtatcccatcatccatccctccaaggagcttcctttaacagaracagcaagggtttttctgccagatatcctagtgcctttcattacctcagcttcagaagtttaatatgtcccaaattattctttatttcaccttaattatctattgcctatccattagaatagaactacaaaaattcccttctcaaacctatgtatgtttatcatatgccatgtcatgagtatattacgtacatcaagcttttcatattttctaacaaccatctgtcattttatttttaaattttttcttcctcttgtctgttgatagttgcttggaaaactatttagaaggaacactgggttacttctacagattttttaatcttttttttgttttgctctttatgcttttggaattttctttcaaagaaagaaaccgaaatgaatattgactgggctattcccagtaaaattcasgtctggtcctgtgttgctactaggaaaatacccagtagcattatagttgctttctccattcatctgcccactgcgcatgtggcgcatgtgaagttaccctttgctagagctgaactccagactacgggtacaaagagtagggcatccctgagaaatttaaagtctaaagaggaaccattgtcagtgttaatgctttatcaatggataaaagttatttaaatgctacactttcctcttgacttgatattttccagttctctataattcagaaagtctagatctggcatgtattaattccataaacacttatttaacatttaatattattgttataagcataatatcatgcaagcttttgagagagataccatggaagtaaagatttcaatcsttagcccgcagatgaataataatcttgaagagaaaagctgaataaatataaagcaactacagcacatttctaaggcaccatatgaacraatacttaatggtgtggtctgaactgtataccaacatacttaagtcctgaagcaatacatcataagggaaaatcagcacagrctagaagtagtagggaaagtttctcttcatagggactgctatcttttcccaacatattggccataactagatacagtgtcatccgtatagttttgattgagatgaggagatatgtttagtgaaaagaaaaaaagaattcttgcccctgccatagttttcttcctatatgaaccaggggttgggaattggggttagcattaataaagcttaattggctctctaaggaaaaccactgcagagtaagggataacaagttccctgggaaggttttgcaggcaagcaagctcctcttccatttattcaacacctcatctgaatggggcccagatggttagatgcttccctataggcaaatacatcattgttggccaatcccattctgatgtctctgtgatggttactctctgatgtcttttcagatggctgcccagggctctgctttggaaatggacgatgtaccctggatcaaaatggttggcactgtgtgtgtcaggtgggttggagtgggacaggctgcaatgttgtcatggaaatgctttgtggagataacttggacaatgatggaggtgagtcatttataaaatgttcacgtaagaaaggaatagcccagyctctagcacagtggtaatcarcctggccaagggtgaaaattaggaatctctagtataaatgatactgagttatatagggtaatgctaccttttagtctcaatcacattaagaagacattacttattgaatattactatgaccaggcagtactccaattttttttgcatgtgttatgtatcatttaattctcacaataaccctakgaggtataggtattactattttccccacttgtagatgggaaaattaatgctctgggtggggatagtaagtgacttatccagaaycacatagctagagagtagcagagccaagtctccaatttagggctatgtgacttcagagcatattttctcaactactacaccatgctacctcccatacccatggcatttatcatatcaaattaaattaacataccactattcaagttgtttgatgttagcrtagtttgcactagacatgctaaaatatttttctttgttgttagttatttggaactccctcttgtgtgtctaccttttagtagcactttatacctttcagaggacatagcatcgagacaatttatggtagaattttaaatatttaatcaaggagctgcgcatgatattttttaaaaccactgtggctccaagacctcagagttaccacttctcttaggaaagccaacaaaacatctaacacactgtatgatcagacatcaaaactgcccaaaccacctctgagtgagcctaaaacaacaaatcctcactttccacataccttctactcgaggaaacataaaattaacaaaaaattttgtttgaatttctgtatattagcttaaaatgaagtatattattaaatttgacacttcacatttctatatctgcttagacaattgcattccttgtcatttgaattcagacatgaggcaggattatattaataaggtagcagtcatggcttaagcaccaaactgcattataagagtttcttcctttacttgttctggctaacagttaacctttaaaagttttaagaccttatcaaaattaagtggaggcaactttgtgattaagaacacagagatttgaagttaaactgtctggattcagatactagctctggctcttatactagctgcatgatttgggacaagttttatgatatctctgtgcttccatttccttatttctaaaatggggttgatgatattaaatgatattaccatttttccctatagtagaattaagatgatattgatgataaatatagattcagttctactttgagacagaaggataggttgaataattagacacacactgtctaatagggttgtaataagtattaaatgagatagttcaagtgagccacttgaaagatagtraactacaccacacayacacacacacacacacacacacacacacacacacacacacacaaatagaagagactattttctgaagagactgtttactacccatataacttgaaaaccttgttttggaaaccggagtgaagttttcaatctaatgatccactgataaactatttagtttatttttatggccctctaagactcatcttcactttccttcttgtctttttcattatataccttttacctggcacatcttcatgtcttctccacccattgttctctgtccataatttaagtctcaacttaaaccatatctcccatgaaacttctgacatccacctcctcaattacccatggtgttgataatatgcactatacaatcaaacacctaattatattctgtatatggttttcttgttgcatgttaagcatgacccattgcccatagttatattcccaatatgttgaaaataatagtatctcacttgtattcaggatttactatgtgccaggcactgtgctgagccccttatgtgaattatttcatttaatccccattatgtaggaacatttttttttctttttgagacagggtcttgttctgtctcccattctggagtgtagtggcacaatctcagctcactgcaacctctgcctctggagctcaggtaatccttctgccttagcctcctgagtagctgggactacaggcacacaccaccactcctggctaatttctatawttttaatagaaacaggatttcaccatgttgcccaggcccgtctcaaactcctgggctcaagcaatctgtctgcctcagcctctgaaagtgctgggatttcaggtgtgagccactrcacctggccaggaactaccattaacactrctttacaaattaggaaactgagacacagagaagtcaagtaagttgttaaaaatcacatagtaagcaaatgataggtcctggatataaacctaggtagtctgcttcattctaaaaaggatttggtataataataggaatttctcagttatgtattgattaaaatgttatgctcagaaaacacattaacaacctatgcaattataatttctggctcagttaaggttgagccaatgtttcctgccttagtaaagtaataaaaataattgaatatttaattatcaccattttttatggcctcaaggtcatctcaaggcagccaaaatgtttaaagaatggatcaattaaatattaatgaattaatgaattatcaattctcaatgcctgtggtctatgtagattcagaagacatagaagatttcactgaacgtgtattgacctgtgaacattccttaaaactatgtatctatatgcaaattaaaaatcaaagaccttaatatgagctcagtatatttttatgatcgtctctttagggaacggggggaaagctccttgagatttccgattaccatttttccctatagtaggattaagatgatattgatgataaatatagattcagttctactttgagatggaaagatagattgaataaactctgaaagccccatgactaagattttaaaccaataatttcatttttatactgttcaaatattacccctgagaatatattaaatgcccttcatttggtagtctcagctttccagctatccataatggctggtttcatttagttaaatatgactaattattaatatttgcttaatattaatattagtctacttgtttgtgcatgtgtgtatatgtgtgtgttttaattacattagaaagcaccaattgaaccgttttgggaaaaagtagttctaattttaaaaatgtaattcttaagaaatcttcccaatcaaaaaaaatcactttcaagcatttgcttcaagtagctgctacctgattactccatattataactgatacttaaagaatggtggaatttttttgcattctaatcagctttgaatactcattagtattgctgctacttcctgaagctttgactttagttaccctctgattcaatgcattgtgattctcagtaactaattgggctgcattgaatatgtgggtgacaccgctggtccagaaactacctaaaagctccttgaacagtaaaaacagaacagagaaaaaataacctttggatgttttttcttaagtgcaaaaaaggaaagctatcttatgtattgtatatacaagaactaattactatagaagtcacaaacctatgaaatgtcttgacctcattcatctctttaatcaagaagcacctaccacatgcacaaccctatacttggaggaaaaaacttactatggtgaccacattttcatttgttaatcatgtgtcctaatttggagttggttacatatgatcaccatacattacatgcacatatgaattaacatcagaaaaaaagtttggacattatattaactgagtcagaatagctaaaacaaacaatagtgaaagatagaactatcagacattaaggcatatttgaaagctatgataattaaagcaaagtggcactgatgtgagaatagacagattaatgcaactgaataaaagctctagaacacacccaagtacaaaatttagtatattataaaactggcatcaaaaatcaatggggtaaartaagcattattaaataaacggaactgtgacaactcttaagaaaaatgccttagattttttaattcataccatatacctaaagaataagataaataaaaacacttcaactggattaatgagttaaaagtaaaagaaaacaaacaattcaaaaaaaaaagtggtgatagatcttacaatgagaaagcactttgtaaacataaaaagaaaccataataggaaaaaaaaacaataaatttgacttagtaaaaatgtaaaacttttttataatgtttagctaaatgtgtagaccatccaatatctaaatatttgcagacatcaaaatctacactgtctagtatggtagccactggccacatgtgagtatttaaatttaacttaaataacataaaaaaattcaggatctcaactgcactagtcacatctcaagtgctcagtagccacatgagactagtagctactgtactagacagcacagtactagaacattcctagctttaggagaagttatattggatagtgatgatccaaatgtttcactcaaatgttacctttaggccaaacatttcacattaagtacctggttttccattaattcattactacttcttgctaactattgtgcttgacactggagagaaaatgataaacaatacaagtttctgccttcatggagcttatggtctagcaaggcaggtagatattaaataatccacacaaatatgagggacttcaaaaagytcatggaaagggagacttgaaatataaatattttaaaatataaactttatttctcaacaaaaatataaactttacttctacatcaagttcaagacaattttgtaagggatgagtccatcctgatataactgagggtcctgggaacttaaccagtcttctttacattgttaactgaagaaaaatgggtaccctttaaagattttttaagattaggaaacaaaaaaaaattagaaagaggcaaatcagaactgtaagtaaggtaaatgcgtaatgatttcccattgaaactcttgcaaattgcccttgtttaatgagaggaatgagcaggagcattgtcatggtggattaggactctctggtgaagctttcctgggtgtttttctgctaaacccttggctaactttctcaaaacactctcgtaataagcagatattatcgttctttggccctccaaaaagacaacaaacaaaatgccttgaggaccccaaacaactgttgcctcctgggttcaagctattctcctgcctgagcctcccaagtagctggaactataggtgcatgccacccccgcccctccgactaatttttgtatttttagtagagatgggttttcaccatgttggacaggctgatctcgaactcctgacatcaagtgatctgcctgcctcagcctcccaaagtgctgggataaccactgctgttgaccagtccaytcttgctttgactggacctcgtccacctctttgtagccattgttttgattgtattttgtcttcrgagtcatactggtaaagccacatttcatctcctattacaattcttcaacaaaatgcttcgggatcttcatcccatttatttaaaatttccattgaaagctctgcttttgtctgctgctgatctgggagtaacagttttgtactcatcaagtggaaaatttgcttgactttaatttttcagtcagaattgtgtaagctgaaccaattgagatgtctgtggtgtcggaactgctactgctgttcatcatcgatcctcttcaattagagcacaaacaagattaatttttcctcacaaattgatgtggatgacctgctgctgcaggcttcatcttcagcatcatcttgtctcttcttataatgagttatctatttgtgaactgctgatttctttggggcattgtccccattaacttttcataaagtatcagtgatgtcatcattcttccacccaagtttcatcgtaaatttgatgtttgttcttgcttcaatttcagcaaaattcatgttgctctgacagggactcttttcaaaatgatgccttatccttcttagtgcctcaaactagatcctgttcagatgtgttacaacaagttagtatgactttattttagtggaaaaaaaatttgaactccttgcatagttttctcatgatacacattttccaagaactttttgaagatccctcatagctatatatttacaactgtgaagagtgctagaaaaattttataattttaaaattgtgtaattctataaatgtgcatggggacctgacctagtctgggtggtgagagaggcctcacatgagtcaggggaaaaacgttccagacagaggaaacagcatgtatatatgccctgaggtggaaatgtactaggctctaaagtaaaaggcatgtctttgtggctggaacatgagtcrggaagagattagtatagaaaagtagtcaggggccagatcatacagaacattgtgagttttacaagatcttcagttaccatacaaagattccatttcattcactcgacttatggaggaaggaaagtggtctctgayattgtggaaatattttcaaggaggctcaaaaaatgtagagtaagagtgtttaatccaaacagcctttttttctctgatcttttaagtatttatcacgtttgtccaagcttctctggtataaactcttccagtggtctatattcatattcattggtaaaatcaataagttaattgcctaaaagagaatgatcttccaggaatcattcttcataacaagtcaccattcattaagagcaatagctrtttgcaagcctcttttatgatgtagtgtttctagatccagaaaacagcaccatgggtgagttatgaacacatacaagctcatggatcaatgagcctcatgtttagaatggcaccagcatgcttcagtgtttaataaataggaaaatgaaagagaaggaacaatgaatttataacatttactctatttaagaggcagacatcttcacatttacttttgagatttggttggagacaaaagacttggcatcagaaagcatatttctaattattcttttctcaccatacccctttaattttgaagcaacccatttattaatggatcatcacttagttataagagcctaaactgcccaagtgcctccagatgcaactgcaaagtagaaaatctcaactctgtaactgttcaccactgtatgactgggcccatcacattatctaccaactaaggctactgrtacttgatatctgtctactttgcagtgatgaaaatgaatgagaaaagagttgaaatacagtcatttaaagtgggcaataaaagtgtgttatcaatgaagaatctgttaataacaatttgatatattagttggacatttgttaatctctgggcacatttacaaatgtcatagaaataggacttttatggcatccatttattcattattcaaatatataatgaatgttcattttttgggggggaggatrgagtctcgctctgtcacccagacttgagtgcagtggtgcaatctcggctcactgcaacctccacctcctggtttcaagctattctcctgcctgagcctcccaagtagctgtaactataggtgcatgccaccctcaccccccagctaatttttgtatttttagtagaaatgggttttcaccatgttggccaggcttgtctcaaactcctgacatcaagtgatctgcctgcctcggcctcccaaagtgctgggattacaggcgtaagccmccgtgctgggccttgaatgcttactttaagccaggtactgttctagtcattgaggaaatagcaatgcataaaaaagataaaattcatgcttccataaagcttatattctagttacaagaggcagaaattaaaccaaattttaaaaatacatattatgatagaaggtggtaaatgtgatgaagaaaatttgtttttttttttttttttttttaaaggcaagatggttaccaaaggctggcaagggtaatggggatttaaaggggaattggagatggttaatggtgcaaaaagatagttagaaagaatgaataagacctactttttttttttttttgaratggagtttcactcttgttgcccaggctggagtgcaatggtgctatctcagctcactgcaacctctgcctcctgggttcaagtgattctcctgcctcagtctcccgagtagctgggattacagatgcccaccaccacgcccggctaattattgtatttttagtagagacagggtttcatcatataggccaggctggtctcgaactcctgacctcaggtgatccacccccccctcagtctcccaaagtgctgagattacaggcgtgagccaccacacctggccaagacatactatttgatagcacaacagggtgactacagtcaataatttaattgtgcattttaaaatacctaaaatagtataattggattgtttgtaacacaaaggataaatgcttgaggggatagataccccatctttcatgatgagattattatacattgcatgcctgtatcaaaatatctcaagtaccccataaatatatacacctactatgtacccacaaaaatttaaaattaaaaaaattaagattaaaataaggcaggaaaaggaaggacagggagtgtaggacggggaaattttaaataaggtagccagagaaaatctcactaagaagatgacatttgaataaagacccaaaggaggtgaaggttaagccatgttgataccagggagaagaacattccaggcataggaatagtgtgtgcaaacgtcctgataacattgcctgggaaattaaggaacagccagaggagtgggaaggagattgggtggatcagaagaggtaagatctgagaggtaagagggagatggcaaagaatcagactgtgaggtaataagtcattgttcagacttaggcttttattctaagtgatatgaaaagccatcaatggcaggtaggcaccaggaggacatgaacattagtggcatacaaacaacgtattttcccaacccagaaaagtttaatggtatgtggttatagcaacaataatgatttgggcaggccaaatcctgagtgcacttgagtctctctcactttcttttttctaatacagtaaaatccaggggtgaaaatcagcctgaakaaatgaagaatatgaattatagactatttccagaggaaatacagtcctattaccttcaatacatgtaagggcaacaactaagctaacaggagtgcctagtaggaggcctgctttagtaaagagttatgaatgatttatagttagttcattgcttatggctttctaaaatgcctaagaagactttgctttactgagtcattggaatgatcagcccttccattttattttcactattaatttgctcagcagacccactgttctacagatgctgaaaagcttaagcttaaatccaacccctgtccaaatggtgacaaattctgaatcaatcaaatccaatgaatgaaaagtttctgtagtattagtgtttgtctactcagagtcacataagatcctacctacctgacaacctaaccaagcatagttcataaaatgaacacattccaacaactggaacgtgctacacagaaatcaattaccctctggccagtgataaggcaacttcaataaaaggggttgaatgctttaagctgccattgcaaaccattgacatctacccctaagactctatccttagattctttgcagtctgtatgttttagaatttgatataataacaacagctaacatttatcaagtgctggttatgtactagatagtaagcttattatgattacctttccagctttattgaggtataaatggtgtacaaaacctgaacataataaatgtaaataatttggtcagtttacacatatgtataaactcatgttaccatcaccacaaacaaggtaataaacatatccattacatccaacggttttcttcttgtccctttgttctggggtggagtgtgtgtgtatgtgtgtgtgtgtgtgtgtgtgtgtgggtgtgtgtgtgttaagaacacttaacatgaggtctaccctcttaaaaaattgttaactgcacaatacctcattattaactataagtactatgttgtacgasaacttgctcatcttataactgtgactttatacccattaaacaactcctcatatccccataaccaatccccaagtaaccaccatgcggttgtctacttctatatgtttgactatcttagatgcctcatataagagcaatcatggagtattttcccttctatgactgacttatttcacttagcctaatgttctccagtctatggctataccaccctgagtgcacccaatctcatctttattatagcatgtgatacttacaacaacttatagagtgagtattattgttatttacatcttacaaatgaggaactgacttgtctaggattctacagattgtaagtggcaacgttaagcttagagccaaagcagggctggcccggtggcttacgcctgtaatcccaacagtttgggaggccaaggcagtttgatcacctgaggccaggagtttgagaccagcctggccaacatggtgaagccccatctctactaaaaatacaaaaagttagctgggcatggtggcaggtgcctgtaatcccaggtactcgggaggctgaggcaggagaatcacttgaacccaggacacagaggttgcagtgagcagagatcacgccactgcactccagcctgggcgacagagcaaaagtccgtctcaaaaaaaaaaaaaaatagagccaaagtagtctgtttttgttttcttttgttttgttttttaccttaaccacttcatgtgctctaaatacctatgtatagtcatgcacttggaagtcctacagcctagatcagtactagtaatacacactgtttagatgatgatgttgaatgtgtgatttgcatgcataacactaggtgttcatatgactcccaggttacttcccactgcaactacatttagcctccccttctttgtttgtaatayagggatgagaatatcaacctaacaggcttgttgaagggatttgttgagataatatacgtggatgtacctagtgcctggcaaatattaactaatctgtacgtgttttcaaatccttttgtataacctaccatgaattaaccacccattattatcaaggtgataatacaagtgctgtctctaaaggatatatatttgtaaattcrttttcaggattagaaagtatgggtttcctctgtatcactcatattccttcatccatttcccctttcagccaagggcatacaattagtaggcataagtttactagtgatgacttgatcacgcagcaaagaaaccagtgcttcatcaacaccaattgagccaactggcaaagtcccaaactggttggcaaagctaggatcaatgaatgccatagatagtccttcaagtcagtgtaacctccctcttttttagctacctagtatttttattcctttgaagagaacaggccctaaaagtaaaaatcagttaatatttgacatgcccatatctgacgacgctgagcttggctgtcagtagggtgccacagcttccaattctgaacaattagraaaaaaaaaaaaaactgttaatagccaaaaaacaaggcacatattcagtgtgattgtcatttgcacttctttgcaacagtctagacgtactatatggggtgttagtcaatgtgataattggtaagttcatctttgcccgtgtgctggacttacctacaaattataatacggggtttgcatgccattattgatcggcttgcctgaggtctttctagactcaacaggagccttgctgatgtctcagaaaacagaggtcttaaagggtcagccctacataataggcaatgattaaatatgaaacattagcttggaatgtatagaacattactagatgagaatgtgagtcccaattatgaattggttctatgtttagatttttttagtttttttttaagatcgtttttggcattaatatttatttaaaatctatttattttcaaaaataagtcggaattttgtggttgacaggttgaaacctgtgactgcccaatgtgattattactagtgtatttgttaatatttgccaggcatgacactggatacttccacatatattagctcaataacaaattcagtattcaataaaaatgtaaaagtgactgcccatttgaaaagcagtttttcattgtttagtgcattatgcaccaattccagacatcagagaactctcttaatcagcctgatatttttgccagcttttcagcgcatccagatgtttaattagcagagtaaagagataatgtgctaataagaggctgagaacagcgtattggagggagaggtggtagtggtatctaaaatccctaaaaaatctgttaatataatttgctgaatgatgggaaaaggggaagcagaaagaaacttcttattgaaacaaattcacactaaaaagtcatcaatgaaaaaaatatgtatacagagaaatagaaatcaggkgcaaaaacacattgaacaaacagggaaggcaagaaaaaaagcaaactgcattttaaatcaaagtagtgtctatagtacagggaatttgaaaggaccacatgtggggaaaaatatttcctgggtgccctagggctgctgttccaaacgtctactctcttggtgttcctcgctttcattgcccccagctgtggtacacccgcctctaactccacgggagcagacaagtgggggagagagagcaagcaaaagagctgcaggaaatcagtgctagtaacttgctgcagcagcagccttaaggagacggtgatccatccgaaccttcctattccaaggcaagccaagaagattagtgtctttatatttacccttgttaaacaactgaattagagccacttgccttctttaaggacctgggaagaactttaatttttttgcttatggggcatggaatgaagtgtccatatgctcagttaatcactccaaccccttctctttgcatgtaactctcttaaagcacttcttacatttttgctagtataagagttagctgtttacatatctctttctcctactaagcccagagctcttgamaacaggaaaagggtatttttatctcttcacctctgcaagcacctaacagtattttgcacctgttagattctcagtggtctccctgcctcacaatccctgttccctatatcatttctctaccaaagaacaaagcctttgtatgagttttatttgtggtacaacagtggattcagcagtctacagcaaatggtgaagggccagaaaatgaaacagagaaagtcatcgcattcatgtatgtcagatttggtagtaattgcatcggctgggtgcggttgctcacgcctgtaatcccagcactttgggaggccgaggtgggcggatcaagaggtcaggagatggacaccatcctggctaacacggtgaaaccccgtctctactaaaaatacaaaaaattagccgggtgtgttggcgggcgcctgtggtcccagctacttgggaggctgaggcaggagaatggcgtgaacccgggaggcagaacttgcagtgagccgagattgtgccactgcactccagcctgggcgacagagagagactccgtctcaaaaaataaataaaatagaatagtaattgcatcaaaaaactgctgttaggcatgttaactctagttccttctataaattccttaaaaaactggttctgcaactttagtatgcttcagaatcacccagattaagtatgcataatcctgggctctgtaaaaattctgagtcagtaggtggagctcaagaatatgcatattttataagctccctaggtaattgacaacagatttgaaaatcattgctcgaaatatcttttttcaccatgagaatcccaacctctattttgagcattaccagtagacaacaatattgggaggattttttwaaaaaatacaaattcaggtagcaagtacttgttaattgtgtgctcatagatgtactaggtgtacttacaagaaatcatcrcattcggaaagaatggtctcactgaggaagaagaaatttctaaacagtgatatgtaatagaattgtttacccaaactctaaacaataactatataaactatattctccagctgataaatgctggataattcaggaaagaaaaatttatgaacaaaatactttgaatttctctgaggtgccatgtgaactcagagtgagtgataattcatgaaaaatgtgaatttaacaaattctgaactcaaaacaaggttgattatctttggctatattttagaattttctccatttatgtatattttaaactatatttttctcttgaagctaaataatcaatattggttttgggttttatttccagatggtttaaccgactgtgtggatcctgactgttgtcaacaaagcaactgttatataagtcctctctgccagggctcaccagatcctcttgacctcattcagcaaagccaaactctcttctctcagcayacttcaagacttttttatgatcgaatcaaattcctcattggcaaggacagtactcatgtcattcctcctgaggtgtcatttgacagcaggtacatatgtatttattttattccttagtgaacaatggtcatgtttttcctgaactacgaaaggaagatatcttctaaggatcaggttacttcccattccacataatccacgttcatttctttttaggacttctctggaaagccaaaacccttactgattaaggaaaaaactcatttctagagattctgtatcataaaattatgtgtgtatgtttgtgtatgtatatatataatatggcttttaataacaaaaacaggagggaaatataatttgcaaatttattgtttagcttctggattgattcattgaaaaaatcttgaatttcaaaaactaaattttaagttttatttcatgatgaaaaatgtttccataggaaagggttgaataagtttgacatcctagtgtgaaatgcaagactcgtgaaaaatctgtcttccgggaaagctcaaatgcatgaattgtcacttaagacctcagaccaaagcccaacccataaggcaaataatttttttaaaataagcttacttatatgaagtgtaataacatgaatttgctcactgttattctttaattcatcttcagcgatgatatattttactaattagcattagaggtaagtcactaaagtcaacatttccagrcacaaaaatgttctcctgtatgcattccacaagtcaatatttcactggctttgtagactgttgcaaacaggaatttttaagaaacatggaaagtatttgtccaggaactcctgtctacatcccactccctcagttgcagcctggtgggagttatcattccccaagaataacttggtcaagagtttatattgatatcagtgacaatctaagaaamttacaactccatcttgacctatacatagtagaaaaggggaaaaataagatgtgcatggaaatttcaaactctcaactcccttcccttcagttgtatactagaactgttaytgaaacttaaaagtttaaarttttttttttattgtgtagttctgactctctaggtctctggcagaacccaaaatccaactgccagtgaatcacaagaaagggcttttctgccaggggatctagtcaaagttttccttcttccaagagattcagtcatctccattttgaagtatttcttccagcttcaataacaactctgcagtgactttcagatgtggtatagtcaaagtgattatttagatagtcgagacttatttattatacaccagaggaacaaaaagaacaaaaagcaaccattatccctrttttcctatttaaggtagaggtaagacatcaactctgtagctttcttcactcatagagaaaagttgatccaaaaaaaagaaatgaagtgaaagaaataacaacctccatgacatggagaagtgttaaatgactcactaaactcaagtaaggggagaaagtcaagacctaagaragacaagagacaagtcattgtgacccagagcagagcatgtgagcaataaacttagaaaagtgaggacaaacttaaatccctgcggtttagcttcatgcatcagcagcacttgccagccgctcagagtgaataaacctatttcttgtggtggttaatgcccttctcctcctcctggtttgattgagtttccctcattcttttgtaaaatrytccaagttatcatttggctctgcaagtcacatttaaattcagaacgatgggtctccttcatccaggggtctcagctcttacaaatatatccattctatcagaaaaggcaaaggcttttcgtgaggaaagtagctgaggacaaacaatctaattctatttcctctaaaaaatcaacacatgcatttttatttgggatatctttgggcaaaataagtccaactctgatcatatatataaatcataatagctacagtmtcttacatctatatagtactttttagtttacaaagcaaacaaacatacattatgtccttttatcctcacattatccctgtaaagtagatacttgtattaggtgcattttatatataaggaaactgaggttcagagagattaaataacttgccccaaatcacacatgcagaaagcttgcattgtagcaactcttgtaacctttccattacgccacagctgccccatttcaatgggtccttaaataagcctggtgacgtgaaccaaatttmtactaggtaaatggtatttgggtcaacacaagaaacttagaaaccaaatgacattttaaaaatccagttcaatttaatacatttcagtgacatcatttacaaacttcaaatcagtgctaatgaattttttctttgtagatcacaattgagtgactcatgaaatggaccttttgatacatgtaaattgtccttgggcatttgttatgtcaaagatctcatgctaaacttttacatgtgttatttaatcctcacaaaaactctatatggtaggtactattactatctccatttgtcagtgaggaaataagaacagagatgcccagtaaatgacttgttcagggtcacaattaatgagtgtcagtcagatttcgaacccagaatttgaactggtgctgacagcctagtctctaaaccactatgctgggccattttggctacttagaaagctgggctagctgaatgtgaaatacttatggctcttatacatctcggactgtaggattgctctcctcaggcagatctaggacacttatgtgccataatcaggtgaacaaaccactttgctttttagtttttgctgcataattgagagagagagctgggtaggcgggtgaagaaagcattttgaaggggcttgtttgcctaccggcaaaatgcgacccacacagctgatttgctgctgaatgttgccaccatcagaaacctttggagctaaagatggtggcacacaggtgactaagtgttgcaaggacacacaaaagctaaaaaattgtttatccttgtgcawccaagagagaccagaccttcttgttttgagttagctgcacccacatgtgaaagcccatggaatatgtatgttctgtgccgtgtgatggtgtaacaacaatgtgaacgtgcaccctgcccayggtgaagatcttgggcaaactcaactgagttgccatttttttcctaaatgcaatttatatcctgtagctcgagtttgttttcttcaactactccaaacatgactgcaaagtaaaccacatattctaygagccctgtacgacttattactttttaaaaatgtaaataggtgaacagaagcattattgatctttagtgtctaagcatttaatcactattaataatgtaaaaggtttttataaatatgtaaaagcaggagtacattaaactaaatgacagcagtaatttgcaaagccagacatttcactcgccatcactagtggagaagtgcatttaaaaaaacaaaatcttaccagggttagtgcagcggctgacagcaaggtctaaccaaactcatctgtctgttttgtaaccatgagaggctgatcctcacgtcaatccgtgtcagatgtccatatcagaggttgcttaaaatcagcccacagatgtattttgtttgtcctgacatttagaaattaggagatccaacataaaaatcagaatatcttccttctccagaaaatttacacagcttgggatgcatgggcaacctaggatgcatgggcacggcataggtggtctgacgcttaagggccagctgcccctctggatgggacatggcatgcctttctagctcaccactcacttgactcacgtccttcactttcaatgtcatgcctggccttgctggcatttgagtttgtgatttctggtctatacagtttctgyagctttccaaggaaagatcttaagtgtttgtttttctttctgatctttttccctgagagcctttaaatacccaacattatcatttcacttaatttttgaacttttattatagtggtttaaaaagaggaaaaagatgactgaacatgatctagaaatcacattaatggaacaatatttctccccttagttcgctggagtacctttgcatatctcatgaataagttggtatacactctgcctcacaccttaggctaataaactcctctaggccagtggatcttaacctatgatgtcttaacatcccacccattatatcagataatcccggtcccaccaaagtaggaaaaaagtccacattttatgagaagaatgtgtatgttcgcaggaatttgattattatgtctataacttagagtaaattttaagaacagcttaaagatctaaaatcttgcaacagtcctgctgaatcaattgtgttgacctcttctgcccactctggtggaatgcctacccttaattgaaaatttctagaattaggaccaaatttagtacagcactaggcacataatagcaatattaacaagcaaaaaaaaaaaaaaatgaaacaagatgatgggtttcttctagctttctttggaattgctgcatttcagtttcttggttcaccctaggatgtacaatgttagctctgaattgtcatcatttctaaatcttaagttctgtaaggacaaagaccaagtccgatttgttctcttcttgttttgaatatctactgctatgtagcaaattgttccaagtaatggattaaaacaattcagtatcatcctatttcatgtgtccatgggtcagacattcagataaggcatggctagcatggcttatctctgctccatgatgttggaagcctcagctgggatgactcaaataactgggggctggaacagctggacagcagatggaaatccttctctctacaggtagcctctctatttgactacttgggcctcctactggcatggtagctagccttaggtttgtcagagctcttatatggtagcctagggctccaagagtgagtgttccaagagacaggaaatggaaaatgccagtctcttaagacctgggtccagaaattgtcacagtgtcacttgtgtcatacacagttggtcaaagcagtcacagagcttgcctagattcaaggggaaggacatagatcccacctcttgatgagagcagtatcaaataatttttggccacctttaatctatgataccactgtatccccagatcctaacacagtatttggcatgaagtaggtgaaaaacaagtgagtgagtagcttagttatgattttgaagtgtgagtgctctgtattargtcattctcacattgctataaagaaatactggagactgggtaatttataaagaaaagaggtttaattggctcacagtcctgcaggctttacaggaagcatgatgctggcatctgctcagcttctggtgatgcctcgggaagctttcaatcatggttgaaggtgatagggcaataggcatgtcacatggtgaaagcaagagcgagaaagagagaaggaggtgacaaacacttttaaacagccagacctcatgagaactcactcactcttgtgatgacagcaccaagaggtggtgctaaaccattcacgagaaatccatccccatgatccagtcacctctaaccaggccccatctccaatactggggattataattcaacatgaaatttggacggggacaaacatacaaactatatcatgctcttctcatatttgctaatgaaaaactcattttggttgcctagaacacacaaatgatattaggaccttaaataatccaattctcaaatgtagaaccagcctaaaggtaagattacagttctccaaatagcagagaaacaaaattcatgaaagatatagtgataatataacaatagcaaaataattattcttttttaaaacttgtgatatattccatcactgtcacaacctgccaataattgacatcatttatgattttgtgtatgcatcaataattctgttttcaatgggttagataatcaaaatttagtgctaagagaaaagtggaatataaggagcaatatcaggaggtcagcaggaagactgctgctaactggctcactttggtrtgcatcattattctgtctcgcaagaaaaccaaagagaagtgccctaaaacaaactgaagtacttcaaatgccttgaacatggaattttggcaaactttttatttacctaagccttcatcctcctttactataccctactcaataatacrttcttgattcttgttcccgattagtcatgatacctggtgacagccataattactcatcataacttgtttaatrtaacatgckttctgccctcagttgagctgggaatgtataccatttgagattctgtgaatggcaaaacaaattattgacccaagactgagatcgagggaaggttgcaggaagatggtcatcgctgcagaagctgctgatcttgaataaagactgagacttaagaataaccataattgacagatactaattactgttttaagtatatattttattacaatattggtatttccagagaaactgaggactttactacctcagaaagagatagaagagataccagattcttctgccattcttaatgtaatataataccctaatatcaattcatttttcaagagtgatgaaggatatgcattcactcattcatacaacaacatttattgagtactcactttatgccaggaactgtgcagatggagatacacaaaagaaacacagtccccttattcagagtttacattgtagtggcagaagcagtcaaaacatcaagtaaatacataaataattaaaataattatgaattgcagtaagtctatggatcatggaacatcagatttctaagggagcttggagttcatcagctcaggagtccaaattcaactgttttgatggggaagacaggtagccctgtaagacaagaagtattctggcaaattagacaaagtcattaaacaactatagaagtgaaactgacctggaagttttcagcaataatccagagatgggactaattggctcgggtgagcatgaagagctgctaaaattgacacacactggagactattgatgacttgcaagaaaaatacaaagcttatttggacagtgaacagcttaactatatgcaaacagtttcatcatcctttgacatttggggctataaataattttctctacaatttgaaatgtgtgtaccaaacataaattccaggaaaaaaaaaacaatcatccaaaagaaatcccatttagcacaatgaaaaaaaaatccccattaaccacactttggagtcatttaaaacaatagatcctacagtttctttcaagacaatccctattgggggaagattaatcatttcactctttaaatgtatgaacattataatgtttacttggttcatttcttcatttagtgataggtactcttctaagctctgggttatagtggacaaaatctcttccccatacagtctagtgagggaggcaaacaatgaaaaaagtaaatgtcaggaaggtataaatactgtaaggtgagataaaagttagggacagagaaggaccattttacacagagtggcccagggacacctctctgaggaggtgacactagagcagaaccctgaatagcattcatctgtatattagatgatcttggtataaatgtttcttgccacctggacccctatgcaatagattttaacagaaactggagcctgctgttgacttttaggggcctgttgaatcaaaattctgtgacataatgtgcaatggaaaagtaaaacaaacctttgtcaaggaattactgcatattggttactgggttttaccgataaatggatgaggtgcctgccctccaggaggacattgagaaaatttgaatacctcagaccaactgactaggacctggaaagagaaatcagtaacagccttagaccacttaactcatgcatgacagaaaaaaatagcagatcttcatcaattagtgttaatcctagaataaatcaaatattgagaaaccacttactgatttggaattatttttaaaagataagcctatattttaaaatatttaaaaggaaatatagtgctattacagtattcaagcattcacagaattaacatgttgcagttttgtctatctacgagtaaccccagaaggtcgacaacataaacatttgtaatttcactgaggtacaaatttgaatccatatgccttgcgtttagctttttcatgaatctatttgttaaagacctctaagtctacttgctaatggcagatttttgggtatttttaatctaggaacatgaaaaacattacaccaagtacacaactaggggttgataaatacacagtgcgacaattgctgaataaattgaatagactaagaatcgggtaagctctttatagagcatcaacatcctcaaatataccttctgttcaccttcctttctaaaggaaggcactgcagatgacctgctcacgtttggaaaaagaattccagtgtgttttggattggccgtggttacttgttattctgtttgtctgtccccgttgcttttcctgagcaatctcccttgcttatcacctctgaagttgttgtcctaattgggaagtamggttgttgctgcttcctaataaagcactttgatcttcatgtgaaaggtgttactgaagatgggatctcttgattttcagactatactgtctaatgctaaaattcagaaaacacatgttcaaaacacatttaaaaaattacaaagtgcagaaggttcccagatttatagtgctgactgtctcctgaaatcagcagtcaacacctaaaggtaccaaaaagaaacaatgtgagactttcacttctttgcaaatgctcttgggcaaagaagaatgaaaaatcagaacacagrtcttcaaaaggctgtttcaactgatgatttatgatactttgaaactcagttgttctgagatgcttaacagttataattaatgataccagtagctacctacaacttatctcagcatgaataggtattttctaatattttatctatcctacttgctgctccattaggatgtaaagttaaaaggctcaaatccttattacctactactcagtcatactatttgcttgtaatgactctctagctggttctgtcatctcattttgtccctggagaggacaaagtgaatgcaagtttgggaagaaagaacaaatgacatgctatagctcatctccactacacacactccacataggaagtgctcagcagttggtaaatttctccaggtagcsataattctgtagatagcaccatctttgtaggcgatcactttcttttcatttgtagccatattgtttatatcttgactcagaaagatctgcaatacagctcaggctctttgggggccaggtcaagagatctccacccctccaccacttatgagctgtgttaagtgcaaaacttttaacttctctgagtctgtttcttcattttttaaatgggcctaatagctttacctactcagggttatgtggacattaaatgaaataaggtaaggaaagtatctggcatagtacctgattcatagtataataaatattttatttatacaacatatatatctaataattatcagggtacatagcaatagaatttgaaaggcctagttcaaaagtgatcattttactgggtaattttactatgatgacatctttgtgaggtaaccggggagaggtcagggaagaaagaacattcccaccctacataaagagcaaacagagctaagagttaattctgtttcttaggaaaagtcaacaatggtggttactagcaagccagagctagaacacagctgtggctagagcaaagacacacttcttcgtctgtggagggaagagtaatatatgcccaggagatggccaacaagaaggatctgtcctatatttaatgactatccattagtcgaaaggcagattcagagaagtgacaagagaggttaatgaggttaacaaaaccctataaggctgattgcaaagagaaaacatttgagtcatgtgtagaacaagcaaaaaacaaaccaaaaattttaagggaaaaactaacttcagactattcaagagttgcaagggcttacaggacaaatatttcaggattcaaattctggacgaaaataatcatgtgtctaaatgaagcaaactggcacttacgcagtcctgaaaatgtgactgtgtcgtcagttttcttattgcttcaaaacacttgatctttttcccattactttggggatctcagacctccaaagcaagcgtacttttgacaagcaattaccaaggcagatgggaaaatagccaccctacctcagggtgagtgcccccattttgttttacttgaaacatcactagccatgaggaaaataattctgcttaaaaatctatctgcattttcaatagcaccacctttcccagagtcctagaatgttgatggctaatgctcccagctgcttttaatgctacccacttggtaggcattgtttatttggggcagtgaccaactgagtaggattaaatcaacccaccatattaaaataaaaactaacgaggacattgtattgggtttgcatatgagcattcactgcatttgaattttcagaacatggaaataggtttatgctataacattaagtgttttcatagtgctgtaccaggttagataacatatatcaaaagtagcacgtgttgtaaggaaacccccaaaatatctggatattagaagtcccaaatgcatttaaattataaaatagcaaatagtaattatataataatatataaaggaagaatggggctagcgtgcataaattaagcatttgaagactaatcatttcatcttcccgatcacaataggtactgtttaattccctaaaatagtcaagtatcaaacaaaacactcctgatgagaatgtcctaatgctcaatccagagtgttggcttctaataaataaagtgtaaggcatctgttacacaggaatctcaacgtagtcactgaagcccttgcttgaagcagtgccatgagcataggttgcaaggatcttacaactatatttttaaatatttgagttgaaattctatgaacctgtcttgagcatgtgctgtgtacatcaggctctgagaaggacacagggaagaaaatcacacagtttttgccctggctatctaataaaaagacagacagatctaaaactgtcatccaagaccggttatgataagtgcaataacacaagtatgagcattgtataataagaataatgaggatggaggagaaatggacacttatttgggacaaataaattggactaaaacatatttccattttataatctctgaatttgaagaccctgtagttcatcttgtagtacagccaccccttttgtcatgacagtttcaacatgactccccaaactacagttgttgcaaacccttttccagaagtttatatggaagagttaaaattyatgcctgacagatttcataagggtaagattgtgaaccagtggtcgatttgcctgcctttttatggtttataccttctgcctccctctccaggagttcatatgccttaattggctgagtatgttatggccttgcttttcctaaagcagcagttctcaaaggtttgtcttgttagaaatgtaaattctatgatccaacaccagacctactaaatcagaaactctgaggatacgacccagcaatctgtgtttcaataaggctttccagtgattctcgtggacaatcaagtttgagaatcactgatctataagagagagagattatcatacaggactgaggaccaacaccacaatcccaaaattactttctaaagagaagcccctttattcactatgtgatggcagtggtaacaggaacatcacaaaccctttgtcctaactattcagagatatttgcattccaacagagaccccagtagctacagttgttaggggaatcctccagtcacacctcatatgtgacaaatttctatcccttggagacttgaaccaactgacaattcaaagaggaatttacggggcaggattcaaacactagtgagcagaggattcatatagcctctctcagcccagtccttctcagtgctaccttttgaccagagctgtcagctgtagaaaggatttcatctgttcctgtggaaaaaaaacaacctaacctgcccacctgctgctagatcccctgctggctaggtccttgattttgaatgttacccttcaaaggctgcttatgctcctgttagcaacaaaaggaaatcgctgtaacttttctagccctgagtctgttttctttcgaaagacattaatcagaaatgcaatgtagtaaattgcatcttctttcagcaatttagttttcagccttgtttttcaaaccaactattgtgcttgaggttaatgttgttgcctgaggtgttaaacgaatatcggagatttgacaccgaagacaaaagacaacaaataagggaagaggagaatggaaccaagagttgattgaaggctagggataatttgactattccatgaaaataacaaatacagaatgaattagaccttttgcatcagaactgtctaacaagcagcttgttagttaaataaggctcccagtaaagtgtattctgacctgcatttcccaagatgctctgttcttcagaccaagctccaaacacctagaggattcagcatttagttaaagtggagaagcaattcctttggggttgctgctttagcatagtgacagcaggtagacagcttggcagcagcctgtattctctagagaacaggaaaaaagacacttgtgaggggtgatattccccatgcatgtttctagagtcacattggacatgcccatctaagttcaagttatcttgctctaaccaacaacagcagggagaagttcttgttttcaaaggttcaaccaagcaaagcatccatctcattcatgtctgtgaatcaaaggagagcccaagcaaagacagaaagtatgcaatgcctgccgttgagcgtacacaagaccacacatatagacacacaaaaccaacacaaacgacagttatgctgggcacatagctgctgtacacatgtgcagggccagccgcatgacagtccagacagtagcttctatcatcttacttgaaagatttagaagagttctatatattattgaattgaaaatgtttcagaaaaagacaaatttttaaggaccaaaactcaggttgaaggtagttttgatgtggcaaaaattcaagaactcaagatgcttcctcgaggcagaccaagtrcaggccaagtagggctgactaatttcaatggtgatttgaggaagccagggactctctggaagaggaaacagggaggcaccataatgggaataggaaaaacacagaaagcaggactgtggtaatatcaaaggcagaccctcaccgtacatacctcactactcagctaggatctaactttggaaaaaaatgaaytatacaggctgccttagatataagaagcataatcaaaatagtttatataaatgggagggaaggaactatattttagtggctgtggggaatcaggaaaaacaaaccagatacaaggctaccatccacaattattaagaaaatagaatttagaatctgggagtgcacaaaatggcagttgagctgaacgaagtggcacaatatgccatacttccaaagaatatatatgaaggctccctaatggccatttggagctgatgtagcctgcctgggaaagcaagtacactcaagagctttctttttgaaatggagagtttgcctaagaggtagatttttcctaaatttctgcatgcagtgtcagtcaagattactgcaaattaaaaagaatactttaatactgtcctgaaatttagacaatttaaactgacactggatgactgatattgttcaaagattacagtaagtactagtaatccaggaataaaaagacctaagagttattctcgtgaaaaatggatgacatggagtgtataaataatgggagcaaatgcagcaagatacagggaatcttggaacatttaaagtctaatacattacaaagggagttcaatactgataaatgtagaatataagttttatggggttttatcatatgctgtaagtttgtgtggatcataaaatatgaggaataagaaagaaggggagttgaaagacaagtctgtgagcattatttatgagtgatgaagagtgaaatgaatgaaaagaagaacaggtagacagtgtcttgaataatgatgactttgatgagtcattatcacacaaatatgtgtgcttcataaaacatgaggaatattaagaagcagaagagtcaaaagacaagtctactcagaacgagatacagaatgaaggaagagaggaatacaagggaaatgcacagaataatgataacttttatgagactttcactcaccagcttggaccttcataaatataagccatatagaaaataaaagaacagcagagaggagagacaggtctgtgtgtgtcataaaatatgagaaaataatgccaactaggcttgacaaaataaaaacaaaaataattgagcctagtacagctgtggaaagacacaatgtctagattaatgtgagcaaataaaaagagtgactttggaattgtcttgcgaatagggaatcagcaagcacctaggtaggtgttattgttgtaaaggccaccttgttaactggtggaggcttggcaaggtaataactaacccccaccatactcccaaagcagctaacagcattgagagctcaggaaacaatgcttaactaatttctaaattgtttggcatcactacagtctcttcacagcccccctggaaccaatccatatgtcatttgcaggagattttctcagcttgtttccattcaatctacacccaccttgtcaaaagttgctctgtaaagacatctaaaaggttactgtataaaatcagagatgtccttttattttcatttcttgttacattggacttagaacctgggaccagatctgccagaattagttcaaaatccagaactcaatgacttcaaatgtcttctctattagaacaaatgggatttcaaaatgatacagaaattgggacaatcaaacatggcgaagcaagtgccagtatgccatttgcatgccactcagaaccatgatttacataattcataaaatggacagctcactggaaaaaagccactgatctatgtcacagagctatgaatgttggtctgagagttcagaaaatacacaaacactaatagcaacaattacactcgcttactttgcgtaatacttaatggcttgtaacttttgttgggaaagcccttacgtagaagaggataaatcctattagcataacttataaccaattcctctgattgcaacagaatttagtagtgaggtttattggctaaaacatatacaaccaactctggcttattataagctaccatctgtagcttattcaaaggtgttttactttctctcaaatgatgtttgtggccatgagcctttacattcctccctttactttctgattctgttaaaagaatgtataattccaggatgaaatgattaggattaatctgaaaagccatgtttgtctgaataacatggtcccctttaatccaagattgagctgccctggatacccagaatcccacttggttwaaaaaaaaaaaaaaaaaaaaaaaaggtggtattgatgccctaggaaaaatcactgaccttgctcaaccttcctcaaccctgccagctccagctataaaattcatgtccaagagctcagggctgccaagactaggattaaactctggtgaaaaaactgtcccttcctcccagcagaccagtgaaaaaaatccttgcttgggatttgtcccagggcactcttcttaactgccagcctcctgaaatttgttacagcttgtcagccaggctagcgctgaaagtcttgtatgttttagtggactatgtccctgaaagagagccctatttagggactagtttaatggaattccattttttagtaaggatgggactcatttgtttaaagggaaagtgtcttgaaatattttatttaaattaggcaagaaaagcagtataccattgtcagggatcatgtctcttttgcagactttaacttaaagtgtgctcaactaaatttgtttgtttggttggctggttgttttaccagaaaaaggcactttagcagtgtatatcaggaggcttaaaaatattcatactatatatgtaaatgcatagaaaatgcacacaacaaactaatagtgctgagtacctctgatgagaacaccaagaagcaggaaaaaggcggtcagtagggactttagtcttatcttacaatatatttatgtattaactaatgtaattaactttaattttgataagagaaaagtatcattccacaactaggactctctctcaaggaaataataagaaatttaaggcagaaaaaaattaagaaacaacaaaatgtccgaaaatcaggggtaggttaagcaagttataggatactaatttaagggtgtattatataataacaaaaatgatatattaaggaatttctaaatacattggacaatattaataatatgcttttaaccttaaaatatctagattcagaaccatacttagtatgattctaattttgatggggaaaaaaaaaaactcctccccagaatgttattagtagttttctactggttggtgaaattattgttttctttgttatacttgactgttttccaaagtttctacaacttgacttctagaatctagtctcaacatgcttttctgtttgcctttggtcttgtgttgcaggcgtgcctgtgtgattcgaggccaagtggtggccatagatggaactcctctagtgggagtgaatgtcagtttcttgcaccacagtgattatgggtttaccatcagccggcaagatggaaggtatgtcaatgttgtttctgatcattgtgggggccaattactgacttctagccaggggtaaaaccagggctcagatgatacagtgatggtaaacccatctttcttcaagttatatctcaaaaagtcattggtgatatttatttcctctatttcctaattaattcaaactggattcctcttctaatccttctcgagtcttcttgaaacccaggccatgtgaaaagttttctatcctttatctaattccatctataaatccaacttcaaagatcagtgacattatgcaaatgataaataaggagctatggaacacataggctatttttccatagtaacccccaaatatttcagaaatgaatgcatcaaaaatatttcttccaaaagtacagaattccaccacattaatggagaagctttaaaaatgtgtcctccctaggctgcctatttgactattggctgcaactgatagacaagcttggccagcctacttaattatagtgatttatcctgaagcaccaaccaccaggctgctctctaagggggttctctaagatctgagaagcaagaccttgaagtaaaaccttctcatcctggaaaaggatttgctcacaacaacatttttgttgccgtcatttagacagacattgattcagaatatttgggtcaataggcccatgtgtccagcttaaaggtacctatttatgactctcagggacactgtaataatggctttgaggtgccctagtctccaggtgactacccttaaaatgtcctactcataacaagccacttcaataatcatacgcaaaaaaagacctgttggcttcgagctttatcacactgtgagaaactatctcatttcaagaacctacaatcaaaccttattagtcctagacactttagaaatgttaattgttcaacttgggctgtgccggatttatttttccaagagcctgtcaagaaagtacttataaaaaattagtttaaaaagataataagaaagagttttagcctacttaagaaaataaactgttcttaaggactttagtaaattatataaattatttatgtataaattatattgcttattactaactaaccatctcttcattataacaagctcagcagaactattttggtagcacacacatatatgtacatatatatgcacatatatatgtgtgtgtatatatatatatataaaacttcatttcctttcaaatattctataatcagagttctctattaattcaaatgggtctttctcccaattagattgaataacggaattttggtagtgcactcaccagtaactggtgcttaaaactagcctcacccttgcaaacatcttcaaccatatgccacaaattgagaaatgggttatttctctaaatagaatatgtcttctgagacatttgactttgacttctcgtggaggcctggtaagacctcatttttttagcttacatacaaaggtttcggtgaattatytgatattcacacaagaacctaaaagaatcttgatacctaaaaagtctaaaaatgtttgtgtacagtttacagggaacattaaagagggtaatctttgttgttatttttgtgtctttagttttaagtgaaatgccccaagcccctcctctgctgaactcacagtgacaactgagtttatgtagatgacagatactagtcagaatcccctctagcaataactcccctcaggctccataaaggtgtaaacattcaaaatatgggccccaaatgccaaccagactgttccactgtcatttcctggacataaagtgacagtgtgatgagagtttccatttatatgtctctgcttgttgctacctcagtttgagtaagtacatttcaaaagtagaaaatcataagaaaaatatmcctgaggtcggccgggcacggtggctcaagcctgtaatcccagcactttgggaggctgaggcgggcggatcatgaggtcaggagatcgagactgtcctggctaacacggtgaaaccccgtctctactaaaaatacaaaaaaaaaaaaaaatagctgggcgtggtggcgggcgcctgtagtcccagctactcgggtggctgaggcaggagaattgcttgaacctgggagacagaggttgcagtgagccgagatcgcgccacgttactccagcctgggcaacaaagcgagactctgtctcaaaaaaaaaaaaaaaagaaaaaagaaaaatwtacctgaggtcaaaagagtatagaaaggctgagattagcatctagatacctagtagagagtgtgatatgagagttgctgataggatcctccatgtccaaatctcaatccctccagtcggccacagtgcttatacttttcaccaatggtatcactgctttgggtgaagctgtcagctctctcaaagtccccgttgaatgcaaatatgtcatgtgggatgtagaaatatttacccccattatcaactacttgcaaaagtaaactgacaagtttccctaaagaaccagaaaaggtctagatcatgggaccaaagtaatttattcaaagcagaaggaaggatggtgttgaaagactgagccctttaaaagtatgaagagattagatactcacatagagaagggactacttagcagaaaagaaaaaagcctattctaaaggaaaggtgaatgtttatgagtgtctactgtatgttagacactttcatgaatgtctctgttttcatcctcacaactatctgagataaatatcattattatcatcctccccatttgttgtatgagaaaatttatccagataataaggatagagttcaagatttaaacccaagtaatcttgctcttttcttctatgatttaccaccttcaacttaggtatataaccagtcctcagtcaagtgttgaaagagaactatttgtaaatagttcagctaatgataagcaaaacaggtgaagtgacgacattcttagaagtttcttgagaagtattaaaggtctcaagaactttgttctgaagactagaagatgaagagagggttccctttgattctcctcaaggcaaaagtttattcatttatggataccatgaggcagagagagataagcaatttgcataggtgtcaatagccttccatctgtagataggactrgttggacttatgtgttgacaacaatctccaaacaaataaatcctctcccttgggtcttttatatccactctcatatgacttaataacctgttattaatggcccgtgcaaatggaggtgttttgtggtgggagaaatcccaaagaagtaatcattcagcattctatttggcattggaaatggtttagatggatctctggccacagttccaccttccgtctccatgtcaattaatgagtcagccaggcagtgtttactgtgtataactgcgaggtggaaagatgagaagtgtatcagtcagggctttccagggaaacaacatatgacatagatatagatattgatattattgtcttgagagagggatttattccaaggaatttgcttataagattgtggggattggcaagtctgaaatctgtcgggcaggctagaagactggaaactctcaggaaagagatgcagtggtcttaaggccgaatttcttcttcctcacagaaacagttttgcccacccacattatcaaggatcatctcctttacttaaattcaactgattatagataatagccacatctccraaagacctccacagcaatacctagattggtgtttcattaaataacttagaactataacctaggcaatagagatataaaatgaacgatcataagaagcctaagggaagtcccaaggagaccttaaaaatcagtatctgctcatggagataatcaaaagctgacctatagttcacttgaactacaaaaaaaagaaaacatatggcaaatgtagtagggcaatgaatctgatttgagaagaaatgtaacagttgttgagttcctactatatgcttgacccttaagtctttatctcattcatttacaatagcagctaagagatagattatagaggcttcattttactaacgagaaaactgcatctcaggaaggttaaataactagcccaaagacacaaagctaacagggcagagctgggattcaaacccagatatatatgaaaccaaacccacattctttctacaaaacaagatgcctggcctgtctgtgtaatctttccagaagtacagaataaaagtttttttttaaaaagagagagaataatttccaggcacctatgtttttatctggatagtttatttagttttcatgtttgtgtttgttttttgtttttaaataaataagcacttcaattttgagtcaagagtcaaggtttgggtgaggcagataaacttccccaagaacacatacttaaatccacatagaaggtgaactagaggaaaggtttcttgacaagtagtgtcagattctccccacwacacttgccttaaactgttcctgtagtattatgaattcagaccctctgtcttaaaccataaaccgtttgtgttttcttttttcttttggttcaaacctaaattattttctgtagctaatgcagttcttcaaatcctctttttggaaactgccttaatattaagctactttactgaaaaagcagcaataaaaaacacggtattatccatcctttgttactgttcatttatctttatctgcaagatttctgcaacaaaacacgattggtaatactataataaatataataaatgtcataggaagagagtgatgagatgtccataattaagtctgattccctatcagggctttttatcgttgaaaaagtgttttgctgaaagatcttttttaatgcaggcaattgcttacatctctctcctgtggatttaagttgccttgaatattaagtaacatcatattgccctttatccatttttaacataaaaatgataataatttatcattatcttacttttttatataggagtttatgcttttcagatgctctcaagtacgtcatctcaaagacgtcattatacttaaaagagaagtaatctagtgcagaatgaaatgaaatctgaatctgttcagctccaatgcaatagtcttgtcatagaccacatctagagatagacagagctggcttacagcagaggtagtcttgctttgtcatggatagagaaggagttgttggtgaagttgtgcagggttcattacaggctgtcttacaaaaagaaaccaaaaaccattgtgaagcaaaccagagatcttaaatctgaggtgcaagtagactaggaggccaaagagggtagtcaaatgtagaaggcttggtcgggcatagctgagttcaaagaaattttccctaacaattgtcctctgctgatatctttctccaaatgccatctcaaagacactgtctgctttctgacacgatgtttgtgaccctgaacaagatatttaaccttttggctccttacttttcttatgttacattataggattttttggaaaatgaataatgcatcattctcaaagatgctgctaaatgttagatagtcatctttctgttatctttagcataaggggagcagctgtgtcagatttggctttgcagaaatgcatgcagtgatttttgtttaagatagtgttaaaattaactggtttacaggctgggcgcagtggctcacacctgtaatcccagcactttgggaggccaaggcgggtgaatcatctaaggtcaggagttcaagaacaacctgacgaatatggtgaaatcccatgcctactaaagaatacaaaaattagccttgcatggtggtatgcagctgtagtcccagctactcgggaggctgagacaggagaatcgcttgaacccaggaggcggaggttgcagtgagccgagatcacaccactgcactccagcctggggtgacagagcaagactccatctcaaaaaaaaaaaaaaaaaattggtttacaaatttcaagggaatatcaactggtgacatggaatgtcttcctagaagaccactagatagtgaaaagaagtcatctacggaatgaatacattgctagagagaatttataaaatagacaatacaagtggatatagttgagtccccccaaaaaggaaagggcactgaaattaacctattttttaactgtaattttttaatttttcatttgattgcaactgtcttatgtttttccttcttagctttgacctcgtggccatcggtggcatctctgtcatcttaatcttcgaccgatcccctttcctgcctgagaagagaacactctggttgccttggaatcagtttattgtggtagagaaagtcaccatgcagagagttgtatcagacccgccatcctgcgatatctccaactttatcagcccaaaccctattgtgcttccttcaccgctcacatcatttggagggtcctgtccagagaggggaactattgttcctgagctgcaggtgagtatattggcctttgaatgtataaaataataatatcatggagtggtcaacagtgtataatagctaaattccttttcctattcttgttaccatccttataatgtgctgccctttatttgtcaagagaagtcttcaaatgtttttctggcatacatttttaagacaattggtcagggcattagaatgctgtctgtggccatggaatagaacaagattaagtagctttcataagaattaaactccaatctttgacctaataaacactgtgctctaagaacaaagctagctggcttattagtaataacagtataatccatgagcttggactgtttgtggttctgaaattaaagctccttaagaaatttagtttttgagctgggcgtggcggctcatgcctgtaatcccagcactttgggaggccaaggtgggcagatmacctaaggttgagagttcaagaccagcctgaccaacatggagaaaccctgtctctactaaaaatacaaaattagtcaggcatggtggcacatgcctgtaatcccagctactcaggaggctgaggcaggagaattgcttgaacccgtgagacggaggttgcagtgagctgagactgcaccattgccctccagcctgggcaacaagagtgaaactctgtctcmaaaaaaaaaaaaaaagaaatctacttttcttctgttgtctagtttgtatcattgtcattgttcttagaagacatgacaagttctctcrtctagctgtgtaaagtaaatgtagttttcaagcctgtgcagtttttttttttaaaaaagctttgcttctgagtgttcaagctttatagtcaggagaagacatttttgaacctcgatattttaacattcctgagaattattctttattgaacattcaatattgtcatttcaatattaaactattcaaccatagtacaattccctcaccacattatagaaacattttaatgataattaaatgtggaaaccaccaaaatggactcataggtcttaacagatccagaaatccagaaggaaatgcatgctccaagatagaattgattgttctttcatcataacaccacccaccagctcttagcagtgcctagagaataccacttagataaggctcacacaaaaatactgcccttcaggaaaagcagtccaaagagctaccccttatcttttccattgccctttgcttacaaagggagaaaaaacaagacagtgtttaatgagtacatttgattggtatgccaatcccttcacagatgtcattaggaagtacgggtcttctttcagcacgaaagtttccaggcttatttaggattgcatgttttcttaggaaaatgaactactaagttggtgagtgtcaggctatccttctctattgtacttctgtcaccaactgagaagacagctggtggacaactctggtatcaaatggctaaggtagaggaagaaaaactggcaaagtgtacacaaaaggtatcgtgtcctcagaaacaggagaaagaccaaaaatgctggacaatatgagatgccatatgtttaacaatcagttcttctatgtgcacaagtttggaaaagtaagagagaacaaggttctgaggtaaaaatgaataagagcatgaaaatatctacgctattcatgtcaccttaagtgtattgaataggatgggctttttcttcagaggtcttttgaaagatgaaagtcaaagaacacatgattcaattttagttaccacctttggttatttaactttatctgtggtgataagcaaacaagtaataacaattaattaaagccacatggtatttttactctgagaccaacgtttagtgtaaaatttgcagaggaattggtgagagttatttgcttctcagtcacaagtgccaacttggagaaacttgttcccagccattgctacatccaggcacagagaaatatgtaagaaaaatttgattaaaaatttggcctcagggtcatttcaaagctccaaggaaaacgaatttgatggcatcggtaaagattaattctagggaaactataatctttgtcataaaatatcacttgctgggcctgcttcttgagttcttcctcttagagagcttagcctgaataaggattacaccaatggttttatgatatatgacttaacaccaaacaagattttgtgtatgtctgtataagaaaaagaccccttaatggagcccatagtgctgaattgcttgacattcagcggtatgatctttttcaactcctactaagcagtttttggaacactattgaaaagctgaaattgttccttacacaatctttcctggcatggggaaaaaataaatgcaatccttaaggttgggtcttgtctccattcaggtttggtgcaaaattcaaaacctattatcatacagtctcacaaagattcaagaacaaatgccttgacgtccttagacctgtttaagctctctcctttggcatgtttcaaagacaacaaagcatgcaatatcctcatctacctgcgaccactgacaagagcctatttggctttttttttttttttttatttcaggttgtacaggaggaaattcccattccctccagctttgtgaggctgagttacctgagcagccgcacccctgggtataaaaccctgctacggatccttctgacacattcaacgattcctgtaggcatgataaaagtacacctcacagtagctgtggaagggcgactcacacagaagtggtttcccgccgcaattaatcttgtctacacatttgcttggaacaagaccgacatctatggacagaaggtttggggcctggcagaggctttgggtatgttgaactaattatatgtaaatagcagtattacatgcacagaacagaaaatacttgttacatgttaatttgtatttggaataattactgattttcttctgtttaaaggacctaaggcatttttaatttaaacactaccttgaggccagtttagagttcccttttgacacatttttgcttcaaaaagattttagttctcctttcatgatggctgcgtaccaatggactcatgcaatatctgacttgtaactgtcaccagagccaaatgctgccttctaaatgtgacctttggtgtggcgttctataaggccatgtttttggatttgacatttagactgtcatttctacttagagactacaaaattctaacttatggccatctccacttactatcttttatgtctaagatggttagacttcattaacttgttacttcttcaggttaaataaaaaatcatcctgccttcctattccttttgattttctctaatctcaagactttaaaacctagaatcttatagatagcagggaccttaagaggtcctttgggcctatggttttcaggtatttaattctcccagacaaaaggcatttttttaaaatgaggcagagatagatttgccaatgttttattttgtcaagtaagaatatttttaaaagaactcactatactatactattcctaccactaccataatttcatatatgagggataccttaatagcagaaaagaaaaaaaatagtctgttttaagaaatgatggcaagcaatcgaaccctgacactcagagagagataaactaacaccaaagtctttatctctctcactctgtagaaaacagagaaaccttcctaaggtttctgtatctctgatacaggtctgtagacctgcagtttgggagccattaatccttgtaccttcaggaagcagctcatgtagatcacccttggacagatgagaagattattttaaagctctccaaaagagacatttagacatcctcccttggaagtgtctagcatggtataattcctacagagctgacctatatttcttagactatagtatgtcaattttcttttcccagagggaaagagaaagagagagagagagagagactaatgactcttctctgcccaagagaccctcatatatttaaataattaactcatttgtgttggactttactggaatgcaaggaacatggacaggttcatattacctcagtaaatgggaaattattgtaaagacacacaaaaaaataagaaagtacaagaaataccatcggtagcctcacaagcaggactcaaaacctatagccttgttcaggacacattgcatttctagaaggtctgcatctgctctgtcaacttaaaaccagctcaagtttttccaagtccactgcttcccacagtggtgactcagccatacttaagactgacttcatctctcctcctgccatactaactaccctccttctctctctcagctcttcacattctatgtggtctgctaacttgctgtgtatctcatattcaggttcctcttagagaaaatattgtattgtgtcagccatttactgtgcagtccagaacacccttgtaaggcagaactttagcattaggctgccgtgaaagttgctgaccagcctacagagtcctgcttaatccctattctattgagtgtagtggttatgagaacaactctggagccagactccttccccgggttcaaataattccttctctacttacgagctgtgtgacgctggataaattaatctccaaatgccacagtttctccatctataaagtgaatatcataaagattatgttactcataggtttgttatgatataatgattaaatgaggtgagtaacataaaatgcttggcacattgtaagaattcaacaaatgtcagttgctggtattgctttttttcattttgttgtggccagggtactgtgatcacatagtataaagcatggagtctatgcaggtatttgttgccttagcttctctaagaagggtgttgtgagtataacaggcaagcactttgtgctacttactctccatttgccctccctgcccgccccacccctccgcccccaacaaacacacacacacgcataatctcttttctgtccttctctgtgctctgagaggctggcttccatggactgcattccctgaacaccttgctctttaacttcccacttgatttggtcaatgagtggcaccatctagagactgtagaaagagaacaaactcagggtatttatccctctccccgctttactgcagactacattagacaatagcagcccctgtctagtagcccctcctccaaatccccatgctctctcttgccttctgtatcatcactccatcctcttccccctacaagcccagaaggcttaccagttatgccagtgcttaggtggctctcccttccttgataattctcttaactctgcccatgccttaattcgaactctctgcggtgaacatttacaagtgcgacatctcattcctgctgagaccctcactgaatcatactcaaagcctctaattctcttctccatgatattatcctacagcatttccttcactaggcagataatccaaaattcctccaatttttctctataggtccttattttccaattcttttaatttattatttatttatttatttttattatactttaagttgtagggtacatgtgcacaacgtccaggtttgttacatatgtatacatgcaccatgttggtgtgctgcacccattaactcgtcatatgcattaggtttatctcctaatgctatccctcccccctccccccaccccacaacaggccccggtgtgtgatgttccccttcctgtgtccaagtgttctcattattcaattcccacctatgagtgagaacatgcagtgttcggtttttttgtccttgcgatagtttgctgagaatgacggtttccagcttcatccgtgtccctacaaaggacatgaactcatccttttttatggctgcatagtattccrtggtgtatgtgtgccacattttcttaatccagtctatcattgwtggacatttggrttggttccaagtctttgctattgtgaatagtgccgcgataaacatacgtgtgcatgtgtctttatagcagcatgatttataatcctaatttatttatttttaaacttttattttaagttcaggggtatgtgtgtaggcttgttatataggtaaattcgtgtcacagggtttgttgtacagattgttttggcacccatttactaagcctagtacccaatagttatttttgctgctcctttccctcctcccagcctccaccctcaaataggccccagtgtgtgttgttcccctctttgtgtccatgagttatcatcatttakctcccacttataagagagaacatgcggtatttggttttctgtttctgcgttagtttgctaaggataataacctccagctccatccatgttcccgcaaaagacacaatgtcattcttttttatggctgtacggtattccatggtatataagtaccacatcttttttatccaatctgtcatcgatgggcatttagggtgattccacgtctttgctattgtgaatagtgctgcaatgaacatttgtgtacatatgtctttatagtagaatggtttatattcctacccaaagaatgggatttctgggtcgaatggaaattttgtttttaggtctttgaagaattgacacactgctttccacaatggctgaactaaatttatgctcccaccaacagtgtttaattgttcccttttctccacaaccttgccagcatctattattttttgacttttttaaaatttgcatttctctgatgatgggtgatattgagcttttttaaatatgctattggccacatatatgtcttcttttgaaaagcatctgttcatgccctttgcctactttttaatagggttgctaatttttttcttattaatttgtttaagttccttatagatgctggatattagacatttgtcagatgcatagtttgcaaatattttctcctattctttaggttatctgtttactctcttgatagtttcttttgctgtgcataagctcttaaattttgttagatcccatttgtcaatttttgcttttgttgtgattgcttttggtgtcttcctcatgaaatttttgcctgttgctgtgtccaaaatggtattacctagattgtcttccagggtttttatagttttgggttttacatttaagtctttcatccatcttgagttgatttgtgtatatggtgtaagtaaggggtccagtttcaatctcctgtatgtggctagccagttactgcagcactgttttttgaatagggagtcctttccccattgcttgtttttgtcagctttgttgaggatcaggtggttgtagatgtgtgaccttatttctggcctctctattctgttccattcatctgtgtgtctgtttttataccagtaccatgctgttttggttactgtaaccctgtagtatagtttgaagttgagtaatgtgatgcctccagctttttttgttgttgtttaggattgccttggctatttaggcttttttggggggttccatatgaattttagaggtttttttttttctaattctgggaagaatgtcattggtagtttgatagaaatagcattgaatctgtaaattgctttcggtggtatggccatttttacgatattgatgcttcttatccatgagcatggaatgcttttctgtttgtttatgttatctcagatttatctgagcagtggttttgtaattctctttgagagatttttcacctccctggttaactgtattcctaggtattttattcttcttgtgaatattgtgartggaagtgtgttcctgatttggctttcagcttggctgttggtggtgtataggaatgctagtgatttttgtacattgattttgtatcctgaaactttgctgaagttatcagctaaaggagctttgggaccaaatctatggggatttccagatatagaatcatgttatttgccaacaggatagtttgacttcctgtcttcctatttggatgccttttatttctttttcttgctgtattgctctggccaggacttccaatactatgttgaataggactgatgagagagggcatccttgtcttgtgccagttttcaaggggaatgcttccaggttttgcccattcagtatgatgttggctgtggggttgtcatagatggctcttattaytttgagctatgttccttcaatacctagtttattatagagagtttttaacatgaatgggtgttgaattttatcaaagccatttatgcatctgttgagatcaagtggtttttttctttagttccatttatgtgatgaatcacatttattaatttgagtatgttgaaccaactttacatcccagggatgaagcatacttgaacatagtggattagctttttgaagtgctgctggattcagtttgcaaattttttttttaaggatttttgcatcaatattcatcagggatattggcctgaagttttcttttctgttgtgtctctgccaggttttggcatcaggatgatgctggcctcatagaatgagttggggaggattccctcctcaattttttggaataattctggtgggaatggtaccagctgttctttgtacatctgctagaatttcgctgtgaatccacctggtcctggggtttttgtttgtttgttggttggttggttggttggttggtaggctatttattactgattccgtttcagagctcattattggtctgttcagggaaccaatttcttcctggttcaatcttgggatggtgtatatgtccatgaatttattaatctcttctaggtgttcatagtattttctgatggttatttacatttctgtggagtcagtggtagcatcccctttgttgtttctagttgtatttatttggaccttctctctttttttctttattagtctagctagtggcctatatatcttactaatttttcaaaaaaccaacacctgaattttttgatcttttaaatagtttttcatattttctaattctttatgatcttccttagaccccagttgggtttcgatgggggttgtttttgktttkgtttttksctttttttcttaaattgtgacacttagaaattttctcagtcctctcatgaagagctgaccagtacagcatctagtagtcatttcttgctagggttcacataaatgcagctcagctgcatttttttaataacaggcttattgaggtatatttcatagaccataaagttcactcacttaaagtgtacaattcattggcttttagtattttcacaaggttgtacaactaccaccaatatctaattccagaacattttcatcatcactccacaaagtaaccctgtacatattagcagtcactccccactcctccctcccccaagtcctagaatccactcatctccattttgtctatatggatttatctattggcttgtttttcatggcataatgtttccaaaagatccattttctgaccatggtaaagcatctgaacagttggtagaatgaagctggagaatctactactctgaagatggattgtgagctccataagaacacagtagatgataaatagttcagatgataaatgagtggaaacacataggatcaaatatacaaccattgagctgataccttaatatttatgattaaatctaaataaacaaagaaggaaatgtctatttgtactcctggtgatattttgtaatcacttaactgatatgggaggaaatagaytgaattttgcaccagcaacagtgctgcatctgacacttttcagatttgcttcaaattcagaaatactagtatagctatttggtaggcagaataatagccacccccacaaagatgtccatccttggaaaccatgaatatgttatgttgcatgccaaaagagaattaaggttacagatgaaattgagattgttagcttctgatttgagattggagattatcctggtctatctgggtaggctcaatttgtcataagggtccttataaacagagaagggagtggaaggggaggtcagagttacatgaggatataactatggaagaaaggcacagagagatgcaacattgctggctttgaagatgagggaagagagccacaaactaaggcgtgcaagcacctactagaagctggaaaaggcaaagaaatggattttcccttagagcctctggaaaggaactcagccctatggacacttgatttttgctcagtgagacccatttgagaattctggcctccataactgtaagatgagaaatttttcttgtttaaagcctttaagtttttggtaatttgttacagcagacattggaaactaatataagacatgaccagcattcatgcagtccagttagagcaatgattttggttaaaactgtgactagaaagatctcccactctttctcctcccatgccagttaaatatgaatctctggcccactcacttctgggtgatggagaaagaagggttcaggtttaaacaagctgaatttaaagtgatggtgaatatctaaattagtttgatagttgtgggactcttgttttccatgtagctcggctgtagggaattggtataatctctaagggctagaatatcacaagagaagaatagagtgttgagagacarygaaaatgagaaaagaagtgcttgagatcctaggatataccaccatttttttgtaaggaaacagactttgcaactgaagggataataccagagtgaataaattacaaacaggggttgtatgaactccttccttggagaagtatcagtggtaactgataagattgattaatccaagtacaatattgatcaagtggaagaagagtaaaatcatccccagggttccagtacaaaagycacagtcactagttcatccggcttaaagattttgttgtctgatacacagacaagcctcccctgctaaaaactccatgtgagcgttttaaataatttggacttagtgctttattctttgactctaaataaagtacgatgtctggaaatcattgtattttatttagtttctttcccaactctgctgcttgcaaaacaatgtaaaaaaaaaaatcattactgttaagttcacagggctgttaaaattctagagatggcttatttaatttgacaaactggcttgttcaggggctctgatctgcatccattatgtgaattttgtcaaaataattcccgatgtccgcctgtgtctgcatacattatcaatatgtaataatgcattctgcctcgtctttattttaattaaattaaattgcagcagtttggagtcctggaagttcaggaaatcagccatccgctgttagtagctctgctataaacaattctatttttcttcaaggttattggcaacaacaattgcataattatttagtatagtagtttggcaacgaagaatggtgtttctgggaaaactagacttcctaaaggttcacgacacataggagtctgtctaaattgtgttagagagaaacaggggaacattaatagtaataggtgctaagctatggttgctttgtgcacacaaaacattcctgagaacgatgctttagcgttcataaatttcccttcagtaaaacctaagcaggttgggcagccacaaaaatagcatccactgaatattttaataataaatgagtagtgctttacaatttgcaaactactttcacatatattatctcattttaatccttataacattcctgcctggtaggcatggcagaattagcatgatcttcatgttgcagagggggaaactgagggtcagaaagaaaaagtaactggcctagagtcctgtacagagcagggattcaaactcaggtctcccagtcctgagttgtgtatgcctttcaatgctgcctctcctcactaaagtaaccaacccaccttactgagtacccaattcaatgccccagtggttttctatcagagaagctagcagagataataatctttcatcatttctctccactcatgaattcataatcgttaactgaaagcagggctgttttatccattcaacttcataggcacagtgccaaggatatgagattttcacggacctacaaaatgtttgctacctaaaaaaccagtttattgtcaccagaagatgaaaaggaaatctgaaaatcaacgttaataaatgtttaaataagtgtctgaaaaatggagcaccatgtcagcttgtgaactacaactcaattttcatccttacatatgaratatgtttaatgtaggatatgagttgtatacattttaatatgggttataagatataggatatccaaaagtaagagttcctaccaaggttttcaaatggccttcactaatactttcataagcaagtggtcttgtgcccatttcaaactgctggtcacacccattagtagactgtgaaatctatttggtgagtcaaccagcgttttcgttttgaaaaattgaatagaatgtgatggaatataatagaaccgaagtgaacagaattaaatagaacataccagaatgtgatgctacaaagacagtattgtctcagaaaaacttcaagtgtgtgtgtgtgtgtgtgtgtgtgtgtgtgtgtatctccccatgtggatgctgggtcacaattaacgagttgtgtttctcatcatgactttcagacatgaaagtttaaaagccattggtaagatgataagcccagaaacagaaaaattaaatgacttatcaaaccatgtgacttattttccaaatcagcatttatgactgttcttgtcttctggtcccctctaccaacccatatcagaggggactacggaggtatgccttcaacattgagtgaccacataatttatcattcaaaccagatacttttgagagtaaaaggagatactgttaataattacatcaagaaaacaacataaccaagcaccatttttggccatttgggttacatggcacctctacttcaaggctatccctagcttccagtccttgtctcttaaattctgaacaaataaaaagttatttatttagcactactgaattgcgggtcttcccccttagtagctgttatctagcatagtagatgaaagcatttgcctatgaattactgggtttgagctctggctttgccatttactaaccatgtgaccttggacttaataacttcatttctttgagtctctatgatatctatcaaactggagtaaatatagtttcctcatgagtttgagtcttcaaattaggtcatatgcacaaaaacatatctaattgttatgtattatacaaatgtaaggcatattattttgtggtaattattagggagatcattgataaaaattccagaaagtaggctgggcatggtggctcacgcctgtaatcccagcactctgggaggccaaggcgggtggatgacctaaggccaggagttcaagaccagccttgccaacatagtgaaacaccgtctctactaaaaataaaaaaaaaattagccaggcgtggtggcrcatgcctgtaatcccaactactcgggaggctgaggcaggagaatcacttgaacctgggaggtggaggctacaatgagccgtgatcacaccactgcactccagcctgggcaacaagagtgaaactctgtctaaaaaaaaaaaaaaaaaaaaaaaaattccagaaagtaggtaatccttcaaggtatggcttctctcacatgaaaaattatccttccctgtataatattcagtatatctccagtgcttcacagatcacctgcctggcacgtagagcagcttggcgaaggtttgctgtgtcattaaataacagcacctcactttccattacaatattgaatcccttttagtcggtcacattgtttcaaaggatagccagtccattttcaaggtgagtctgtttccaaaacccctgcctcccctcaaaatatgcctaaatactgctaggggatagtaatcttacaattttttactgggtrgggacagggagggttgttgttcttcacttgtttttgatgcactggagagaaactgactctctrgccaccctgaccttctttaaatctctcaatagctaccaagtctcaaggccttccacacatgccactctctctgcctagaatgccctcccctataaaggtaaaccctttcttggtaaagaggcttttccttgcctccacagtccaacataratttcctggttacactctctcataatgctcagcattctcccatcataacctttattacaatttgtgtttgtgtgtgtgtgtgtgtgtttgtgtgtgtgtgtgtgttatttgttttacttttatatttgttcttcccacttgaatataacctccactggggggagggatgctgtcttgttcaacctcatatccccagtgccccacaaactgcctgtcaacaagaggtacccatgaaatattgcatatttgttgaatgaccgaacaaagaaatgaataccaacagaggatcagggtgatcccttagccttgcctatataatggaatggtgggtctgcccagagagaggagggcagtgcccaggtacacaaaggcactcacaaatgttatacmtgagccagtatatcacyctgcctttgatggcaatataggttatccatgttggcttttatgcagctaggcttggacaaagcagccagaaaaaaatctcataatatcaggttttactgtacggaacctcttggcaaaagtgttgcatagctgtctcactmctggattcttttaatttcctacctgtactttctcttcattcaactgcctcactctaacactatcatatttaacccttatttttgtaaatagatagggtaaagatcttaagtcagggattgccaaatcaaatccagtgattcactgaaaggataatacatcatgtccaggtaaagtttattttagggcaagaaagatggttcaacgttaggaaatctattgctataattcactgtcttaacagattaaaggggaaaactatgtgaatttgtccgtaagtgtcaaaaagacacttgatgaaaattcaacacctgattctgacactcttagtaagctaggaataatagataaacaaagtatttcaggccactgggcagtgtgtcaaattgagaaacctctgggctcatcctatcctacgataaatcactagagaatagggaaagatagaagaatctctgagagcaggtacttgttttacatagatagtattttgtctacatagtattggtctattttgccatggccttcatttggttctttcggttttttgtcttttgttgttgtttttgtttttgcattaatcttgtattttaaaagaatggaaaatatttattgctatattcaataattcctttcggagaagaagattttcatcttgtaattaggtaccttttaaatatcatgaaattatttttagatgttccctgagttcatgaaggtaacatgtaaatttctcacattgactatcagacgacttgtaattatatattgccttcataaatgcaaccattataaattctgaggccttagcctgaagctgttgaaagtcatctgcttaatcttgtcatatttcacacgtcagcttcattgcatggcacctttaccttggctacttaatgtcartctcctatcctagcccttatagatgaatgtcacagtaactaaactaagttatcagggacgccgtgaccctcagccttcttgccatccccatgtcatacaaatgctgctgctctgataagtagaatgaacattcagttatttttccaatgtcaaatggctttggaggagcaagctacaatcttttactcagtcttctttacaagccagtgtaatatttgcaagatgactaacagtgaagtcagaggtgcaatcctgtgaccagaggatagaatcctctgcaaaagtaacacgactatctagacaattagtgactcttggttaaggagcattccgttaatatctctgtgtggaggtgaaggagagaatacaggaaggcagaaatccagatgaaattagaagagtcacaagggaggtgatcacatggctcagagaaagtattattccataataattactcactctcaactgccttctcaatatatgcacaccagcacgaacccattatgctaacccctgggaagtgtagtccaggaccccttatccacttattcctgctcactgccagtctagtctactttctacagcttctctgagatgttaatgaatttttttttcctttctattacactattctccctagtccctactccagagtgctagagactgaatccgtgccctgtaccatgctatgttgatgatcagacgtgatagacaacaggccgcctgggaaatggtagtggtccactgtgcttatttagctgaggctcagctgtcatagtgtcaggcagagcatggtgtcaagacagggttttcagtgccagctgcagtgtaaccttttttccctatatttaattatgtgaaaaaagtaggcatttagtgcatwatagtctgcttccatgacaaagtctaggattagttgctactgtatttgctrgttctygtgagcttggagagaagctcaactccatggggtgaaacatttgccttctcataagctgattgcaagttccaggattatgttaaagtgggctgctgtgagaaagaaactttgccttgttaccctgagcaaggagccacatacgaaaataccccgacacacagctatyctcattaaagtcagctggaaattttggacaagtcttaaatataaattataacttcattagctcatagagctttcttgggagaaagtaaatctaataaaaattagagggaacttagtaagtggttgccttgttgctatttgctgtggctggggaaaaaaagtaatataattgtggggtttgcagccaatgcacttttttgttgtgaactggagagcaattcagagagcagataggaggaggtgaaaagagtatgtatgtctcattaccactgcattgagaactccttaattgatgctttatgtaagcatttcctgctgcagagttgggaggatctttaactgttactgagagagaaaaagcaggctccaaaccaccatcacaggtcaccagggcacactacttatttgcaaaactgcgcaatcaccttccggagaagggattcttaggagagctcaccagacttacaatgtacagaaggcaaatccagtaattgccaggagtactgtggggaaggagatgatggctttaagggaacttgtaattattgtcgttgtgattatttattaatcaagacttttaaatgttggcaggagaagcagaaactgtgttatcctacacaccaacatggccctcagtgtgctctctaaccacctgatttttccagcataagattcagtgttctatttggcttttgggtttgatcctcaaccagaagttaycaaatgtaatctagaaagaatgcaatttagagtgttagtgctaaagaaggattaaaaggattgtctactacagttgtctttgatctgakatctttatttggacttcagaaagtcagtgaactccctagagttatatagaaaattttgtacgcatatgcatttttccaggaagaatgtccataactttaattagactcacaacaaagtgctccctgacccaaaagcgtctaagaaccaccagttctagtcactccctcccactacgctaccagtgaaaagcccaactccagaaatggagaataacttgcctgagcccacacagctagttaatgatagatctgagagttgaagtcttttctaactcttggtccaaaaccaactctttgcactttaccagagttgttttagcaagtagaggggctgtaggagataccagggagactgtagacagtattgatttgtaccataagtgtaacgaactagattacctttgagatccctttcccctctgagagtctatttccactgttaatagagaacagcattgacagagacgattagtttcctcccccrcccccagtccrttggcctctgttgctaataacgcttggttgaggattatattaaaatgagtctgcatttcatgagtctttaccagctgatggctgatagaagggcatccccgccaggaatggctacataatttgcagggcccagtgaaatgaaaacggaaatacagagcctcttgtttaaaaagtattacaaacttcaagacagtgactgcagagcattaaatcaagtgtggggccctcctaagcatgggtcrtatccatgaagatggccctgatccctgttataagctttggtagagtggaggacaaagagaagccagcctgcaatttaaaattggccacaaatgatccacaaagtcagagagttggatatttgtgattacagggactttttggcttctctgtgaatgtgctcacatacacatgcacatgcacatgcacacacaaatcagtttgactaaaattaccatcttttcccttcacctaatgccaaaaaccaaaaccagttggctttattttttcactttcggacctattgttctggcattgtttaagcaygcattttcacttccagttttcataaccaaatgacaaaggaaggactgagctcttcaggggcatctaaagagtcaggcagaggcaggtactcgaaagctatggcagaccacagaccaacaggggctattttaagctgccagaaagagggaaagccgcttcaggatatgcagtataatgagccagtgttctcaggcttagaacattatgaggatagaaagcattgtaaatttaagaatcagaaatctggggttccaacaggtgagcaggtttaccaagagggaaaatggctaggacttggtatacttaagctatacatagttcagtagagcaaagactctcaagctaccacattctgcatttcacatttcagtggcataccgaggttccacgtttaatgtacaacatctgtgctgcatagcagttgaggacaaatgttgggtgatgtcccattggttagttatatgcagaaaccaaaacataacgtgcacaaagtggaatttacacttgcaacactctaagcaaacttagtctcagcaaaccaaaagccagttagcacaggaaaacataaattgggcaaatccatttgtattagttgcatatgtagttggttgctgtataagtgacctagtactccaaaggcagcttgctgagtgcatttttcactatagtggtaaaaaaccagccctacctgcacttctcctacaaaggcagagagaaatactaccacagcttaatcctgcagaaagcatctctcttcagttttacagcacagcctccaacccaaaagcccaaaataaagcctaatgtscataaacatatggtaccaacctaataagagcatttatttactcactccttcatatatttatccgatatgcmctgatcacttttgagtgaccaatgctatgctagatgcaatgttgtactgtgctaggtgaaagaaatttgcagtcaaatttcaactctaatcagaattcagtagccaaagtgatatccacagaattatcaactagtataaacatgaagcaaatattttacagttttctaatgtgctgttaactctttgtttgcagtatctgtgggatatgaatatgaaacgtgccctgactttattctctgggagcaaaggacagtcgttttacaaggttttgagatggatgcttctaacctaggaggctggtctttgaataagcatcacattttgaatcctcaaagtggtaagtagctttttaaatttgtatgaatactactttcctaatgctgtataatacatatttattgcagaaaatttggaaagtacaagataaaaattacttgtgagaatactacttagagatgaccgcattaaacataataattctattttgaattactcttagtgtggtaagaatcggaacactctcatcttaatctatcccttctttggaccactctccctgctgttctccttgtttgcgatttaaatgttaaacaaatcaggagaagggggcagaggtggcccctgagtttgtgcttttcccagacaaactgagtttgctaccctggttataactccttcatccaagttccttcacctactcttgcatcttagtgggaaacccgtcactggtgttttcatacagctttcctctgagcgtctactgtgaaatcatatcccttttcatctaaagagacagattctgaacaagctatagtaggacatgtacattgggttatttttccagaattggggatcagaatgtactgaagcccctacacacttccatccagccatccttgtatccatcctaactttgtggaacaggtggttaaggcgaggcgatcttataaggccatgaactgaccaaactaagrgatccattttataatcacacctatgatatcacttcatctgtactatagccaaatcagctatgtcaaccagccccacaggctgagaaactttgaatggcaaagctaaccagatttacttcaaccatagaaagagaccgcctactatagtcccagtgtgggactctgaaggtgaatgagtctattgctgtatgcccccattataactctttctcctccttcaaggaagattctgaattccatatcaaacagtttatttttttttaagagcaaagattcaggctgagatataaaaggtcaactttttttctgttgtcaaaaggaaagccacagttttaaaagtacaaaaatgaaagggcagatgccacttattaaattattaggttttctgttttgatttgaaagagtttgacattttaagcagccgtttcttttccactcacttatattggcttgtatggattgtctctttcaaatgcctgtcattgacattaaacacaaagtgggaaatgacctcaatcgagccagcccccagctgtgtgctcccagtcttgtatcctcttaccatttgcttcacacagacttgaaacattcagaacagaagggagtcattcagaaagttggctttggggggggccccctgattttcacaaatgtgttatctccaattcaccagtaattagtttttaggtaataggcatcaaattatttctgagaatttttaacagctttattgaagtataatttatacatcataaaatttacccattataaatgtacacttcagtgatttttagtaaatttgtagttgtgcaaccatcaccaaaacccagttttagaatatttttatcacccccaaaagattttgtgtgctcattcacagccccactaaatctgctttgtgtttctacctttctgagaaatttattctgagaaagaagccttcctttggatagtcttttaaaaaggaacatttgttcattttatcatctcatttgtagatgtgtatttccaaccaagaactcatcacacttgccgggaaacagatctgaagccagctctgctgctgcctttcagcctgaccttggacacgaaaacctctcttgggatgttttcgaagtctaaatcccacccacaaaggcagttttagaggcaggaatgataagtgtgatggagcagctttgggaagaccaatttagaaagcaatgctctttccccctcgggtcagacagtcttttctgactgattaagctgattaaggcaagagcaacatctctccaaattcccccactctgcttctctctggaaaaaaacgtaactctttaggcatcctgcttttttgatcagagacagatagcagattaaaaacaagaatctatcttcccccagtttcctctcactggttaaaaagacacctgtaattagactggatgtctgttgccattctattcttcagttttctttggctccaaaatcattatgcaatgggtagtttctagcaggcagtgttttcagaccatttgtcatttccattgctgcaattatatttacctgacagttaaccattgsttgtggagaattgtttcccaatattaggcctgatatataaagatggttctgattttcactgagataaaaacatcagaaacttgtggttttcaacattattccttttaagttcatcttcttagtgattataaagagggtatattcattcattttaagaaaactcagttctttaaaattataagaaagttgtgcatatctgttacagaactaagctatttgtttggtgtatcttttaccaaacatatcccctagggtttcctggcagtcgagtgtttaaaattattaaaaagaacaatctagggcactaagtgggtattgtcatctgtctcaaaattggtaaagaatttcttttaacttatcctccaaaataggccagtagtttgccgacaaatggttttactgggaggagaagtaaatgtccattgatcacactggcatacctcccagtttgtgtttatatcctctcagtcaagtactaagagaaatatgtgttgtgtctctttgttgttcataaatctgaaaaatggtttcttccttgaaatcagcataaagcaccacccactggctttcaaggagattttttatttcagacatatttataagcatcaaaagaagttctgaacaaagtagcaagagggtatgactggtatgtttaaaagtgtgcttaccttattatacaatgggcttggctttttggcaaagaaaaggaaaactttgaagagaaaatgtgcagtaagccccattcagtggggtttcgttaactgtaaacaagatacccaatccttagcaggaagttggccttcacataaataatgtgtgttgtcctaggatcattggattcccttttcaaaatgagcatgtgtggcagaagaaactggaaaggaggcagcagtaattgatcaagatttctaggaacataaacaaaatattttcaaagcaacattttgcaaaagaattggtgttaaatcatggttgctagatggtatgccctggttctgtgtaatggaaggttaaacagattcttgaaacaacaaaaacacccttcaaaatgatctatttttccagggcaatacaaaaggggtttgcccatttttgttttgattgcttcagctttaaacagaaatggtcatttcagtacacgggcactttagtaccttgcatgaaagccagacatcaattgttgagatgtaatcagaaagtacattgccttatgttttatttcctttaatcattcttcttctttgatggagtgttgggctttctaatagaaaaggggagttttagaattgcaggcttagaagaatggtttagaatagccatctttagttctaaaattgccaggaggctggtaataacatgtcattttgagggtaattgttaactataccattatattgatataaaaaaatggagatctacctgtgaaaatagatgttaatagcaaatctggtatttccaagccaataattggaaagatttttgaatgatatacactatagtgcattgctgaaatactgacatgctaaacagtggtttcctcatttattaaagaacatatcatagtctcatttgtagaatattctgttagcaatcatcgggagatttctcttcaatgatgttgtgcaactgtcattccagttctcattcacctcctcctaatttatttgaattacaatattgaccacactgcaattaaatgttttttgagaaaagaaattcagtcctattcatcttacttaattaactattctaaatcttaagaaaggtccctactacctaataaagttattaataaaataataagaaagtagtgatcctcaagatatctcatagttctgcaataaaagaccaatttgttagggcataaactcacagctgctcctgcaaatcatgtgttgcaaaagtagccagaaatcaccctggaaggaaaagtaaaaatgcttaaatttgaaatccaatactatatgatggatgggatttctgtttgctggaaggccctttccaaccatatattccaccatggtattatagcatgttttaccctcttgtttatttttgccagcaatgttcctacctcagagtgatcaatagtttctgtggtaggactgtggtacccaaagttggaagaaaactaaagagacatttcaggaaatgtttagggagaataacaggcaatgcaaggagatagacagcagggggaaagggagaaaaaaataaggcttaactgtataactgcattcattcatttgctattaktgacttcagtctgacacatgggcatgccttcccacaacatggatgtttcacctgccctggctcactctgggctgacttgagctatttagcacagcagtacttgttcctcggattttctgcccaggctcagcaggtttgcaaaatcattggaatttagacaaggaaactacgagaaactcaaagcctattttcaacatttaccgagcacttataatgatttggccacagggattggcactaaaatgcagaaaggagtaagacagaggatctgccttcaaggagctcattcatgttctaatgggaaagacagagaagtaataaaaactgtatcacacatgtggtaaatgttataacagagctatggaaaacaaactatgggcacacagaggagggagtaactgactctgcctggatggagcattgaggaaaactggagctgagctttaaaggatgaatagaacctccccaagcagacaagatgaggaaggcattcaagataaagacaatagcatggacaaaaacatagaggaatggaagtaggtgaaagtaaccataagtagyttgttctggctagatctcaggatatagatgaaagcatgatgagaggggagactgaagaagtagtcaagggccaaatcatgaaggactttttgtgccttaacagtaaggaatgtgccctttatcctaaagggatatggagctattgaaaggtattaaaccacagactgaaataatctctatggcaggagtggggacgaagatctggaaatggatatgcatggagaccaggagaccaagaagttaagaaaaactaaactaatgtaggaataggggagaaagaactggtttcaacacattttaagggatagactcaatgggagttaatgattaatcaggtttcaagaatggggggaaagaagagccatggtgatgtccagatttccaatttaggtaattgtatgcatggtacaaccactcacaagatgattagggaacacaagaggaagagcagggtttgggagtggttgcagaaaaataatgagttcagtttttgtatgttccagtctgaagtaattgcgggggatccaagtaaagaggtctagaaggaaatggcatgtcagttaagaactctggatgggagaaagtttcagcatatagaaatgggagttaaagccgtgggtatggatgagattgcccacacagaatgtctgcaaagcattttcataagtcagtatctctatttcctgcactgatgatagtgcgatatggtccaaaagagtggaaaattcaagtttctttcatatttctttgaagtgcattctagcagtaggatttcttttcttttcacagaagtagattaccttcctgattgtgttttgctaaggttaatattaaaattgaccgatattctcgtttcaggaactggtttcatagtgagggtaatttgaagtcagacgggtatgtgctaggcatcagaaaagagccagccagatatgaaaatgtagccacagatgattcacagagcccagagtgaataggtcattaaaagttagtcatcaaatgctttattgagtcatttagaatcaacattacaaggactggttgtattaccctacttcacagatggacaaactgaggcaaagtattatgctactatttgttgtggttatgcagttaaacaaaaccgaggaaagtgtgtgtttcactctcaggttctcttatgccaggccaaagctccttcctgcttgggatgatgaagaataaattaaaatattgctgagattattttgtggtaattgcttttcttaaattctctttttgttttccttgaatytaggaatcatacataaagggaatggagaaaatatgttcatttcccagcagcccccagtcatatcaaccataatgggtaatggacaccaaaggagtgtagcctgcaccaactgcaatggcccagcccacaacaacaaactctttgctcctgtcgccttagcttctggccctgatggcagtgtgtatgttggcgacttcaattttrtaaggagaatatttccctcgggaaactccgttagtattttggaattaaggtaagtcttctctaatctctatatatttgcttagcagataaagcaaaaagcaakataatatgaaaagacaaagcaytgccagtagaagcagaaaatgtagttgcccctattgtagcactgagttaagatgcaggaatagggacaaaggtcaacatgctcactcttcctacttgaaggattgatcctttgagcactactttggagaagcaggaagtgttaacatccctgtatgtatgtccttccctgtaaacagtgctgacactgacatggatctcaatacttccaagcactcaagtaagtcactcattcactgctagccactgtgaagactcatcaaaactattccattctagttgggagaggtattgtcagatccaaaaggctaaacttcataagtttttatttccaatctttggaaatggtcatttcataaacaagaaaacggaaatctggttttcatggcatgataaaggagggagaaatggttctttacccttgaaagccctaccccatgataattaaagcatttatctttaaattttctcacatggtttaggaattttcttgagagtacaaagtattttgacaccttttgtaaggaattcgtagcttttagtattccatatcctgaagttccacaaagattatgactaaattgactgtggcttaattcacttatttcttccctttctgagattataagacacaaatgtgtatcttctggtgttatagaaaagggaagcttctagggtttttatggtgttaggtctaacgtttaagtctttaatccatcttgaattgatttttgtgtaaggtgtaaggaagggatccagtttcagctttctacatatggctagccagttttcccagcatcatttattaaatagggaatcctttccccaatgcttgtttttctcagttttgtcaaagatcagatagttgtagatatgcggtgttatttctgagggctctgttctgttccattgatctatatctctgttttggtaccagtaccatgctgttttggttactgtagccttgtagtatagtttgaagtcaggtagtgtgatgcctccagctttgttcttttggcttaggattgacttggcgatgcgggctcttttttggttccatatgaactttaaaatagttttttccaattctgtgaagaaaggcattggtagcttgatggggatggcattgaatctgtaaattaccttgggcagtatggccattttcacgatattgattcttcctacccatgagcatggaatgttcttccatttctttgtatcctcttttatttccttgagcagtggtttgtagttctccttgaagaggtccttcacatcccttgtaagttggattcctagcaccataaaaaccctagaagaaaacctaggcattaccattcaggacataggcatgggcaaggacttcatgtctaaaacaccaaaagcaatggcaacaaaagacaaaattgacaaatgggatctaattaaactacagagcttctgcacagcaaaagaaactaccatcagagtgaacaggcaacctacaaaatgggagaaaattttcgcaacctactcatctgacaaagggctaatatccaggatctacaatgaactcaaacaaatttacaagaaaaaaacaaacaaccccatcaaaaagtgggtgaaggacatgaacagacacctctcaaaagaagacatttatgcagccaaaaaacacatgaaaaaatgctcaccatcactggccatcagagaaatgcaaatcaaaaccacaatgagataccatctcacaccagttagaatggcaatcattaaaaagtcaggaaacaacaggtgctggagaggatgtggagaaataggaacacttttacactgttggtgggactgtaaactagttcaaccattatggaagtcagtgtggcgattcctcagggatctagaactggaaataccatttgacccagccatcccattactgggtatatacccaaaggactataaatcatgctgctataaagacacatgcacacgtatgtttattgcggcattattcacgatagcaaagacttggaaccaacccaaatgtccaacaatgatagactggattaagaaaatgtggcacatatacaccatgraatactatgcagccataaaaaatgatgagttcatgtcctttgtagggacatggatgaaattggaaatcatcattctcagtaaactatcgcaagagcagaaaaccaaacaccgcatattctcactcataggtgggaattgaacaatgagatcacatggacacaggaaggggaatatcacactctggggactgttgtggggtgggggarggggggagggatagcattgggagatatacctaatgctagatgacgagttagtgggtgcagcgcaccagcatggcacatgtatacatatgtaactaacctgtacaatgtgcacatgtaccctaaaacttaaagtataataataaaaaataaataaataaataaataaaagaaaagggaagcttcaactcctgtctccttaagaataaacaaacctgtttcctttcccctgggtaaactggtagagccttctttctagttatgacagctgtattcctgacacatgcctctggaacatttggctttaagtttctctatgttcagaagatctagatgctatcctatgaactattccataaaacaattttttcttcaggcatctcctcaatgacctgacaaatagtgatcaaatatagtgactagaagagcatagacattgacagagcaacttgtatgtgcatggcatcatcaaagccaattaaaacacatgaaaagtcttgggtcattttcatttaacacttactttcacacaagcatgtgaaagtccaaagggcatttctcaaaatttttcagattctcatgcttgctatggaatatacctccattttctaatactgagtgttattccctaacacctagctggggaaatcttctagtcccaagcccccatccatttttcacattaattcactccagttttaatacatttcttaattatagtagcaaaggctgtcatagggaagaaagctgttaaatcctttagctaatgaaaaaacagactgtaaagttaagactttataataaagacaaagcacttttagagagtctagagaggtactaattcatagcaccctaccctaatcaagtgttcatgtacctcagaatgttacacctcatggggacttgtcatttccagcagcatatctctttgggcacctacttactggaaagtcaacaggaaggccaagatggttgsttgtatgcctggatgtggaaatgatttatacaacagtccacattgttttcaaaaccctagggatgctctatctatataatgccaaatatagatgggagcgctgaacaattcattcaacatctgaatgtttccagtcatccagactgtcaggtagacagagaccttttcttgctgagtctacatagttaaccctataaagcctgtatagctaacccctatatagctaactcctcaaaggaaaaacagtaaaattatctacaaaaacaaaacaaaaaattatattaatattttttaaactccagctaaatttagtccttttctttgtaatttaaacgtaaatttacctaaagtggagcaattgtcatttattgatgagattctcttttggtcaaggatccttaacagtttacaaatttgcattttagtccaaagtaccttatgaccttcaatacaaagccatttgaagtataaaatagaataacttggactctaattgcaaactgattttcacagtataaagaaaaattagtttttgacagtttgaagtactatccaatgcctctattcattcttattccatgacactattttctctcattgtctcagctcttcacttaggcatgcacacactttgaatttacacatcaaggctctctcacttagcttgagagcttttctcaagctagccggcttttctgagttgagatcctttagagtagttcttcttaactttttttttattagtgttagactcctttgagaatctactgaaggctatggaccctctccctagagaaaacaaaatcacacaaaatggcatatgtgatttaagggatcgcatttttttcccttccttagagttccctgcctcccactgccccaccagcaaccagtccctgtagatgaagccctttgatagactcatggttaatatcccctgcattaggttcaaggagaaaaggcaattatttcttctctattccaacactcctgtgattggccatcaaagaaataagctaatggaatatacatgatcattttgatctaattgacaggtaactccctaactgtttgactatattcaaaaccatcaaaccagtttatgtcagcacacattagctgtcattagctgtcatgtttactcagaagctaatatagctcttattagattcacttttaaaaaaaaaaaagcatctatcctgatcagttgcctatatgtgtactgtacattgtacatataatttgtggatttatatatttgctttataaattttccaaatttaaacttcctggagagaaataagttgatttaataaggctgtgctatcttaagaaccataatgttcattgattctactgtagttagataaaaacctcacttcataccagtatttttcttaagatcagttaatttaattgctctgtgccccatgcaaattagtcactttacttggttgagtcatctgtttccttggaaacacagacgaatatagccattatgttattggttgtatttaaaattgtgaatggagaagcaatattgtcaacagattattgtagaatgggatagagagccttatagattttgatcctctgccaggttattcattatgtaactgatgtactatgttctctagtagttctcttccttatctataaaattgacttcaggtttatacttgagcatcctcttacatgacacatacaatttaacstgtttagagatccacagatgtgtagctctcagcccaaagtttgatgacattttgggaggacatatagtttgcccctaatggatgcccttctagatccttttgtttcatatttggccacatcgagtaattccagatgtcccttggcagtttaaagattggaggactgtagatattttctgcctcagccctattgatccgaaacgtttccaattgaaacatctgacctcaaaaataacttcattttcattggttgccaatcatttatttccattgatagaacaaggaggaaaaggaaaagtcagcaatatcactatcattagaaatctgccaagagaaacaatattatttcttattatttaagtatatagtacccctttgcctgtttcctgcagatttcattcrtatgtatgcatcttaaagcttccttccagtgggagattgaggtaagataataaagaaggaaagcttataagatcatacaattaaacctctgcgacttyaaaaatacatccttgaaaaaaattttaagatagattcacttctatgtgagatagtttaggagttggtttcactagggatttgctccatgtatgcagacccacacacagatttcagtagaacaaaaatgacatcacagatttgtgagcttagtattagaaggatccatgagggtatcaggtccaaaattgtgcccattccatgcctgatggtttgttgtctctacattgatctctttcaatcatgggaaacttcaatacttctcaagatccgttgcatctttggactgctccattagaaaattcttccttatattcagccaaaatctgcgtttgtgaaaaattcactcagtagtggcaaatggtagcatctaaaacagtacagaagtcacttccctcttttacctgacaactttcacaagtgtgaggagagctgtcataggttcctgagctttatcttcctcagtctaaacatctacaagtccttcaactatttcccatcaattatgacttagctgactttttaaattgttatagcctcaggaccacttttaagttttctgaaaccaacagggataattatgtaagtaaaaataggagacaccatatcaagtgctttgcaagaattcaaatatgtaatatccccctgtacccctctcatcttctaatttcacaactctattagaaaactcattaagcatgactggaaatgatttattctttataaaaacctcatgctgctgttgttcaagattttgttattctccagatatttattttgtccttcccttaaaagtgaaagagataagaaaataagagcctggcaaatgcttcttggtatcttgagtaatttggattcaacaaatgtcaatgtgatatgaaaatttctcttgagattttcctgtttcttttccagcaactgcttaatatttcatacattgtgctctggacttgattcctgtcattgactgggaatggagtagaactggaatagcagccatttaggggcagttagaatgctgagaggcaggagaacttgtagagctctccgctgaaggaacaaatggaaatggagctttgagagctctacaaatatctcagaaatggccatgaaccatcctcttgtcaacagcattggagctacaaatactagaaacactacgtgtagatgaaataggtggttacctccccagtttgatctcatgtattagcagtggtactcaaggattccctccacctcacccaaagacatcttcactggccttccatggtgcccaaaattttcrctctaagaaatatgttcctttgaattgaaatattgcatctctaagatttccgaaaacatgaacctcttttagaatggmtcatcaagctaaaagcattcacgagtcccttgatatggattcatttatcagattgcttttcaaagggactgctagctgaaaacagggccctaaaacaggacaggtaagttgtgataagggcaaggaacagagccagagcatgggggaaggtagtcttggatgagggtcgctggagttggaagacctgagaagtcagtgacagtcaggagtgtgctctgatgtctaaagcaagaagaccaaggaaagaggagcaggaagggcagaccattcttcaatgtcaaatgtttctggccaggaatatgaaaagaagctgagaacagcatgaagaacaagtaaagggctgcagccaccacagtgcaggccagtcagagtctcatgatgccaggtcactagaaaacagctccaaaattggcatatgtcctcttttccatcccttacctcacaaaaacataaaaggaatagatggtacattatgttaagtggaagaagctagacataaaaggacaaatatttaacggttcaatttatatgaaatatccagaataggtattcttgtggttgcctggagctgagggaggggaaaaatgggaagtgaccacaaataggtatggagtttcttcatagcatgatgaaaatgttctggaattgaataatggtaaaggctacacaactctctgaatgtactggaaaccactgaattacacattttagaagggtgaattttatggtatataaatcatatcaataattttcttttaaattaaaaaagaagagtacatgaccctttcatcacctrgatctwgaraaaatcaaaggtcaacttaaagactttatcattggaagcatgtcttgctctaaaaagatttgaaattccatttctttctcctcctaactcatggcaagcttcaagttggtccattgccaggtggtggtgcccacggatgggcccaggcccttgtgaagagctcacacactgacacctcagcatgtagtcagttggtagctagatagcagactgactttggtggtggctcagtcctaaatccttaacgaaaagtaattctgagacagaacaaggtcacacactggaaataaattccgtcattttcacttcctccctctgagatgttaatgagagaagctgctctgcataatatgggacatctttccaaattcacagtgacattattggcagaatcagaagcagctgcaagaaagtcaaaccatccccctctcactccttgccatcatgtaagaatttcaaaaccctttgtagccacacaaatggttctgtaccatgagaatctgctgctgatgaaaccatattttaatgagatccttctagtactttcacaactaaactttcaggaggagcacctatgccacagtgattacagctaggctcaaacacactcattctataatttagaggccacaaaaacaggcaagtgtctagagacaaggaaattgaaagaggtgcaaatgaaagtttctagagacaaacaaattgaaagaggcgtaaatgcctgcggccaggtttctaatcagagctcctcatccttatcagttcacctttgtttcaacccacaggatacctacccttttgagatgagcaaaggaaacagaaaagtcagtgaaccttgacctgtggcccaactagtaaaatctcagaaaggttctttttaaaaagagttgaatctgctgtagcagataacttcagatgaaaaattttgtatattttcttcttccctgagattccaaagaataagaccatttcctagtttagataaaaaaatggttatctctatgttttcaaaatgacatagggccagatttaaaaggattttaaaaattaaaatgatcgtatttcacagatgattatagccttttaattstgggcagacttgacccaaagtcaggcctatacacagactgcactccctgtgtgagaaacctcatatcaggtcccrtcatgaaatgccctaggcaataccctgtgccaagaggcttacagatcakgagccaccaaagtattgtccttcttctggcccaacagtcctctagtgcctaccccagttgccctttagagcatggatggctagaagacacaaagccctaatagttgatgtacaatgtgttttaytgaagttgttttgatcagcagttttgmtgtcagggatattctgtcatggtctaaaagaaaactcttacactttcaacttgttaaggagctctttaatattgctaaggaatttgcacaacagatgttcctatcttatctctgagatcagataagtggcttagggttagtgttgggatgtctgtctgtacacacaatttgataataaaacagtgattttacactttgatagagtgcttatggctatcaaaccaaagcctaaaatggttagtccctctgccgtggctgcttcttcaacccctagttcaatggytcctaaattttattttgcatcagaattgccagccaactttgttaaaagtaaaatttccaggccccacctccacccaagattctgattcagtagggctagggagaaccctaggaaagtgcacaagtgcaagaatccaagtgattctgatgcagatggtccagagagaaccttttgaaaaatctgcsttagaactttgcgcatccaccaaacaaaatatgcaatcgccttgacaccatcttaggaggcaaagcctggagggattggatcaactttggcttgcacgcstgactaaatgatccccatagagtctctctaaatgccgcaatctgagttaggaattggtgtgtctggttaggtttggcatgttcaatgatactgatgactctctgtttgcttttgcttgccactcgtggataccttgtgcaccctagaaacagagataccagacataggtaagcaaatcacatcagcagctacctaatgccccctcttgcctatgagactacctcctgataatgtgttaatagggaaatttttcttcctaaataaggttaaagaatagtgtgaacataaatttggaagttataactcaggtaagtgtcttccaaaagaagaagggtccactatgtaggatttgctggaggatcaaaacatactaaaaagaaaacaattcataagtgaaagctgacagttgagtacttcatgggaaagcaaggccttaagtttcattatgtttccctaaggtgataacacaaatgagttggtaagttcaaatagatttgatgttttcaaattgcaggtagagaaagaggtaatacagcaatctccctagatccagaagtacagtttttaagtgtattaagagacagtgaccatgatgaccttctttaatacactttttyytttttttcttttrtgtgacctcactgtttctatttctttccaccaaaaagaaataataggaaaaccttaaactgaccgtttgcagacaatggtacatagctctgaaattaatcataatgaatatttctattcaatgtgtttacgcattacacttgtcaaaactgttctaaattgcctgaaattgcaaaggagaaaattgaatttgttcactcccgaatgccaattgtcatcaaaatggcactgatggggtttctaatctggatttcatttgggcaatgccacttcctaaatgccagtacagacgatcagccttgctactttggcataactgattccttaagcaaattaagttggttgtcaaatagcttactggtaaaatgttgcacagtattaattataaacattaattgcccatttaacaatctatgtgatttttaactagtatgaatgaagtgatctttgctaagttgaagagcattgcttgaatgtaaaactaaccaaaaggtgatagtaaacctaacacccaagttgtaaaagaaatcttcacatatctcaaattgcaatttgcattgagacacaagggattaaagcaaattggaatatagtccagtggtttttttctttctcaggtgtggcttgttttcagaaagtagaaagaaatcagcytcaaaagagctaaagtacacttgagaaatgacatgaaatggcaagttacatattgataggagggaccttcctgactgctggctatcaagaaaataacattgattagatttcactttggtatgttgggctattctattttctaagggccagtacacaaagtttgagaacagcctggctgagcaaaataggacatgttgctcattagaaagcaggaacgctgatttgttttgctgccttcagagcaagagtattctgatggtattttgcacacaaaatcacatataatctagtctaatcttggtccaggcccaaacttgttagtgaccccggacaagctccctatgtgtctgggtttccccagctgagatttgaggagattgctaattctaactttcctcacaggcacactgggggtattcaataatgaatgaatgtactgcattccaaagtgcttttgtgcaaatagmaaaatagcatttctcttggaaaaatggcctatggactcttcctaaacaaagcatgactaatctgactgaaytgaaactccacaaactggctatcaaaatattgtagttgtttcaaagaagggttttgaccccttcttttttctagaaagatctgagcacattggaaaaattttattctgaaggcaaaaatttaactatatatgtaaagaattttactcaaacccctattgaagcagtttttcccagagagatgccttgtctggtatggctaccaaatcaattctagagtttgttggggcccttcatagtttatttacagcacctgttatggtggttccagggttggaggtgtccctggaatctactggattctcttacttgatgaaggtaagtaggaaaagattaagtattccaattgaacctaattttttccaattaaaactataaacagtctcaaattagtatttgcaggcctgattattattaacatacataaatatgcttggagggcaaatataattacaaatacaattaataacattccagtccttaaaggtatcttgattgttctcaccaccctctcccctccattttgcctaagtagcaaggcctgaactcttttatgtcttagttttatatcctgcagttcagtttagtttagcacgtactaagcaccaatcctgtcaggccctctgttggcactgagaatagagagatgaatatggttcctgcctgcaaagagctcacagtgtagttggagagaaagatatgttaggaaaaaaaatagtgcttacacccagcacccagatcttggtttctaataccattctccaataaagggaaccagrggagtctttggagaaatggctgattctaggattggggcagggggtatagcagatgagcccagagcatctggtagtgccagaaagaaaggaarggctaaaaaaaaaatccctcattgatggggatatggcaaagggacacatgagtcaacgaaaagagctcccaatggctaaagctggaagaacttgagcaacaaaataaagtagcattggatttaatgcaaagtataaaataaatatccatgagtccatactgatataaataaatggttgaattaataatagatggagacgagataaagctcccatttagaagaattccaaataatttatgtagatactccaccctcaaggaggtggagcataactctctactccttaagtgttggctacgcatagttacttccttccaaagagtaaagtgtggaaagtaggggagaaagagtatctttacagtgaagaaatctgacgaacactatttcagccaggagatcaaggtcaaacccattagtgtacatcatgttggtagtatgtacccttgatataatttgatcagaatggcactttattacctctgtgctcttcctcccaaaagcctatcacccctgtctaactgtaagaaaaaacaatcagacacatttcagtcaagggtattctgcaaaatacctgaccagtactcctcaaaactgttaaggtcatcaaaaacaagaaaagtctgagaaactgtcacagcacagaagagcctaagaagacatgacgactaaatataatttgttatcgtggatgggatcctggaacagaaagagaacattaggtaaaaactaaggaaatctaataagtatggacttcatttaataagttttaaaaataatgctaataccatacaataggtgctgctaagacacaagtccctcttctttactaatttctctccttctgtttctcctgtcataacacttggactcatggtagtcatatcctgtctacttatctgtctctcccactagactgtgagtttcataaagaaagaagctgtgtgtatcttgcacacaagtaggtctctagaacatagcacagttcttggatacattgtatgcacttaataaatgatttttaatgaattagtaaacaaatacacaatactgaaatggtaccaaggaagtagttcagatgagagatgatgaggccttagagtaaaaacagcagagataaaaagaagtgagcagactggaaaacaatttagaaagtagaatttaaaaaccacctttcactggatgtgggaaatggtggaaagaaggaagtagaaaagaatggcttctggtttctggctttgacaactgggtgctaggcagaggtatgggcaatgaacatatcagagatgaacaagacaagattgctctccaccaagctttattgcaactggcagggcaggasagggagatgcaaacaacgcataaacaaataatttaatatgatatgtaatccccagaatagaggtaagataatgcaaataacccagactggagaagggaagactgggaaagcttccttcaggagatgatgcccaaataaagcctcaaaagacatgtaagaatgaattaagagaagaaaggcttggctaacacaccaagaaacattaaaaagtttttaaagatgggagccaaatgatcagaataactctgcaggcagcatgggaaaaaaatgatttaagatttcaaaaacacatcctacatatcgatctatagaaaatattccaggccagagatactgaaagatagaactaatgtaatggcatagggatggaagatgagaatgtttctgaaagttagtttacagacacaattgcatgtggagagcaaaagagggattagggatgacttccacatttggggtttggatgatgtcagtattacacaaaccttaggttcaagtaaaatgtctccaaaactaaggttattgtagccattgaaaaactaaaattaggaagaatcaaaataataaacaaactcagccatctatacagataaaaataacttgagattccttgtgagtatgtaatagaaaagtttcaagaatgccagaatccaaacaaggtaactttagggtcacttttaggaggtataactatgcgattacacaatcatatgattgccattataactttaaaaaggttaaatataaccagttccattatgtcctgaaagaacaaaaaccagattagaaaactgtggtagtcaattgaaaaagggaaacttggaaagaagtttggcagtagatctccagcatgatcctcccttagcgacactccttgagctttggacatgcctttcaattgacaactggggcctgggaggatggtattgtccacaagcaaggtgagaagcccaagagaaaggaagtaggtttatgagggatggggaaagcaggaaaagaaagtaacttctgttttggatatgttgagtttgaggtgactgagacacccagcagtgatctagtaggtaattggataactgagtatggagaataagagaaaaatgacctcctgagatttcctgtcttctgtttctttctatccccaaatggatggtatcggaatgtcagcatcattatgaattagcagtatacattagatttgtttcatacctagacccactattagaaaaacagagaagtatccatctccttggtacttaagaaggaagataaatgaattcactcatctatcaaaagatttttccatttgtgaaaaaaggctgagcccagggggttcgtgttgaaaaattgccttgaataactttacttttctcttccttagcacaagtcctgctcacaaatactatctggctatggaccctgtgtctgaatcactctatctatcagacaccaatactcgcaaagtctacaagttgaaatctcttgtggagacgaaagatctgtccaagaattttgaagtggtggcaggaactggtgatcagtgccttccctttgaccagagtcattgtggagatggtgggagagcatcggaagcttcactgaatagccctcgaggtaaaaaataaataaataaatatatatatawatatatatatatatatacccttgggtcatctaaagattttatttgactttacaaaatcccgagactgttgccacactttagcccatccactaatctcaatattttgcctctgagagccaaaatattgaagtctgtcccagtagacacatccaaggcacataatgcatttttagccaatattcattagtatggttatagctgttattaaaagaatgaaatgctttcttttctagttgataaataactattagccagaaccctcagagtgcctccctggcaccacaacccaccccagaattacctcctggaaactccccacagtccagcaactaaagggttaacctgacccagcagagagcctgcagacccctgctttggctcttcagsctgcattgcttgcgataaggtctgtgcctaccttctaccactgctaagtatgttgaatatctcacagaccctaaacattcctgacttttgcttaacaaaattatgaatcttcaatgaacctttcttccattaatttatctaaatcattctggaaattacttatattttcagttgatattgcctctagaataacaaattccaatttttttctgttgccttctgtgggagtttggccttatttttatttgtcctaaatttacttctcagtcttcaaagaccaaccttcaatttaattgcctagaatctagtgaacaaatctgtgtctcccaattaacttctggattttctggatcatatgccaatcttaggccacaaagttgaaggatagtcaacttttaagtctgtcatcatatatcattgaccctgtcatcttaattatttaactgctcttctcagttccttctytaagatgtttgtgtatgtgtgtgtatgtgtgtgtgtgtgtatctgcatgcatgcatacatgtatgcatttatgttagtgattttagaaattattcattttactgggcttacaaagccagtgttttcttagttattatacaaataatacaaacatttgttgcagaaaaattagaaaagggagaataaaaaaatttaattaaaatcacccataagcctactacatgtagaaaaccactgtaaacattttagtatttatccttctagacttttccatgcatatcagatattttaattctgtaacagtagaatcatattatacaacgctgttctgtaacctgttttacacaatgtattatgaacatctttccatgccaataaatgtagtgaggtcaatgtgtttaatttattagatggtcacttattactttaaattttaagaggttactctttaaccatttgacgtttgctatattgggattgaattcctactagtatcacagtttaaagatttcactttcttcaaggcctttgtcttttataaagcccctctggctaaccccataccattaaatctgaatktatttaacagtgtctacactacacaattagcacttgattttattttgccttcttttgcttccagtgctttcatgaatgggagattttttctactgaaataagtcgcttgagatgggaaatcacatctaatattatggaatcttccccacttccccaccaacttctagcatagtgtgggacccactacacatacttattgtgtaattgatcaattaagtaactcttatctatgccaggaattcctaaaaggaatttcaatggtgtttacagggggtgatttattttccctaagggaacacaagccccgccccaagtattatggtaaattttttctttatttctctgtgccagctctttccttatacatagtgggtccacaataagtatttaatgattgaataaataactcgggtgcaacatgtgatcagctcatctttcaagaaaatacattaggctgggtctcaccttttacacaggtttaaaattcttgagggtattataaagatttctgcataaaaaatagagaggaatcaagcttgtattgtgccttaaattgacatcctcctgagttgctgctagtytgaaaaccattcacctcaactactgcattcaacctgccacacagagaatgaatattttagcttttccaaataaagcaaataattggttcactgcagcttttttttttcttggaaagcagcagtaataaagtactgatgaacaggatttacatgaactcttgaagcgtcagtaatgagagtgctgaaatttatgtatcaaagctaatattaaactaagtttttcttcttgtcatagccactactacattttcctttgtcttgatttactcatccttctatccragagcttcctttgccataatctggtacacttcattcattccaaagcaataagagagccctgataacatctggcccagacttcagacagctaaatgtctaatccatctgggacagcttacacataacgttcctgaagctggtgttgtcaacatctgctttgatccagtgagtgaactagaatgcttaaaggagtgggatgtgtggttcacactaggtagccaccacatctccttcaaccatgctaacaatgtttgaagaccctgtcagtgatctttataataactcagctggcagaacctctgtccagccatcagttgctctgaaaatgctggtcagaacacttaggtgcctagctatggcacctatctccatgctgaatatagtcagcactcacctttgtcagtgaattagaagtgagattctctttaaatgaaatgctgcagggcgatttcatagacttccataaaaggaaaaaacatgcaaaaagttattacagtgtacaaaatgagaggagagtattgctaattgctcatttcatctttgaggttctcttacagattctttgtttctcaagaaagcccaatttgtttgttttttgctttaaaactaccctgtacatcagctccttcttccttccacttagtagatagcaaacgtttaatgaatttctttaaggagaggtttgatttttccctccacctagaagctaataaagaaaagctgtagatcagtagaaaatggaaatgtacatctagggagcaccatttctaggttagggaaaagagcttgctcgctccaagactttaacaagcaacatattgcaattataggaaggttctccaacatgtccttaattatgcaaggtaagtcaaataaatgttaatctgtacgacagctaatttactctctaaatctgttctaaaaataggatgaaataaaatttgcttttgagatcattcattctaaattcagagtaaattatccaatggagttaaaaaccrgtcagcgaaaggtaacaggtcaggagccatgggaattttttgttttggttttgtttctgtttttgtttttagcaatggcagcaagttttggtaaataccaaaggagggagcccggactttctttttcaatacatgtaatgcccatgttttctttcaatgactccgtgcaagtcactgtacctcactgtggtttcatttacccgaacacgaagatagacaggctgagtggtgccattgactaattttatgacattgggcatttaaacactgggtcctgaaattcttcagttgtaaactgaaggggtcaggatgatctccctttcagctctaatgtattaaaataactgtaactataacttgttcagtgcctactgtgtgccatacactgtgctagatattttacacagtttctctgatgttcacaacaatgcatgatgtaaatagtattagtcacattgtacagaagaggaaatagagaatcagacaggttaagaaatttacctggacatactacacatgtaccactgaacctaaaataaaagttattttttaaaaaagaaatttacccagtttcacacagtttacagataacaacactggaattcaaaccaggtctgcctgactccgaaaaacccatgatgccattttttttttttttttttttttttgagacgaagtctcgctgtcaccctggctggagtgcagyggcacgatcatggstcactgcaacctccacctcccgagttccagcgattctcctgcctcagcctcctgagtagctgggattacaggaaggggccaccacgcctggctcatttttgtatttttagtagagacggggtttcaccatgttggtcagactgttctcgaactcctgacctcgtgatccgcccacctcggccacactttacttcaccataccacactgtctgcctttctgctaaaatctrtgatctctgggaaggttggaaatattgggggaaaaaaatgcttttcaatctgaggacatgtattcaatgggaacaaaatatttttatttacaagataaataacttttagtctagtttccttttcctattaaaaccatttctcagatttttctgacctagtagtgtacccatagtgcactacatagatagcgtttacatactctgtaaatgtaattattcaaataaatctccaggaaaccttgtcacttctctttggaagattctgtaattagaaacttcaccaaattttccttaagggrcacaggcaggaaatcttcattttattaaatttcttgactacagtagtaactacaaattttgtttgaaggaaaaatggaagcrtccccaaatagaatttcatgtgatagcctctgggtacttctcctgggaggaagtctttatctgatccagttttatgcacttagatctgaatctcaacaaagagaaacatttgccattttactcatcaatacttcaatgtaatgggacaaagaaaaaaagtttcgaaaagaggttgatggagtactaatccctggcattgtatatgagtttgaattgactttgaaagatgcttttaaaacatgcatggatgatgtagttgaaacttaggttccatttattatttttactgcaactttctttaattctacagagaactgaaactaatgagtcatgtaatagatgaccaagtacttaagcagaatgtgaaatggtactaggtggggatataaaataaaatttgtgacaagctggatgcatttatttttttaagtagatacggaaggtgaaggagtgactggacaggatgaaattaatcagtgacttaatttggttctcttggacctcaccaagggttatatctctattctcatgtacatcttcaggcaaactgacgccagaactcagcaggagcagaacttaggcaatatccagacaagtgcaaacagcctctgagctgttccataggaaggaaatgatccttaaatcttgacggcttccaaaagtgtttttagggtatacatgacactaaccttacgggattcatcttaactttattggaaattaagaaatctgggaataacaaagtctagacacaaacaatctgtttttgtccctatccaggtctagctgaagtacatcctgaagccctactcattctcctggcatctgcatgctattgtgaaaagttatatttggggttaatggaaagatgctaaggctataatcagtgactttttgctgatgtcactggtgtctatgagggagacagtgtagtaaagaaacagacatagaatgttcttttggttctcctgttcaatggaagtggtatggtttttcctaaattcctttagcatatgatccatcttggtaacaaagccatttagattgacactggggacagccctcaacaaaattacgggtaagccatagcatggataaaaagaatggtatatttaggaaactgcaaataattcagtattcttagagtaagaatattggagagtaataggaaaggggggcagaagcaagaaaaggaagtttggattttatcctatagggaaaggatttgaagcaggagagatgmccaccttgtgcatgcgtttttgataatgttggcgacagggtaataaatgcgctggagcaaaactggggcaaataaatgacagggagtactcatctgtataagattggcaatggaagaggatctaatgaaggaaacagagcagaaaccttcagaaaaaagggtggtggaccaaaagagcacactgtccaggaagccagagagtagttaatttcaaggaggtgtgaaaaacagtatcaagtgtcacacatttgtagctattgcattaggcaatgaggagttcgttggtgaccctgccattggtggtttggatggtggtagaggtggaagccagattttagtcatttgatgagcccatgagagatgagaaaataaatatcactggtgaagctcactcttctgagaagcttgaatgtgagagatggagtgataaatcgtgggaggccaatgaactcaggaagcctttttctataaggggagatgtggcaatgcttatcagtcaatggaaagataaagaagacggggaataaatcaaagcatggaggaaactggaaggaagtcggcctagaataggaggggagactgaagcgattatttgtagggtatagggatgaggatcagtttgtagtaggagaagctagaagagtgatgattcttcatcttgatagcctccgtgttctgagaagtggatctgttctgcttaaaatgagggtgtaagtgggaaaggtttaggagaggcacttactgaagtcttccttctgggtaagacagcattctaccacccatggccaaattcctagcccagtttcaagacatttcttatgagaattttactccaacaaccttgttttagaatcagaaacatcttgaaaaaaacatgtttgataaagccttaaaattcaggcaaaatatttgttgtttatccctcaatgaccttgtgctgttttcatttagggggggtttctgtctcaaacactgttagtggtctctcagcttactgtaactgcaacagaagagttagtgcctgttatacaaccagaattagaggttaacctgttttttatgcacagttcatctaatgcatctgcttagggtagtcaaaagattttggccttagattatgtcagcaactggaacttgaggaccttccggcctgttctgttgcaatcccaaagccataagctgttgatgagagaagtcagacaaaaggaaggcacttacatctagccttggctcattgcctgtttggtctaggtagcatccatggttggaagacctatattaagttttttcaatttttatraagccacagatgcattattaaatgactttttcttctgcatttgtcttaattttcatgtatgcatcagattctagcaagcacagaggtaatattttagaggcyagataacatggtagataatttttcaggtttttgagtcaaacagaaatggaggcaaatcccagatccactgctaattaaatgtttaaccttaggcaagtcacctaacttccctgagcttcagattcctcatctgtaaagttggaaaactagtaatagtgcctacacaatgggttgttggataatgtatgtaaattgcctagtgtgacacccagcataaagtatgttactgtattacataacagtattacttactgttatgctcagtcttgctgttttgttgctatagtcataataattataataatgacccatatatgtaataagttactttggaaggaaggaaacattatgtccttgtargtcaatctgagacttgataatttctaggtaggatgggtgccacagaagaagcaagagtcaaggtaggatggaattcacatgttgtatgtgatttgactagccgacccctcctcaccttgagatgcagcaattctagtgttggttccttgtacatgttatattttggggagccccacaaggcccatctaactaaagtaattcccttakcagcgtactatttcacaattaaattcattcccataaggattttcttcagatgcaaacttagtatgtggtgcagggaattgtctaggagagcagcatattaattcttcattaaaacactttatgggggcctggagggaatgggggcctggagggaatggagcagaagatggatatgtttggattgacaagatcacctgagaaagacaagcctaggtgggaaccactgaaggtagcatgsagaagtgtggtgctaggtatatggcagaatagctgcaaagtgggaagaggtggaggaatagcactgatatacttcatctccacagtattgtctakaatgaaacttggaygcctacatgcaaagactgacagcttggaattctggttcctctttttatttaagatcgctagccaaaataactttgcttccctatcacagctcctcaatgtcacacttttcttatctgcctcagctgaygaaaaagaagagtcctcaccacccctgccaaaaaagtgacagagatcacacactaataggctgcaaatcacttaaatcatattttgagtggtgtattatggtaacctataaataactaattgtgtaaaattgctttagtagtttctaggtggcagctttaattaaaagcaccagagacatttagaagtttagaaatggatggcatgtaatttgcccttttaccaaccataaaatggtaattaagaaatttgattcacttcttcctattgaaagttttatgagaatagcaagttccttctaaatacagtttctcttcagcaaaaggtagtatgtttgctttatcagtcttctccagcagggtaagatgttttaatgtacagattcttcagaagttaattaggacacttctgtccatgcaaaatgtttgtttttaagattctaaaacataaagctgtattagagttgaactttgatcatggctccatattagtccaccatcaatacaagatggtccagtaatttcacgattaccaaatgcatggagctgactataaaattaaagaaattgggaagtcatttcctggtgagactagcatgctttgctgatttttgaaggaatctgaagtctacagtgtgttgacttcctagggaatccagaatattcactctacactagcagagtcataaaagatcattttagcttcatggatcctccagaaatactggataaattagtagttktatagtgtaaaattcaaacaacatgcagcaaactaagatttctttggaaatctatgaatttaacactgtcacaggctaaaacacagctggaaatagagtaaagaagttcattttttattttataattgaacaattgattccatttttggccacttcagcccagggtttatagatgtcactactcagggcacttacaacagcatcattaatgacataagttatatgcaacataaagacagcttctgggtttttttgttgggaaaaaaaaaaaaaaacccaggagtacctcatagtcagccgcttttttttttttttttttttttttttacgtcaagcatatgtttaaaagttatctaagctggacagatctaagcaraaaataggggatgtttaaaatgtctcctcttcatcccatctttcagtgactccctgcctaactctgagccccttgcggcagccctcagtctatctctcctarataraaatccaactttttgtctcctctcttccctaatcaraactgggtgggtataagtggcatactaaagggggatgggacagtggaaraagtattttatcactgacattatttggaatttccagcgaatgttgatagttaaagcaracctactattcaccagatttattattgttttttaagatttcaacagaaaatgcacttccccttactctctatacccagaaccaaccactcccacctgctcccccaaaccttggtacgcccctgcaggtataaggaagatattcacaagatagcattcaatgaaaagttcaggacacaaagctgtatgtactgtatgctgcctcatctgtaagggtgtaagggtaatatatatattatatattatatattactctatattgtatattatataagtatatattatatattactctatattgtatattatataattrtatattacatattaytctatattatatattatataagtatatattatatattactctatattgtatattatataattatatattatatattaatctatattatatattatatattactctatattatataattatatattatatattatgatgtattatataattatatataatatattactatatattatatattatatattactatatattatatattatataatactatatattatatattatataatgctatatattatatattatatatagtattatatatagtactatatattatataatatataatatatagtactatatattataatatatattatatatagtactatatattataatatatagtactatatattatatatagtactatatattataatatatagtactatatattatatatagtactatatattataatatatattattatatattatatatagtactatattataatatataktaytatatattatataatatatattatatagtactatatattatatatgacataatatatattatatattactatatattatatatttctctctatgtatatagagagagaaagtttgaaagggagtatatgtaaatgttagcaatgataattgctatataagggcataaggaattataagtgacttttcttctctttaattttctgagcatttattataattcaacaaaagaccagatattattttttgagttgatgtctagttatgaaataaagtgcaacttttgtatttttcttaaaaatacatgtatgttattttctcacatacacaccctgtcttgtcctatggcccgatttctgaggactcagctctctgttttcatagatgacagctctccaagaaggagtgtcatagtactgatggttgacaatgggttactcccacctgagcatgttacaggagacctgctgaaggggcaataccgtaagtcaaggaagaaacctaaatggaagaccttgaaggaatcctggcaggccagtagtaaaagatatttaaattacatttatttttttwaaaaaagagtaggagaaagaagaaaaatttaaaaggcatctagataagcactcttgacattgaaacataaaaatgtaaaagtaataaaatgtctatggtttgatagttcaaactgtatagaaagatacaaaagaaatttcaggcttctttgccacaaacacacccaggtctctctctgtaaagataaccaattttaacaggcttttgagattccttccagacctatatatatatttttcccttacataaaaggaaaccataccatatagattactcctcaccctgcttcttttatttaataatatgtcttgaagatctttccataaaagcaggtacatttctacctctttgtttttaagagctgcacgatattataacatatggatacaccataatgtattaagccagttgcctcttgatatacttgttgcttgtttttaatcttttattattacagtgctgcaatgaataacctggttcatatattttggagcacttttgtgagtatatacatagggttaatttttagcagtagtagatattgccaaattgtcctcccaaaagattgaacacatttacagtctcactaatagtgtatcagagtgccagtctgcaataccctcagcagctctcaatataaacctcctaatgtatgcccatctgagcagtgggaaatggtgtcttgtagcttgtaactttaatttccattcctttaattatcaatgaatttgagtctcatttcatatctgttgtgaccatttgtatttcttttttggtaaattcactttcatatccccttccagtttttctactgagctgttgtcctttctgttctggaaattaagaaaaacatccctttgtctttcatatgtgttccaaatatttttccaagcttgtcatttttttctctttttttaaccctatagaattttctaacttcatatggtcagatttatcaatatatcttcttaacatctctagagtttgtgtccagctggaagaatcttcctgtcgtaaagatataatatatttaaggcaggtgggcagactttttagtgacccttaaatcataccatgtgcctctccaatttgagccctgtgaaatttggaaaacttaggaagtgtttgcagtagttaaaaccagagactttggaatagtacagataaaaatgggctcaaatttattttgaatccatctttgagccactgttttgtcatctgtaaaatggaaatagtacctaccttcattatgggtttatagaggatgaaaygacgcaagatgggttaaacagtgcctggcacagaataagtactgaatgaagtatgatgatgagaaagaggataagtattaaaatacttttttaagctaataactattattaagtagattattttcaagatttgtaataaacattttgttttcaaaattgtttgactgcattcaaattttcttctttcagacttcattgattgtacagacacagccctaatttaattctgtttacgtggaaaattcattgttcaactaaaggggaaaaattgcaacatcagagagatgagctagagggtgcttgactgaagaagagtgtatggacagtcacaagtacacacatgcataagacatgtgctatgatattaactgtagtataaaaaatagaaacaacctaataatccattgacggggttggtcaaatgatggaacatttatacaacagtaaaaatgaatgagctagatctacatgtaaaaccattaatagtcaaaaatataatgttgcatggataaaagagaaaattgcaaaaggatacataaggtgtaatataatttacgtgtttttattgtggtaaaatatacataacaatatttactattttattatacatacagttctgaggcattaagtacgttcacattattgtttagccatcactgtcatccatctcctacataaatttttaaagcacaaaaacaatactatatattattcatggatatatacacatatgtggaaaatttataaaaacatgcatgggaatgatacacactaacttcaggacagtagttacctctggagaaggaaggaaaaagaggatagggataaggagatgggattggctatatccatatcatttcctttttaagaaatagatatgtgccgggcgcrggcgcggtggctgacgcctgtaatcccagcactttgggaggccgaggcrggcagattacaaggtcaggagttcgagaccagcctggccaacatgatgaaaccccatctctactaaaaataaaaakgaattagccaggcgtggtggtgggtgcctgtaatcccagctactcaagaggctgaggcaggagaatctcttgaacccgggaggtggaggttgcagtgagccaagatcacgccactgcactccagcctgggtgacagagagagactccatctcaaaaagaaaaaaaaaagaaagagatatgtgaagcaaatgataacatctattaaattttggtggtggatgcatgatggtctgtaatattattttctgacttttctaaccagttgaaatatttcctaattttgaaacattttaagtcagaagtagggtttagaaatatcagcactttgggaggctgaggcaggcggatcacttgaggtcaggagttcgagaccagcctggccaacacagtgaaaccccatctctactaaaaatacaaaaattagctgggcatggtggcgtgtgcctgtaatcctagctactcgggaggctgaggcggaagaatcactcgaacctgggagrcagaggttgtggtgagctgagattgcgccactgcactgcagcctgggtgacagagtgagactctgtcaaaaaacaaacaaacaaacaaacaaaactagggtttagaaatcaacttacaaatgtatgcctgactattccatttcagaaagtgatttgttttgttttgttttrttttaaataagactttcactcctatagaaatgatggtcaaaatatttaacatcctgtaacgcacaggtaccaacatatgagaacacacaccagttttggccttggagcaggttcatcaaggacccctgcattaatccgttattttctgaacagattggttttgaagctcttccattagctgtagagaccatcacctcagcacctctagtatgtacccatatgtggagtttcctaaatggctgacagtgaacttcctgagagagcctccgtataatgagtcagctttatcgttgaccgaagaaagtcactgttcccttgggagtgagttctggcccatttaaagtttccccctgaggaatcacaggcttaataactcaaatgtgaggttatcttcaagcctcaaatatcaaagcctagccaggaagccccagtgttatttgctctatttttcttccagtttcatttactagctattccatttgatttttcaaaaagcttattagactgtgtttaggggcaacacaattttcaaaaagsttattagactgcatttgggggaaacagtstaatgggtttgggggaaaaggaaggtgggtaggtgccccattttacctgtatttactcaggaaaggaagctgactrcagtggtaatttctcttagtgggcaggaattatttctcattttggaaagcatctctaacccgaggaaattgaagccatagtaatagattgataggtctgctttgtccctccgcaagccaaaatccatcagaatagattctgctaagcttacctatattggttttcataatcctttctctgtgttctcttgagcaaagtaaaatcagaactgcaggcaggctactactggagccctatttaatgaattggggcaagatctcacctttcccagagtagtaaaactggggacatttccagggagagtggacagaagaagggttactttgaaatcttctgattttcayttgttatacttgaaattttgagaaaccacagatcaacagttagcaccctaaaatgtttctttccgttgtacttttcttacgaatgctgggcactttttcccaagtatatctgatctaattttaacagtatgacattattcaaataatgtattgaatgttaaaaaaaaatactagccaatttacaaatgaccaaaaccacttgcttctgctttggccctaaaatgatatcttcctagttcctggaaatgctggagatgtttgagctgttgaattaaggaatgaatcactgtagttgtaacaatggcgtctggaagtattttcatacaactcagttttgttttgttttcattcctttatcagagtcactgcctgttattaattactcattttttaaattgctcaaattgttatgtttctaaaatagaccttaatcatytattttatgaacatataaagtgtgtttatatatataaagtagtcttgtatggcaggaactgtgctaaatgctatagtcaaacaccacaaccatctcttgttgcagcacaaacttactggttatccgacaggaatccagagatgccattatattaattaatactttaaatatatttattttactgatgtcaacaacacactagtgtcaatggccccaccttactattcataagattcccactggttttagctactgtagcacgtccacatcatgcgcctggtatatcttgttagaaaaagaaccacattcactgagctttattgttttgttaagtttttcaagcaacaaatttggaaatcataagtaaactaagaagatatggtccctgcccttgagtggaatattatctctttggggagacacgggaggactcattagaaaagactaaaatacagaattaggttgcatgcatcaactttaaataccacggggattcgcagactggagagctggttggggtttggagagaaaaaaaaagggggaaaatgagaacagggaagaagtggagaaaaaggaaggaatctgaaaaaggatgggacacaaaggtaaaaaagaactaggaactagattctaacctctattcctgatgggttaagtgaactccaaaagaaataagagatcaaggaataaggcataactaagatggggcacggtggctcaggcctgtaatcccaaagatttgggaggtcaagataggaggatcacttgagcccaggagttcaagaccagcctggtcaacatagtgagacccccatatctacaaaaaaattgttttaatttgccaggtgtggtgttatgcacctgtggtcccagctattagagaggccgagggggaatgatgtcgggagcccaggagttcgaggctgcagtgagttgtgatcatgccactgcactccagcctgggcgacagagcaacaccctgtctctataaataagtaataaaaccaaaacataaataaatactaacatcacttgtgttgagctttcagaaagatttcacacatagaagttattttatatggtctttacagtcatccactgacatgagcagctcagcttttctactcactattagacaaaggcaaaacctgaggactgggagactatttaaatttgttaaagtcacagtcagtctcacaactggatcttctggcttctagcccagactctttactccacctctcatagctctgatgaacttgtctggatatttgagtttagaggaaaatagacagggaaatggccttggaaactccaatctcaatcaagacaaggataaggaagtcaccagccccctttgaacaaaacatcccagcattttaaatgcctctcaatgtcgcgttcttgtgcccacagattgtcacacttgtaggtcagagtgtggaaaggtaaaaacagtaaaagaagttgtttatctcattaaacaactgctttgactatttttcgctttttgttccgctgtcatatttgtgcctgtgtctgtgtgtgtatgctgttgttatattcatatattcttgattgagcccaaatcagttctcccaaacgtctcttgaacctccacttaaaaggtttaaaatgtgtattcacgcagtgctcattaccctgccttaccttttgcaaatgactgtctaccactcctgactttgtgaacttctcttctagcactagcttcattagtcaagacatacggatgcagggagaattttaaatgggccctctgtgttgtttttgaatgggcactacatgcaaatcattatcctaaagaaattttaattcctcttgagttaccccacttttgtgaatagtgagcactattggcttaattcctcatatcctgcttttattgagtatttgggacaaggtatacttagtttgctttttatattagaacctcttggtcattcacataccttgagatagactcattttccctagagtgcaacaactgcaattagttttttgctggtccatgggcaataaacgaactttccttcctagggctaattgttcactaacgttcttgtgtggcagttgccttccttaggatgacagcgacagttctttcaaatgtatctgagtagtgtctcagatatcgttgcttgatgtttgaggaatttctaaagggggagatataaaatatgcagctcagatttagtaaacctcatttatcttagcccatatatactgagaacccttaaatctcagcctgcaggcatcttttgagtgggaactctaacacaaaaataaaacaagacatgtgcatttcamcttgaactagcaccatctacttaccccaatctctctctctctctctccacacacacacacacacacacacacacacacacacacacaccccaacctctataaagcaaagaaaaataaatcacattattatcagtgtctggtttcactgttaaatgttgagacattaccaccaccttggccaagggtcttccttagcgagttgcacggcatggaacctcatttatttgattctgtgtacggaaactttaaccatcttataaaagcttgaaggcttttacaccaataatttaatagtgtagtatttcccctgagctaacaaaactgttttcaactactgaattgtctctatggtgaatctaacatagggtgctctcctactgacaagggttacataatgctccatggacttaaatcttatttacagaacacagaaaagcctaaagtgttcaagcagggcctgtgtggaaatttttgactatgattctaggcttagaaaagtcactgtcagaaagaattatagcaataactaggcaattaagataccacttagcaccaccataatactttatcttcttcaaagtcctttcatttcattggctcttgtgagcttcacaccatgttaccttgtgtagtaggtagtatataagttaagaaatcaagacactgagcggtcaaatgcattatccaaagttctacagctattctgtaagaaaaatcagcctgaaaaaaaatcctgaggcacttctgtttcttcagaactcctaacatggtaaggtcggaagagatcrcaagatcgcaaacaaagttatattgacagaacaactggatttgtgtgtgtggtggggggagcggtgtcatgagctattcattgtagctatccacatggatcacatttgtttgcagttaatttgatccatggtcctttgtctgtttgctcttggttgtcaaccccacttttcccatattccaatcatcactaattgataggggactgtattcctcttaaaggactttagagaaagacattgtcactgcatcctttctaagctcatttctagtgaaattcatatgcagttcttggcctcctggcatgctttattttgttcaaggtagatatgtttcagtataaatgcatggaaatttagtcctgtaaatcaggaaggtttattgaacatttgtgcccaagtgtactgaattatttgagatataaaaactaattctaaaatccagttcctgtcctcagggagcttattacctacatggatcatgattggagaattcacattaacaaataaataaataagtaacagcttctgtgggttagaaaacagaccacaatgaactggagtttgcagggaaggattcatgaaagggaaacttcctataaaagccttaaaaggtgaataggatttgggttgctgaatgttaatactcgggccaagctaacaaccatattaaacacacacaccctcccccccacccccaccccccccacacacacacacagtatctcaatagcttaacaraaatagtaacttatttcattcttacatcacaatttaatgtgggttgcctggggagtggaagaatctctgctccaagcagtgattcaaggaaccagccttcttccatctagtgattcctcaatgccttaggccttggagtcctctactggatggtctgcatgcagccagcctacagtggaaggtagtamtccatacagaaactcagtagatagttccttaaggatcaggcctagaagtcgcatmcattacttctgcccacacctaacttggaaaggaggctgagaaacgtaatctaactctgttctcagaaagraagagaaacgggatgacatgaacacatagcattgtctctgtcatactgaaaatgaaacgaccttattaattttaattgatacatatagatatatatatttgggagctatgtgtgataatttcatacatttgtataatttgtaaagatcaaatcagtataattaggatattcatcaccttaaatagttgtcttttctttatgctagaarcattcaaattattctcttctagttattttgaaatatacaatggattattgtaacctacatcactctactgatttatcaaacmctagttcttatttcttctatcattgattaatgggtataaatatacctctcttcatcctcccttacccttcccagcctccggtaacgactaatctactctcttttttagctcccacgtrtcagtgagaacatgtgatatttgtgtttctgtgcttgacttatttcactcaacataataacctctagttccatccatgttgctgcaaatgataaaatttccttctttttatggctgaataatatcctattgtgtatatgtgccacattttctttatccattcacctattgatgggtacttagttgattccatattttggctgttgtgaatagtgctgcaataaacacgggagtgcagatatccctttgatatactgatttccgttatyttctatatatacccagtagtagtagtggaattgctagatcatatgatagttctatttttagttttttgagggaccttcattccattttttgtagtggctatcctaatttacatttccaccaacaatatatgaggattcccctttctccacatcctcaccagcattcattattccctatcttttttaataaaagctattttgacctaggtgagttgatatcccactgcgtggggtctcctttttaggtggtaattctaygataatagtaaagttactgaactccccaccacatggaaggtcttgagtactttcttgaaactcatcagctctgtgaagatgaagccacagaatacctttgaagaataattctgaaraagtctaagagatctataggaatacaagaattcttaacaatttttgggacgggtcagagatccttttgacaatctaacaaagccaatgggctctctccccatgataatacccatacacaaaacattttgtggataatttcatggagtttctgaaccttcttaagccagtctgtaccccatccctgtggtaaagcaattgataacctcatttaagctacatggcatagtggttaagagaatgggcattaaactcagacaaacttgtgttaaactagcattttcttttttttttttttcaacttctactttaagttcaggggtacatgtacaggtttattacgtaggtaaacatatgtcataggggtttgttgtgcagattatttcatcacccaggtattaagcttagtatccattagttgttttttctgatcctctccctcctcccaccctccactatccgataggccccagtgtgtgttgttcccctctatgtgtctatgtgttcccatcatttagatcccacttataagtgagaacatgtggtatttggttttctgttcctgtattagtttgctaaggataatgacctccagctttatccatgtccctacagaggacatgatctcattcctttttatggattcatagtattccatggtgtatatgtaccacattttctttatacagtctatcagtgatgggcatttaggttgattccatgtctttgctactgtgaacagtgctgcaatgaacatacacgtgcatgtgtctttataatagaatgatttatattcctttgagtatatacccagtaaggggactgctgggtccaatggtatttctgtctttaggtctttaaggaatcaccacactgtcttccacaatggttgaactaatttacactcctaccaacagtgtataagcattccttttactccacaaccttgccagcatctgttattttttgacttttaataatagccaatctgacttgtgtgaaatggtatctcattgtggttttgatttgcatttctctaatgatgagtaatgttgagctttttttcatatgcttgttggccacatgtatgtcttcttttgagaagtgtttgttcatgtcctttgcccacttattaatggggttgtttgtttttttcttttcttgtaaatttgtttaagttccttatagatgctggatattagacctttgtcagattcatactttgcaaaaattttctcccattctgtaggttgcctgtgtactctgttgataatttcttttgctgtacagaagttcatttgtcaatttttgcttttgttgtmattgctttcggtgtcttcattatgaaatctttgcccatgcctatgtctggaatggtattgcctaggttttcttccagggtttttatagttttgggttttacttttaagtctttaatccatcttgagttaatttttgtatatggtataacgaaggggtccagttccagtcttctgcatatggctagccagttattgtagcaccatttactgaatagggagtcctttccccatcgctttaaactagcactttctaggtatgtaacctagagttagtcactctacctctctgcacttccatttcctcatctaaaaaattacattagtacctactccacaaggctgttgggaggattgaatgagaaaatctatgtaaggaatccagcacagtacctggaatatcatagtgttctcggcaaatggaaatgattattgtttagtaatattagtcatctttcatagattttcagtggtgtttacctggatttcatacatactaggctcatctagaattcaacatggttcttcagatttcagcttacctatcacttaagtctgagaaatcacttgtgactttcatttccccggcccatcccccaaggatgctcccatggcaccttggacttgccccaaactagtgcttatctaatggcattgcaattgcctggttatttctctgtctccctctaccagtttccaggctttctaagagcaacgccatgtctgttttatagtctcctgtactctcattgcctaggacagtgctcacacgyagagggtgcagaataaatcttgaataagttaatgagtaaacagaaaaacatttttctcagtaagctttaagaaaaatagtggttggtggatttaaaagggctgtccattcactttgccttatggcaaagctgaagtctaaagttttgagaggatcacaaggagctgaagacaagacaaatgctaaacactggtgtcgtctgtctttctctcaatcagaattcttggttaactagcccacaaatttattgttctttataatgactatgaagccctttgaagtgccttttgagtaatcaaaataagacattccagtcagcagaatattagtttgaaagcttatcatttttaatttgtgtttatgttctttggaaattgacctttactatgtagaatatactagaacattttattaaacaaaatatctgattaaataactcactattcactagtcatataatattacagtgagtttattagtgtctccttactggagaaatcctgatgccactgttaaccacacagtgaaatcatctcagcttgtcattaagctctgcctccttccaacctctagtgacacacagaaatctgtaaaccctccaagttctagaagctccatttagtggctacatagtgagaaaacttaacaggcttattatgcataagtaacttgggcctttctgatcccagagggtaattaagtggacagtagtcagatgggttgaagaatggacttttctgcctagtagagtttccatatataccacacatatagtaccaattttcagagaattggaatgcacatgaacaaagaaaaattctccttgactaaaagaacatttttgaatcagttacacaattcagcactctcagtattggagattgagctgacaccatattaggcttaggaatttccctggaagttgatttaaccatttatctttgtctgataaaattaaacagcagattgtggcagaaaaacatccagtatttcagttttcttgttgctagggctatagatgaagagaatgttatgactgctttccaaagcttatattctgaaagatgtttcattttttatatagaaataataaaaatgtaggtggcctcaacagctgtaattttaaaaaattaagtacagagwtgccttctgccaacatttgaaattggcattctacacagccaaaaactcaaatcttcactgttatctaatttgggatttagctactatttccaggctattaagcaccacatctggactctcagtgattacatcaggatgcccctgttccttcagtattgatcagtagcatcttttcccctcacaggtgataaatttataagtaactatccaggctgccccagctttaggcaattgtcatctaaagaattaaagtatttattcattggaggataataagacaagggaagaagtcaaataattttgcctataatttgcagctgtttcatacagagcactgcttcacagagaaaagagcctgcagttcagatattatataatatcccctactttgcatgggatgttgtgaataatttttttacaagatgcactttatttatgagcaggtctctccatagaaagagcttgttagggcttaatgctgatgaatggagacagcaccattcacacttccaggttatggtctgtcagtgctttcattatatgcactaatttacaaggatttatttattttctcccaaatgtaaaaatgtgctccaagctaaacatgctgtctgggcatctgaggccagtgttttccttggtgcagggggatttttaaattcaaagttaaattgaggggactcaagctattgtgtgttttcttcccacttccacctccacctgccttgcatcacggcctaaccttgtggtaatatcagagatctctgtatttttacttgctttgaaaacaaaaatgaattccggttsaaaatttttaaacctggaagtggttttcttagtacagtttaaatctttaaatcttttctcatccagagactgtacctttgattgtttaagtgctaatgaaaatgctgtcagtgaacacatcaatgaacatgaccgttggaacaaattwtgcccacaacattggttaccaagttttggagatctgggcacagcaatatcaaaattggaaagtaaattgaatctgcagatcttgctagccccagatggctttatgtgatctgaaatcactcacatgcccatctccaaagaataaagcttaaaatatatactgggaatgtgtcacctcctttcactcattctgacaagcagtaatatatctacagcatcatcactatccctgggttataacaataagcattatgggaggggaaacctccccaaatgatggacaaatattattctctttttcatgcctggggtttccaatttgatttttaccctcagtgaaaattaaataccccttaagcttcaccagcaaagaggttgcaaaattgttgtttggggaatttatgtgttggttggttgattggttggtaagggaaggcaaatgagaggaaaatatgtacatataaaatatgctcggtacatttatgaagcacctatcacatagtttcctcaaagccttttctactgtttctttttcaactccaaacataagtgtaacccaatcaaagttaattaaagcttctcaaggaaaaagaagtatgtttggaatttggaccatgataaaagaagttgctacacaaatatatgaaaggaaaatattctacaaactgtcagcagaacaagccctgaaggcaamtagtgagtatttaataagcccagacttatttcaaagggcactcgtctgtggaactcagctgacatgaacagagacaaagaagttcacagtgtttagatcttcacaaaaagtaaaagtaagaaaactatgtaaagtcccagattatcctccctggatcagcctaaactttgcactctgatgggatgagaagtgtggtagtcaaggaaaagaattgtcctccctgatatcagcaaagacatgtaaagaccttcccatgtatactagttaagaatacatttatttctctgtaccttttgtgaacctgctcaaatttttagaggatcagatcctctaagtttactacctcctcataagagcaacacttcattttatttttaatatccttaatttactaaagttccagagtattcctcttagtcttagtttcagtgtaaccagattctttatccttataccctcacagagcctagcatggtgacattcactacgatttagtaatcatagtgtttagtaaatgattcatgatttcgtacatgtcgagcacatctcctttcagtctttccatcyccagacttgagtcttgagtcttgatctttcagtctatccctttatgacagccaaatktgaaattttatactcagcgatatttaatatagtggtcatagaaggtggttctaaataataggtctgccacaaaccacaccaaattttaagcaatcaagaaattgatgttgcaaaacacaaaaataacaggcagaagttcccccttggttcatcctcatccaaaatgttctggagattaaaataattgttcatacgccatcatcatttaacttgccccagtcttaaaagtctttttataaaccaccttaagggtccttatacctctaaaaattataaagggatttatggacatggaattcccttgtttggacatgctggtttccttggagaactcaccaaaacatagatgactttagaagtattcaggggacattaaaatgaatttgtaacttttatagatgttaaggattaatcaaacatcaggattaatcaaagtataccataaagccaagtcttaatattaacttcctgccaatgaattagttcatctaaaagcagtttattaagttgagtttataaaatgactctagrtgagttcacattttgccagaaaattcatgtgtgtgtgtgtttgtgtgttgtgttgtgctaaaaggacacgcttgttagcacagaaattctgactttaacatccattcaatgagtttcaccagacctaaataaagggaagtggggaaaagactarattgtagactagtttgaaaaatgccatgtggttattttcaagagcactgtcaaaagcaccaagggaaataggagtagagccatatgttcttaaagtgtatctgatactttttatatgtattacttcatatgatataacgacctagggccaggcccgatatctcacgcctgtaatcccaccactttgggaggccgaggcaggtggatcacctgaggtcagttcgagaccagcctggccaacatggtgaaaccctgtctctactaaaaatacaaaaaactagccaggcgtgctggcaggctcctataatcctagctatttgggaggctgaagcaggataatcacttgaacccaggaggcggaggttgcagtgagccaagattgcaccattgtacccagcctggacaacaagagcaaaactccctcaaaaacaaaraaaaaaaacacctagatatagagtaaccagctcatcctggtttgtcaaggatggtcctagttttaaaactgagctctgcctcagttacagccaaaccagagcagtagatcactttagctaagtaaggcagacgatcctgtccctatgttaccaaagaggagtctgaaatttgcaaatgaatgactcaatcagagtcacacattagttgtaagtggggtattcagtattagaacccaagccttctaactgctattataataaaaattttaagaaaccaggctgtaattaacactgtgtgtaaaaactgctgtgaaaattttatcggcttttatcttttctagaaacttagccattccctttgtgatactataattttgctcgccaactccccttttaatagataatatggagaaaaaaactcagcccggttcatcaaagttattacaaactcccttttaacaaagtctgaattgatgaaaataattataatgcttttcaagtcagttatttcctaatgcaatcgtgaaaataagcagcagcctgtgcattagcaccctaaaaaaaaatgtaatatacatgatctccccgtcttttcccatttatcttaaagatgattttttattgtttgtgggggcaagcaagtatcaagggggtggaaatgtaaaactggacaaaattattagacctggctttatctccgcgtgtgactttttgtcatttcttctcaatacacaaagaagtgaatgtrtgccccaacaaacctctcccattactgtcctgtctgtgctgagcaaaattgaatctatatgtctttaaaatgcctttccattgctatggcttttttcaaaatacagagcttagtgcaaatgtggttcactagactactaatgctcatttgctytttcccaacaggcatcacagttgataggcatggatttatttactttgtggatgggactatgattcgcaaaattgatgagaatgctgtgatcacaactgtaatcggctcaaatggtctgacttccacacaaccactgagctgtgactcaggaatggacatcactcaggtaggcatcactggttttcaagtattattgtcatttggcatcatggaaatggataacaattttctcatgtagaaatkaggtagaatggaagcctggcatatctgttataacaccagatagcagaagtttctctttatgtaagttacttttttcctcgttagaaaagcttagttgggagaaaatggtaagcgaggatggaagtaatgtcaggtagaatattgacatacaattaagtaaagtctctcaagcttgaattaatcagagggtaaggccaatctcatttattgaatatttccaagataagtaattctattattattttttttattatactttaagttctagggtacatgtgcacaatgtgcaggttagttacatatgtatacatgtgccatgttggtgtgctgcacccattaacttgtcatttacattaggtatatctcctaaagttatcccymccccctccccccaccccacaacagggtgagtgatgtcccccttcctgtgtccaagtgttctcattgttcagttcccacctatgagtgagaacatgcgatgtttggttttttgtccttgcgatagtttgctgagaatgatggtttccagcttcatccatgtccctacaaagggtatgaactcatttttatggctgcatagtattccatggtgtatatgtgccacattttcttaatccagtctatcattgttggacatttgggttggttccaggtctttgctattgtgaatagtsccacaataaacatacgtgtgcatgtgtctttatagcagcatgatttataatctttgggtatatacccagtaatgggatggctgggtcaaatcgtatttctagttctagatccctgaggaatcaccacactgacttccacactggttgaaccagttgacagtcccaccaacggtgtaaaagtgttcctatttctccacatcctctccagcacctgttgtgtcctgactttgtaatgatcgccattctaactggtgtgagatggtatctcattgtgattttgatttgcatttctctgatggccagtgatgatgagcattttttcatgtgactgttggctgcataaatgtcctcttttgagaagtgtctgttcatatcctttgcccacttgttgatgggttgtttgttttttcttgtaaatttgtttgagttctttgtagattctggatattagccctttgtcagatgagtagatagcaaaaattttctcccattttgtaggttgcctgttcactctgatggtagtttcttttgctgtgcagaagctctttagtttaattagatcccatttgtcaattttggcttttgttgccattgctttttgtgttttagacatgaagtccttgcccatgcctatgtcctgaatggtattgcctaggttttcttgtagggtttttatggatttaggtctaacatttaagtctttaatccatcttgaattaatttttgtataaggtgtaaggaagggatccagtttcagctttctccatatggctagccagttttcccagcaccatttattaaatagggaatcctttccccatttcttgtttttgtcaggtttgtcaaagatcagatagctatagatgtgtggtattatttctgagggctctgttctgttccattggtctatatctctgtttcagtaccagtaccatgctgttttggttactgaagccttgtagtatagtttgaagtcaggtagcgtgatgcctccagctttgttcttttggcttaggattgacttgacaatgcgggctcttttttggttccatttgaactttaaagtagttttatccaattctgtgaagaaagtcaaatgaaacagtgactgaaatttagaaaaatagtgactacgaagtctctttagacatcttttttaatgaatatatgagcatgttgttattcacatgtatataaatagctatttctagggtgtttggaagttttcttaagtaaaagcaacatcccctctgagatctattttactgttatttaggaaatctgtgtttttttggktttttttttaggccagtgaggataaaagaaaattcagtgtagctctcatctgggtccaaaattctgattttaccacaattctacaaaatcagtattagacatttaaagagattatagagcatacagcatagtcccaacattcagtgtctgacttttttagtctgcagaaacaagaaatgaaggaaatagattagacagtcctcaaaccttccagctctaacattccataaatttgtgaccctaataaagtagattattaaataatcttttcaaaaamactaaagtggatgttgagagttttcaaattgattagtgtatcacagaggatggtcttgtctgcaagtaataaaatacttgtctaaaagttgtttaaacaataaagtttaattatctcacataacgagttgtccaaagataggcaaagatgccagcaaatttccttcttgtgtcacattggccagaattgagtcacatgcccatgccttcaccagtcactggcaaaggggaaatgagattccatagtgaattcagaccctttagaagtgggtccccttccctgagcacattgctacctgattcttaaaccaaaatcagagttctgttagcaaggagtaaagggttgctactggggaggcaatgagcagtgtaccccacagttatgatattcctgttgcttcatttgtcataccacctaaaacctagaaaaacaaggtaaatatattagtccatttttacgctgctgataaagacatacccaagactgtgcaayttacaaaagaaagaggtttattggacttacagttctccatggtgggggaggcctcacaatcatggtagaaggcaaggaggggcaagtcatgtcttacatggatggcagcagccaaacagagagcttgtgcagggaaactcccattttttttttttttttttgagacggagtctcgctctgtggcccaggcgggagtgcagtggcgcaatctcggctcactgcaagctccgcctcccgggttcacgccattctcctgcctcagcctcccgagtagctgggactacaggcacccgccatcacgcccggctaatttttttgtatttttagtagagacggggtttcactgtgttagccagggaaaactcccatttttaaaaccatcagatctcgtgagactcatgcactatcacgagaacagctcaggaaagacccgcccccataattcaatcacctcccaccaggtttctcccacgacctgtgggaattgtaggagttacaattcaagatgagatttgggtggggacacagcaaaaccatattagtaagtaaaaggaacacacccctaagaaaccytgctttagtcattgactctaagatctcctgccacctccacccaccttgagcatacaactctataaaacactggcctgttttgaatttctkcttctctatgtgcccctgccctgccccagaaactcaagaaatgttcatatatagtcaactacaaaagtgaaatggggagttgggcctggaaaactgacaaaatgaacaaacccttttttaatagagacttgaatgggtcaggctatcaagtcctagaatagtctaactttccatgattcaaaatgctgcagaaggcaaggaaaaggagcattatttatggcaataaagaagggtgtgaatgtatttgtatggaggaggagggacagagaagatgcacatgtatgattcacttgtgggatatttttaacttaaaatagggcatttagtattgcaatcagtcaactctaaacaacttttctgtttctgtgtagaaaagttatgttgaaaagagaattatttgtcttagtagagcaaacatatgatcatcatcaccatgagaagggttctttttcacatgacactttccaaacataattcccaccataaaatctacctcatccttttcaggttgggaaatacaatgcagcccactgaaaagaagccctggtaaccaggagacagaaacttttctctatggcatttcattccaagcctcagtttctctgaagtaccctctttcccctttctgtacacaactttagctttagagatacagtagatttttttggaggcaggggaggttgtgtggtatgagaaggggatggcagaagccagcaggatttaccaggaaagaaagcaggttttatgtccagattatttggccagtaactctgctgctatccaccatttcctgttctgtgcctgagacacactaaagagtaaatccaatttgtccacccagactggctcaaaacaaggagactgtattgattagtgtccagattatcaccctctacctttattaaaggcctacttctcatggccccatttccccagtctggaagtacctctgctggtccaaatcccattctccatcctcctcacacctcacctcttccatgggaaccttccttgatggttctagtcctcactgttgcttcaatcccttactggaatttagtatcaccatgcttaaatgtaatttgatctttgttggcaaactgtgtatccaacccgtctcccacagtagactgtgtgttcctggaacatgcataggaagggctcagcaggtacagttaacatctatacctgaaccaaaaggacataatggtaaaaagaatatgaaagagtagtgagagatgaagctagaaaggtaagtgagggtgaaatggtgaagggccttataagcataatgaagttatactgaacaatgaagagataataacagcgttaagaagggaaatgcatttttaaaatggtattaagcatggaaatcagttttcagagatcattctrgctgttgcatggagaaccaagtgaagcaaaataacactagaggcagggagaccacttaagagacagttgaagaaatccaggtatgacaaggaaaaaacatatcaatgtagatatgatcagcccctttccaagggactgctataaaaattaagctgttttccaatgcttttgggatgttcagctgatatttctttgggatacaactctggatgagactttccatgacactgctcagctttatgcaggctacataggcaagcaattttaatggctgaacctaaaatctcatagaaaggtagatagattcattaaacattggagccaatatcaaataacttgttgactgacaatttcagaattgagggaacatgtgtatggtagtaccattcactggtacagggaatacaagaggaagagaagcaggtttgcttgatggttggatgatgggttcagtttggggtacgttgaggtgcctgtgtggcatccagataaagatatctggcaggaaattggatacaggtttaaagcttgaggtctaactacagattagagttgtgattgctattagtttacacatggcaatggtaaataggggagtggatgagctctctcacggagggtacayagcataaaaaagaggagaaggctcaagaccaaactctatggaacaccagtattcaagaaaaaacggaggaatgagaacccacaaaggaggctgagagaaggagacctggcaattaggtggaaaaccatgaaggtgtcaaaaaagccaagagacgcaagtttttcaagaggaagggaatggtcagtatcaaatgctgcttagggatcataaaaaatgaggtgctttttaaagaagccattagatttcacagcattaacgcctctgataagagtacctttgatagagtgctrattaatgagagtcagataccagcggcagagtaggaagtgaggaaatggagaaacggaaaatagatcacttctttgagatgtttggctgggaagaagaggctttggcattgaagcaaatcagctctcaggtgtgggcagatcagcacccagatgtggcacaggtggactaaagctggagaacaccgaatgaaattgatgggtcagttgatagagagtttaccaggagaaagcctgtgtgtggcacagcttcctagatgctcagccattatgaccagagcttcccatctgtttagacaactgtgacagattggcaacygatgtttcccatgactgtacttaagaacatgggccatcttcagctagagagaagaaagctgagcagggagcttcataacacccaccaagagcaaagccccagttgtttatagtagtacttacagtgatccagctgagcttacacagtgctgagtttcatatttcagtaaatcaaaatatattgacgggtgagggcacagacaaatgtctaaatgagagtgcattgtttctgctgacaggaayggacaggagagaaaatagaggcctatgctgcaacatgaagatttgaatcagaccttaagaaaagcttactgtttctaacactacatggcagcatcatatatttttaaaaattttttgtggagttcccaccttttgaaacttttcaagcaaatattggatagcaataatctatgaatgcttgacatacaggcctctctggagccaggaaaatggaccaactgttttctcaaggttccttccaactccacaaaggtgtctccacagaaatacaaccaaatttctaaagtttcttgttacctttccagcattccagcatttcaaaaccaaaagatctccaacaaagaaaggcccatgtatactagcatagtacctatggaggttagaaagtgatatgagagaatggtcctcttcatcttacttgccttcatcttctgtacttttctgtggcaaacctaagcccaaagaagaatcagttctcagggcttgtcctaatctttagcagatcattaagtcctatagtaagtctaagaataactgctaccacttatagagagctcactatgtaccaggaactatgctaagaatctaatttacactattctattttgtctacacaatgcaaccacccttgagaggtagatattattatccccatctgccagaggagaaaactgttagtcggagggattatatattgtgctatgaccatagagttattgagtgatataactaagattttggcacaagctttctgaacccaagtgtgcatttttccaacctctggagatggccaaatagcattgtatttagctgagtgacaaatgccgcttggttgaagaatatgctgtttattcacagaatgtgtgtttagtggcagttaggaaagagtttaataaaatctaatcatctcaagaaatgaaatttgcttkgacaataaaatcatccatttgttcaaaatcaatatctttttttgmtttactgaaatctgaaactgaactctcagtataaactctgaagcataactgccctttgtaagcactgctataagcaaccaggcctttcacttcaggagatgagttgattatcaagacactgggtgctttatttctgttgctgcttttgaatcatcctgctctggtaactcacttccatctgatgcctgactagaatggaattgggagttagagcaagtttcttgatgggatagcaagttactccttggagccagcctaatgcttttcccaaagtcagcccaataggagatacacaagcaagatggaccttttgcatgcataggaaatcctgttgacctactgcccataaggtacacactttgaggtgtttgtctagagcatccagatacacagccagggcttcataagtgcttattggatgatttgtgtgtttcccactggtttccaacagcacccatttgtcagatgggtctaacacgggtaggggaagcatcatccatagttgtgcaggaaggaaggtaacattctttggaggagcaaactttgtcctcatatattacatctattgaactagtccactaggaatcttactcttctcagttatttgatgcttgactcctctccagaatattctgaccatgtagtaacaatccaacctattttcaaatgcttcctgtgttagggaattagtactacctcccccaggcagcacattccatctttgaatacctctgactgatgacaagctcttcttggatccctttgactttttgtcttcctttaactttcaccatccagtcttactgcaactgttcaggctttcttgaattataaatttaatctatattctatgagatcaatctactagtgaatcaagcacaatactgggtacgtttatatatgttatcttatttaatcctcatgacaatccttcaagataggtattatgttcccctgtttttaatacatatgaaaaacaagattcagaggaattgagtaacttggttaaggccgcacaaccaataagtggctgagttggaatttgaacctggtcaacctgacgccaaagcccacattattttcaccaaattacattaaactgcctcctccacgtgacagccctcttagtacaagaaaacaactctttcatgcctcttaagtcacattcccacttcatttaactatacttcattttacatggttttgagttccttcaccattcttccagaatggaagccaccatggcttccagaatgaataaaataatccagatgtgctctgagtactcagaggtagaatgggaactgtcacaactccctttctatattgtttcttttccttttgcccattgattgtttaaaaaaaaaaaactttagccacagaacatttacttcaaacaaatcagtctcaatttataaaatagatgcaaacagcagattcaaacaagaggtggtgtcccagaaccttctttattcaagcttacttccgtgtgatggtagcttgcatggtgacctcaaaggcacttttgcaaaatgctaaagaaataaagggcacagattaaagaaccacagctaaagttgaccgggattttttcacagctgtatcacacatttgacatatgatgtgatgtaattacagaaaactaaaaattcacgtgtctctcattcccatctcctcatcttacacttgcaccattagtgatttacaacatactgctgggtcctgccttagtctctattcaattccatgttgtttgagttagtccaattctttatactcttctgatatcatctaatattttcactatccttcccagccttgtgtcgcctatgtatctgatgaatgccttctatgccttcatccattataaaattgatggataggtaggtgcaattgtggcaccaatagactagttatctgttagattatgaacccatgtgtttgaactctcacctactcattgtgattcttcataatacattgggaaatcaatataatggcctatgaccagctttttaaaaaggtgaaacacaattttaaaaatcaaggtgtatcatgtgtaatgagggwgagtagtgtttcataatatttttatttcaactggataatggtgtaaaatacagtttttagtgagtgtcacagtcaaaacaagtttgaaagccactctcttcactgatatttcccccaacttatctgtaaaggtgtcatgagaaaccttaccaggttggtaactctgtttaaaaggaaataagaaccacttgaaaaaatttgtttctagtcacagtgtctgtaaacatcatttcctcatctaagagctaaaaaaacaactgtttcataatacaattgaagatcttttccaaatcaacataaagctccctccatgcaggttgtggggcacatttctgattcttcttgaagtcagaactatatttaaccatctctaatcttctggtgcccactatttctcaataattacacaaaaaagttctaaaccccatttgcatgttctctataaggagtgattcttcctagctagaaaacttgaactcagttaaagaatttagatgctcttttacaatcccttcatccatttttggctttggtaactctgaatcaatattctctgtcgtcattctccttaacagagaaaacaaaaccttcccctctctctcatccatcagtactataccacctgccccaagcagcagacctctgccttccttggttgtcttctgctctctacataactgaaaaaacaactttctcttgtccttagatttttttgcaagcttcagataaaataacacagctctgtagaaggggtaatatgcagcctcctcttcaaaatctatatgtcaatttaattttatacaagtgggttcagcattttctgttgttttaaatacacacacacacacacacacacacacacacacacacacacacacacacacacacacacacacatagtcatccaggcatgaaaagttacagcaatctgggtggaaaaaaaarraaaaaaaaaacagtagttttaaagcagaagagggctaggcatggtggcttatgcctgtaatcccaacactttcagaggctgaggtgggcagatcacttgagcctcaggagttcaagaccaacctgggcaacaggacgaaacccccgtctctacaaaaaatacaaacattagtcgggcatggtggtgcatgcctgtagtcccagctacacgggaggctaagttgggaggatcaccttaacccaggggacaaggctgcagtgggctgtgattgtgccactgcactccagcctggatgacagagtgaaacaatgtctcaaaaaaaaattttctttaacagaaaaggcaccttcttttccccttcttaaactcttgcctaacatctgtcattgtctttccctctctcccttgccaaccctttcatgtstacagaatgtccttcatcatcctgagtgatactgatacagatgatattgaaactcaacttcttcatggattacttgcttttctttgtgcacttccatcagtctcccatgtgcacactgaaagagaacagaattagatctttcaaatgaaggccactataaatgaaattccctgcagggacagacttgtgagttttgtgaagctctgtagggaatcaagaaaatctgaattataataagtttgcttgaataaagggatctcccaggggaaaaagaaaagaaagtttattttaaaagttcttgccaccaaagatgaaaatctcaccacctccaccccaccacaccctctcaatgtttccatgactatggaacttatctcactgtcaaagcaaagaaaaggtctctggccacactccagataattcagacacaagggcatgtggtagaaggaaagagtgagttacaggtagacagcaagacagggacgatgaaagctatatatctgaaatatttgaaaacacatttctcaagggtcagtaataccagtgtgcagtaggcacaaataggtgggaaaaaargagaggtgaagaaaggataagagaagattagagagtggacagaagatcaaacagcaaattaatgaggcccagggagtagtagaatggaacgaaaaatgtcatttggtggcccttatgccaaacatttactctatcytaattggtcatggttagtttaaccaattgaatyaactattttcatagtaactatcaactaatagattagatggcattaaaagccataccaaccaaacctccagtgtattttcccattttctttcaccgttctcatgcctggaccacaacaatagagcagcaattttaactgctcagcaatgggctattgcaggagtccaaacataagcatcctaaatcagcaatgttttgttctattcatttgagccacatgcactcagtcaaaccacgagtcacagccaattcctcccgctgatccaaaggcttatattataagtgcagaaatgggagtgcttgttagttcctacaagataaagagggagctcaatctacatcaaccatagcaggaaggcattgttaacttagccacactcttctcaaagacctcaatatgtcaattaccttaaatgtgaaagtatttaaatcagaaagtgatgactactgaataaaaatgagcaaactttctaccagacatgtttataagccwggaacaattattcatatttcttcaggagtacagaggcatgttttaccaaacttctctggacagttgcctaattcacctattttcctttgactaagagtgttctagtagaaggagtatagacaatcctgggtgtgagtccatattctgccatttatttgcagtgagacctcagacaagttaattaagatctctgagcctgagtttctccaccaataaaaagtgggataaaaacatgtaatgtctcctaaggaggtcatgtcagttaaatgagaaaacacacatgaaggaagtttcttttttgaaaggcacttgcaactataaattgttggagccgatcagaagtgaaaaaagagaccatatggcattacatgtaaccttggcttttatgtgtacgtttgccatgtcagttaggtaggcatgtggaaggaaagtggcacaaacttcagtctacatagcaatcaaattatgctgtcacagagcatgagatggcaggaagagttgtttagactctgatttgacaacagcaccaaaagccatttaaaaaggcttttttcagagtccctagtggctctccacattattactcacctgtaaatgagagatccattagagtttatggctgaaaattacataataatgctaaataaacactatttgtagttaccgggtctatattttagaaaaataacatttcgttctgtatcatttattctgctctcctctgaaagatggtaatacagaaaaaaatgttaaatcatttttttctatttcttgacccaaatgaaggttctgtataattttggattcagtactagatgtaaaaactgacactagaattttggagctggttaattattcctccttatgaaggctaattaaataaatgacccaattgttgattaagtggcctctcttttttaatgtgaaagcacttggaaaagtgtgaagggctttacaaataaaagagatgatgtaagatgttaattggcatcttcatgaagtattttctgttgattcatcatacacttgctaaaatgggaggacacaagaaccaagtaagtctgcaaggtggtttttctgattttgaatatctgtagttgtcagtctctaatttaaatgcatttttgcttaatgttatttattgcttatgcaacccagacctagtctcctggctctgtcaaatgcagaaaaacaccttctggaacggcaaaggagagccaaacctttctctaatcctttaatagaggatgcaagagacaaaatcaggcctttagggtagactgttcttcataattataccaatatataaagtcagtaaagcttaatggtatgggaatacagactgcctgggtttaaatcctagatccaccacttgctaggtgtgtgcccctgggaaaaaattctgtatctgtaaatgggggtgataatgttactttccccatagggaggttgtgagaatttaatgtggtaataygcataaatcacttagcaaagtgtttggctcataagcgttcaatagattattattttwtcattattattattactattactagtaatagtagtagtagtagtatttgaccttctgctcacaaaagagaattgaactgatagcttacaaaactaaaagggaccaagaagtttagaactgatagagaaattatataatcttcctttctgtccttttcacataggtgtaccttttacagagaggcatatatctgtctgtaggtgagtgtgatgggctgtagcaaacatgttccagagactggtcttaacctgctgtgaccttcccagaatgttttgtctccctagtgctgatgtgaagctctgtctagatcacttaatgaatgttcactatagtcattgaatggtgccccaaatacttcatcttctttctactttcacatactgttgtgatgactatggagctgaggctggaatgtagtatgagttttatacatctgtgaatgtaagatgttagatcatcctctatctctttgaaatcaagaagtaaaaaagcagctcattcagtgggtggcctgcagccattctaggtgggtcaatttcacacacacaaaaaaataaatattagagtacataagaaagaagacagagtttatctaggtcactatgaagaatatgactttcccaagacaaaacaaaaaggctcccagctaagtgggaagtcaaaaggaaagaagctgatatatcataagaagaaagcagcatcctaggatttttgaagcaagtttggtctatgaattttttcatctaactaatgacttctgtttttatcaagatattcaagtttccaacacatctatcagttttcttaagtctattatatatataaaaaaaaccaaatttaacaaaatgataaactgggagaaacaatgcaatgagactatccgcagagttcatttaaatattgtatcctttctccaaatttatttaaacctttttttaactgtttttcaggcctgcatctcttaggyaaaatcacaatataataacctgttatcagagatatttccattgctccctccaaagtgacagctcaggttgtttatataagtagagaacagcaggccaacatcctcagctccagcatatccaaattctgctgaaatgtctgcacacaagcaaatagccaaagttgtcaggggccttaaaataaaagtcaagtaccgtgctcaatgctatatcaaaaacataatttatcacataaataaaactccctcagcagtgtcctctttccacacaaaggacaatggcacgttagctcttattaaaactattaagcaccagaggaaaagcatcttcaaagttcagggcaagtcacaagatgcaaggcttgcaaacctgctttygaaccactcagtcttccacacattttgctcagcaggtgccatgacctgaggtgaacctgaagctctctaagatacagaaatatctaagatacttctgtatctctctaagatacagaaatatctaagatacttctgtatctctctaagatacagaagacctacgatagtgtattgctgttcctctatccttgtatgtgggttgatgttgtgaatactagtcaagattcagtcagaggccaggcacagtggctcargcctgtaatcccaccactttgggaggccgaggcaagcagatcacctgatgccaggagttctagaagtaaattcagtggttagtgtcttcaggttctagggataacatcctgtgctgagtcccaatgcaagccagttggcctaactaaatttcagactacactgtacctttaaacctactcccactctctattaattatgagaggggaaagtgcacgaatcagtgccaacccctctttatcaaatggaaatacaactcaaagagaaagttatttggctgtcagcaagagtgccatcttttcatgcaaaagttggtgtgtttggaaaagtaaacatggggacatataaaatgttaccaacaggctacacctgttgaaacgtgtttatcttgagatacataacaaagagcaggggttcatttggcgcatctcaaaacacacttccaactccaaatcaatgagaagaggattctgaaggagtaattgcaatgtctgacaagaaaactagcaagagtgaatataaaagaaatttaatagtaaatatctaatgtattactgttaacaattgagcacataggaaatgttgtcacggggcaacttcatgaaccatttggtacagaattgtgtctccgaataacatgggagagtcacatgatcgaccatgaaatcattctcaaaaattgcaagaatgagaagtttctagagaataatgacataaacatggcatttccagagtcagagaagctctggataaaatcattcacaaccaactttataacatccaagcacagtggatttctggactttcatagcaaagtctctggggccaaaatagtccttgctgcttccagttcacctttactagttttctgttaccactgacctacaatagtgtattgctgttcctctatccttgtatgtgggttaatgttgtgaatgttagtcaagatgcagtcagaggctgggcgcagtggctcatgcctgtaatcccagcactttgggaggccaaggcgggcagatcatttgaggtcaggagttcaagaccaacctggccaacatggcaaaaccccgtctctacaaaaaaaaaaaaaaaaaaaaaaaaaaaattagccgagcatggtgggtgcctgtaattccagctacttgggaggctgaggcacaagaattgcttgaacccaggaggcgtaggttgcagtgagcmgaaatcrtgccactgcactccagcctgggggatagagcaagactcagtctcaaaaaaaaaaaaaaaaaaaaaagatgcagtcagaaaaacagaaagtacattcgttattttaacagagaggatttaatatagagaatgtgatgtacagatgttacagggtcagaaaaaaacaagagatagagataatatctgtaggaagtggccaccatctctccgactggggaaacaaagggaaraggttggggttgtcaraacctaraaagttggagaatttgctccatggaggtaggacctagtcctctgagaagaagatgccagctagccccatctctactaaaaatacaaaaaattagctgggcgaggtggcgggtgcctgtagtcccagctactcaggaggctgaggcaggagaatggcatgaacctgggaagcggagcttgcagtgagctgggatcatgccactgcactccagcctgggcgacagagtgagactcagtctcaaaaaaaaaaaaaagaagatgccagctggttgcttctggtgcctctgaggcagcataatgagactgattctcagggtagrgagaggagctggaagtgcagtcaggtactgcttccaggatgaagggctactgttgagatgacactgacaggaacagaaagcaagcaggaaggatcaagtcccttctccctcctttagcttctcagaatctctttattttctgtatcgtcaggacctatcagaaatctagctggcaaaagaaaaatgtagattgccgagtcccaaccccagcatcacaaagcagcatcttwaaaggggtgagttgggagctgtgagacagtagcttaataactagcacactgtgcaatgaggtgttagattttcatgtcattgttgctgctggagtcactcagatatgcttacagtttagatgaaacattaattagagtggactgtttgtcacagaggatttcatcattactgaatctgtaagaacctgttattgggagacctcagccagatttgctattcgtgagggtgattttgcctccccttttattgaagctcagatactcactattcatcaccattttttgcttttgttcaggcttaagtctatagcccgcatgcttccttaaatgattctgtacacatggtaagtggtcaggtggccgatctccagagttctagaagcatgaagcttgagctgggccatctgttgagtgagtgcagttttgtattacacacagggaagtggtgggcaaaacccggaagcacactggaggcctaatgaaaataccaccagttaaatcttccctctaaatgttcattaggccatctgctcttattagtgtccctatcatttggaaacattacagagttaagatgagagagacaatctgtggaattctagtataacttgaaatgarcttttgagtagaacaatcatgagttgtgatgtttaccttcccattcagagcccagcccacttatagcttaacatctccatggtgaaaatttttaatagtttcttcctgaaatattataacagaaagaagggttagcagtagctacagaaatgaaaacataatctcagagtggctgatcaatgaaatcagaccatttcataaaagctgtgcagtcatacttctggcctgtaaattgctttaggtgccaaagggaattggaagcttggtctgtcctgtcaagccaatactataatattaacaacctgcaacagacaagtttctgcaacttctcagcagaaacaaattgcagaatgatttcaggggcttctttataagtctctggctcctatgcaagcaaagccttggatctcaagaggacaagagtctcacttcctactgtgttaagaccagcagaggtcctgtccttactctgaattatctcagactttatgggctcatcacgcagcctcaaatttgatttcttattaccttgaactgtgtactctgattgcctctccttctgtatgtgtatcccccacagtgctagatatacagtagatatttaatgaattcatgtaaaattaaattaaaatagagactcaaaataaaaaaacatagtaacattttcatattcctcttcccacccccagaagggctgagagggttcagttctttagcgtaatgataaaacccgagaaacagagatacaaacagtaaatcggcaagtagcatcatgtaagtagcatcatgtacaatatgttctccttacaataacaatcaaatttacaaacaaattagctgtggagtctgaaggacattctgtagttttcacactgggccttcatctcctgctgatagatgactttgactgtaaattgaaaactggaagtggttaaacattctgtgtattcacaagtgccatttccaaaattgaggcttcagagaggagatgcaagaaagggtcgacggaaactcagagcaattatgcctgttattaagatgaggtagtggcaattacacagcagactcagagagagtgtgtacgtgctgattgttctgaggcagcctgtaagaacaaacttttatggtacccatcaggcattgggtctctagaggaagtgaagattttcagccactccttcagtatgcttttggacaggacttatggccccaggaactatcttaggaggaatatatgcttttttcttaatgagcttcaaggaaacccttatataatagagtggtgtctttcactgtttctttcctctaggataaccattctcaagcattttggtctcaggacccatttgcatttctaaaaattgttgggggccccarcgagctattcttttgttggttttatcctatgaatatttaccttattagaaaataaaagtgtgattttttttaaaactgaagatacactagcctgaggtagcctctggaaagccccactgtacacacatgataaagtacaaaatgcacataatattatttgaaaaatagttttgacctcatagactttctgaaagagacttgggaattcccagactccccagaccaaaatggaaataccatatttcctaaattctaagacaccatggactataagacataacatcaattcgatatctttgggtaatggggagaaatgtaccatcaaacatacacattgactataagatacatcttcacttcagaaaagttaaartatggaggcagtgggaaatgcatttcttaaaattgaggtatttatggcaatttacactaacctcagtgggtctctggaaacccagatttactgacacaaacatgttgatgagaaatagtttttcttagagcctatttgcatgttataatttttttaaatgctttcatggacyaaaaamattactgtcaatgaagcactaatattttcattcaacaaacgtttgccagcttaatgccagatactaggaaaacaaaaataaaagagttctcatctttgccgtcraaaactcatagtcttggtagagaacataggaagacaaacaagtattttagaataagagagaagtactggatctaaatgaaggagtcatggagctggaagagcttgaagtacccaaagatggagccctaggtattcaagaatgcttgaggttaatcattaggtttaagcaattagtcatccccttaacactgccctagtggactttgctacatgcatcagtctctttcagacttaatttatttcaatttagtttaatttaattttccaatcataggtgattcatccagaggtgtaaaactagaaatctgttagaccagttkgaatgtaatgttgtagtgagtaactccagtcaagaccaaagcctaacagagcactgtcttcccygtgattagattcaaccaagaataacagaaaaccctaacatgacagtgatgtaagcaagagagcagccaggctagatgtgtggtttagggctgagatggcagctccgcagtgtcatctgggttccaggtttctgtatttttgccttgccactctaacacataamttccattttcaaggccacctcatggtccatgacatctgctagaactctcactggtatatccacattgcagaatggaagaaagggcaagaagagcttccttccacttgggtcagctctccttaagcagcctttttaagtatctatttgtaagtgtgggtgcttccacacttcctcttacatattattgcctggaacttcacttgactacagataattgcaaataaggctggaatgtcttgtattctaaacagcaatgtactcagattcaaaaacagagttggctgggtgtggtggctcatgcctgtaatcctagcactttgggaggccgaggtgggtggatcacctgaggtcaggagttcaagaccagtctggccaacatggcgaaaccccatctctactaaaaatacaaatacaaataaaaataaaaaaatagctagttgtggtggtgcatacctgtagtcccagctactcaggaggcttaggcagtagaattgcttgaacctgggaggcagaggttgcagtgagctgagatcatgccactgcacgccagcctgggcgacagagcaagactctgtctcaaacaaacaaacaaacaaacaaataaataaataaactgggagtgtaatcaggaggaaagagtgaatataagaataggcctagaaccagcagtctctgccacaggaattttaggaaccacaaatttaacattttgttttgaccctgatattgtctgagcttcttcaaatttataaataggagagaaaatccatctagataaagcttggttttctacagttagaaaacakgatgacacctaaaagagcgatggcccttattgatcttgcttgcaaaaagtggaaattattagaagatgaaatatactaggactactttggaagttttgctttgtttggtttggttttgctttgctttgttttccccacttccaaaatgttttaggaacattgggagagatgcaatttaatctatatcctctgcagtagaataattctcaagatcagccaaattgttactcttgattagattgatcctagctattcatttgcaatgaacaatgcaacttaagtgtcagttactctaattgggaagccatggaaacagaccatgccaatgcatttgaccaaaggttgagaggttcttcaaactctccagccattatgcagagagacacaagagtgtgtatctaagataatgggaaataatttgccctgttgacaaggccatgtaatcttggtgtatttcatcttctaataatttccactttttaaaagcaagatcaataaaggccatcactcttaaaggtgtcatcatgctttccaagtgcaaaaaaccaaactttctccagatggctttttccctcttttatacatttgaagaagctcagagagtatcagtgtcaagaaatgagaagaccatttgaaaactgacaaaaagtgatgctaacaatctggagttgtcagcttttagaagtgcggaaaaatctaacatggagctggcataacacctggcagagagcactcagtcctgtcactgtatcttccccagggctggcatactacagaagagataatcatacgcttcctggaaattcctactgaagaggactcacagatcaaaatcaaacagagtcattttttaaatgagccacaaggctcccagtgtagtaaaagagggagattagaagtgtcatgtttgaaatggggaggcaggaccttttgggaaacaactggtttcttcagcacacttgaactttgggaaaagaaattattagcacttggtgacaattgtaaaatatagtaacagtcatgatatgtttttgagcacttccataaatgttaacttcttaaaatgaataaactggaacagaaatagtctactgctctatgccactaacaaccccttgtacatactggaagatgaaggaaatgaagtcagcaaaagactataaacattatgaggggaggaatctagtctatcctgactgaagctggctccttagtgcctagcatggtacctaacatgagataaatagacatttattgacagaagaaaggaaatcaattaaggtagcattttctgtagctggaattgtaccaagagtactattacaattaacagtggggagttcaagtaataagctaaaatattagccatgaaattggctgacagatatatatgagataatatatcccaataccagccaaatatttcttggaggacatatagcttagaaagattctcaaggaatggcatagataaacaaggaggaaatgactggtgacatagaatcaagagaaaccttgaaagcatgactatatgattaaacttaagagtttatgaactagccaaggaacagaacaatagacagggaccagcacaaatacacacatgttccataattttcaaaaatagctagcctctacaaagctcttttaatgtaccaagcactgtgctagatggtctatgtattttttcctatctaattccaataataatttttgaaaagatagtgttactatattcaatttgtaaatgaggaaacagaagctcagataggttaactgattcgtgccaaggtcacagggatagcaaatgacacagatggaattttcaactccagaaatcttaactcgtgagcctgaggtcctaactacttccttctagtgcattgaagcctttttctagggagagagtacatagctttcatcagattctcaaatggatgagtaaatcaaaaaagtatgagaagcagtgtcccagactccaagttccatgaaggcagggactatgtctatctggatcaggacccagatatctgtcagatggttggataaaaggatatattaagggatgaatgtaccaatgaatggctgtcctccaaattggttatcctgyatctagtctggtctccttccggcctgtcccccaaaatgcagcctaagtaatctttctaaaatactaatctgatcatgtcagctctccactttaaagtggagactcctcaacacacacagtttaagtctaaagctatcagcatataccactctccatgacttaatgcggtgattctcagcaagagacatttttgcccctcaagggacattttgcaatgtctggaggtattttcagttgccacaactgggggtaaggtgctactggcacctaatgtgtaaaagtcagggatgctgctgaacatcctacaatgcacaggactggcaccacctgacaacagagcctcagtggaggaacctggacctagtcctagcaaacatttagaactcattcaccactaccacctaccttattttatgcctaagaaatcccagacagcagttagttccttcactctcatatgatttcatgcttctgtacttttgttcattcttttccctctgccaagatcacccttcccgccttgctttttctcaatacctttgcttcatccttcaaaattaagtttacatttctcttctaggaatcttgccccaaactccctccattgtgtttccatgtcattctgggcatacatctatcatggcactcatgacacttaaccacattatgttaaattatctatttctgtatctgccttgaactaatcaagagcagaaatctgtttgtttacctttataacatagtgcctggcacgtggtcaaaactcataaagcattgaactgaaagataatagatgacaaagaaaaagataaatcactcaactcataaaaagtcttgaccttcacagccaaagagagaaacctttaggttgattcaaaaggkgataaggggaggccagatttggtgagacaagaatgaagaaacatgtccagtcttgggaatgacgaatcagatggcataggggctaaaagcacatatctgagagtggagatgttaatagtttttctcaggtaatttttatatyaagtggtaaaccatatgaagtacctgacacccagcaggcattcagtaaacagtagtcacttctattaatggctcagatgactgggcctgtaatttcatgtgttattgattacataacagttcaaaggaaggggcagcacctattcacattttagaagtcaatttaaagcaaaatattaagtcawtaatagtgcaggtgatgtaggggtgaggcaaaactcataaaggtggcacagggacaattgaagtctgggaaacacagttgaaaaggagctacattgaatggtaactgggccaggttcctcctagctctaaaggtctatgactataaaaactgttattactattaataccacttgctaycccttactatgtgccaggcactgggctaagcaacttacaccattatctcatttaatccacacaataactttacaagtagatatactatcactagcctcctygttttgttacagatgaggaaaccagagactcgtagaatatacctcatttgccaagggttacatactaataagggtgggaaccaggactcaaactgttggagggagcccaagtatacaaatggtggtttgagcatacagtatgggattaggcttatacataatttagacattttccagtttagtctaaccaagggattatatttagatattgcttttaaacatgaatttctccctataggattctgctgctttataaattgctacttaggtcaaaattagctggatctctaaaccaatcatgggactggttgacctgagagtcaactcccttcaaggcaagttttcaattagcagaggaagacgtaatgctgtcaaaggttgacatcctgaccaagagctcctttatgctcagggttatttctcagggaaggttgttgggagataggcacattccaccagctggcggctacacaagtgacctttaatgctagtttagcttaaatgcattttgacatttcaaacaaattaatgtatttttacaaggtgtggcaaccaccacaaatgaggccaaatagtttgcctgtaggttgggtcactaggcagagtttacagagctttgctgctgctcttcaatctctgttcccacccccccaaaaaagaagtgtttatttaccccaagaaatcatttggacaaatggtagcagcaattgggggccaaccttagccccaccttagtatcatataattctagggtctctctgcaactagtagatactaattctaactgtcagaatcagctcaaagactccattccttatattaagctgtatgttatgaaaatgtcttggtagtaaatacagtatttctgttgtgtgagcataaggcaccagttccttgaaaacttacctggcaataggagtatttaacatgagaaggacataaaaggaactgacaagctacgagaggtgaagaggtccagcttctgaaaaggcagactctcaactactaagtagccacacatctttcatctgtggagattgcatagacaagctgcccggccaaatcaaatgggaattaaagggaatctgtgtagtttgtatagaaaatggctcagaagcagaaagggcactttagtcacaggaagatgccggagggtgacttattccatggaaaagaaaacaaacagacaaaatagctggtgtatttttgaggcaaaattaaatataataaacatgacaccaatcgtattggtttaaatctggttgggtgagttggagaatttaacagcttatttcccaactaccagcctttatctcagaggcagccttgatagctaaaaacagaatctgaaacatgcttcttctctggcttctgccaggtgtgtgctgtccccagcctctgccctggcctcggctcccagagtggggataattagaacgtcatttctgccaggtttgttttttctgggtcactgacttgagactcaatcaaaatgggagtgttgtacggaaatgaattcatttcctcttcctcagccagccccagctcatttcctgggggactatgctccgtaggaccagtgcacacagacagcttctggacaagcatgatagtgtatagaggtccaaggcaggggcacacagtggaggagtcagcgccctccaaagcagcaggcgttcactctycctctcagtggcagggcactgacatgcaaaggcctcagacagacgtgctgaggaacacatcaccgcaaactgctctgggagctgttaaggctggtgtttaatgtttatccgatggcctcagtctgaaaggctctgtagaacatgcataacacaagctcagctttataccccattagcactcaaattcctagctgcacagaagcatctggtactgaccagagaaggccagtctatgtggatagaggtggaaggcacacagaaacatagaaacagaatgaggctgctggatgtatgggagagactcagacatgggcaaagagccccacatggtgcagtagaggaggtcaaagacaacctttgtcctcttcacaayatcaccagttgccctccctaatgagacacaattagaagaaaggccttatctcaaattgacctttatccacttcattactgattgcttgtaagcctctttgagctggggaagtagtaggccgcagaatgcaatgacagctcataccttgttttcagactttcagattccacaagaaaaacaaagccttctgtgggctttcactcaaagcaaaaaagaaaagtggctacattactgttactattttggccatgaatgggactttttttctgcctttagcctaaaagaaaagaaatagagaacaagtgagtggtagggtggggaatggtgtggaacacagttccctgagaaacacctagggataaatagttactgtcaaggagatgtcagggtaggcattgaatcaactcctgtgtctagaaaggaactaaggtgaagccatgttkggctagcctgcatgtctccagtgcctagcacatctcttggcacaaggcacaccaaacacacacacacacacacacacacacacacacacacacacaccagtccttttgcttccaactctttaacatgtctcaaatccatctgcttttctccatacccattgttgccatcccagttcaggcaccataatccctaacttgggcccgtgcaggagccccctaaatgcctgcctccctcctatctcgcctccttctctaatatggtctggacagcagccaggatgatctgtctagaacccaaatatgactatctcacacccctacttaaagcccttcagtggcttcccacagccatcaaaacaaaactggacatgtgcttccctctattacccaatgttttagtctgttttttgttgctataacagaatatcacagactgggtaatttatgaagaaaaacatttatttagctcttggttctgaaggctgggaagtccaagagcatggcactggcagctggtgagggcatttttgctgcatcataacatggtggaatggcatcatatggcaagaggacaaaaacatgccagctcaagtctgtcttcctcttcttataaagccaccagtcccatcatggggaccccacccttatgaccttatctaatcctaattatctttcaaacagagaaatgcaaatcaaaaccacaatgagatatcatctcaccccarttggaatggctgttatcagaatgacaaaaaaaaatgctggtgagttgcagagaaaggaaaatgtaaattagtacagccattatggaaaacartatggagtttcctcaaaaaattaaaaatagaactgttatgattcagaaaagtaaaggaaatcagtatgtcaaagagatagctgcactatttgcaacagctaagacatgaactcaacctaagtgtctatcgacagatgaatggataaagaaaatgtggtacrtatacactgtggagtactacttagcaacaaaaaagaacaaaattctgtcatttgtggcaacataaatgagcttggaggacaccgtattaatccattcttacactgctataaagaratacctgagactgggtaatttataaagaaaagaggtttcattggctcacggtttcacaggctgtacaagaagcatgattctggcatctgcttggcttttagggaggcctcaggaaacttacagtcatagccaaggtgaaggggagctggcacctcacatggccagagcaggaggaagagagagagaaggggaaggtgctacacacttttaaacaaccccgtctcatgagaactcactatacagtaccaaggggggacagtactaaatcagtcataagaacttcacccccatgatccagtcactttccaccaggacccacttccaacactggggattacaattgaacatgatatttgggcaggaacacagatccaaaccatatcagacactacgttaagtgaaataagccaggcacagaaagataaataccccatgttctcactcatatatggaagctaaaaaggttgacctcataaaagcagaaagtagaatagtggttactagaggttgggaaggtggacagggatagccagaggttgcttaatggatataaaactaccactaagtaggaagactaagttctagtgttctagagcattatagagtgactataataaacaacaatttgttatatattttcaaatagctgcaagagtggattttaaacgttcttaacacaaagaaatgataaatgcttgaggtgatggatatggccccacctccaaatgccatcagcatatgaatttgaggattaagtttccaacacatgatatttgggggacacattcaaaccagagcacctgatatattagtctgctagggcagccatacaaaatactatagactgaatggcttaaacaacagaaatgtattttctcatacttctggaggctagaaatctaagatcaaggtgttggtgagtttagtttcttctgaggtgtctctctttggcttgcaggtggctgctttctagctgtgtcctcatatagtcatccctctgtgcgtaagcattcctggtatctcttcctcttattggagagacatcagtcctgttggattagatccccacccttatgatctcatgtaatctaaactacctctttgaaggccctgtctacaaatacagtcacactgggggttagggcttcaacatatgaagttggggaggacacaatttagtccataacacctggcctcatccctcaggtctccctcacacccagcctattattagtcttactgaattagttttagtaacctggatgggccatgctgtctttaacctctggactttcacccatgcttttcctagtacccagattttcctcaactctgatgcccctcccccctcaacttccacccarttcttctcctactgttcatttcagaccttacttaggtaccacctgctctgggaatatcttgcctcctgactcctagtccaggtgaagtgctatcttatcccctctgttgccttcttttcataacgtggagagtaattgtctaatggttcctctgagggctctactataccacaaatcatttgaggacagaggccgtgtcgtagtcatttttgagcccccaaagcttagcacaaggcttaacccagagaaaggtactcagcgaatactcagtgaaagaaaaaaacaacctgtttctttgctaaaaaggggaacctatggagtgaaccaggtcaagctaagtaagcagtgtgctacaccccaggattctaaatcaacagctgacgaactgtacctgagtgttccacaaagtggatgctaggtctatgctaatagcaggtcctgttgcaaaaggttgctcattgagtaaaatctggcttctctggcattctgtcacccagaaacctgtatgactttgctctcctatacgtctacaggacagtgagagagatttgagtatcatagctaccggaattcctacagcaatgatccccagaatcaccttggcaaaacacagatgtttgggtccccacctccagggtttctgattcaatagatctagggtgggacctgagaatttgcatttctcacaagttcccagataatactgttgctgctgatccagagaacacactttgaaaacctctactctaaatgatccttctgaaattattggaaaaaattacattatattgtaaatggcataaatgataagtacgtttaccagaacatgtgattaaccatcctccccctgccctccactttccragacatcaccaatgttgctaaaattcataagacgggggaaacaatacaccaatttttttttctttttttcaagttaaaactgtccatggaaagacatggtaacctaatggtatgtgttctgttcgtttcacaggtgcgattagagtggccaacagaccttgcagtaaatcctatggacaattcattgtatgtcttggataacaacattgtgctgcaaatttctgagaacaggcgtgttcggatcatcgcaggacgccccattcactgccaggtgccaggcatcgatcatttcctggtcagcaaggtagcaattcactccactctagagtcagcgagggccatcagtgtctcccacagcgggctgctcttcatagctgaaacagacgagaggaaagtaaaccgcattcagcaagtaaccaccaatggggagatctacatcatcgctggtgcccccactgactgtgactgcaaaattgatccaaactgtgactgtttttcaggtatgacctttttagcaattcaccagcttcccctctctgttttgaaaagaaaaacgtgccccagtaaagtcaaaaggaaaaggaaaagcaaagtgttacttgcaaacattggtatgagctagtggagaaagcgatggattaggagtcagatcaccgacttgttctcacaactgactcactgagtgaccctagcaaagctgcaagatctcttcatgactcatttgcttcatttgtttaataaagatggcattgtctcagttatatcaccttgctattctgaggataaactagtgtaataaaaatgtttagactcttaaaaagttgagaccactatacaaatgaaagatcatgatattattaaatatttgtactttagagaaaggaaaactaggtaaaacccacatttactggtttagctgaggaaaaaattacttccccataagtggttggttttcagattaaaagcatgtgctatttgagactcaaagggactaagaacasactgtctttgggatagatgagcaaaattaaatctggcaatggagagttctcaggacattggtctgctagatacattgctttttaaaaagctaagactttctcaataacccatagtgaagttttcttctaatcgaaattggaaaaaaaaaaaaaaaagagccttctccccaaaacatgtagtggatatctcagatggcaaacggtcctcttaatgtcaacagatacaattattgctgggatgtggaaatccctccatactacacgcagtgctattaaactgttcatccaggcccgaatggttctcttaacctttgcctttccttaggccagaggagtcaggagtgagcaatttggtcaatatgacttttgatcaatatttccaatgttttcttcgacaattagttttatagatattttgctaatttgtatctttcggtcaaagcaaatctaatgtttattccaggtatcaaatttgatgttctgaatcattgttgtacttatagacttagtgtactttgacagtgtgacaatgggaattaacagaagaaagggcatctaggcacagtaggactggaaagtcctgaaacagatcctgaaagcattgacaggcataactctcakatttccagccaaattttgtgtggctatcattatttgcagttcytgtttcttataatacaatagattctgaacagcaggattgaggatttcacaaaattggtataactgagataattagatcttactgttcatctgcagtggtactgactcaagaattacaatcttttgaataataggcttcatatttttcagggagggaatacagagaatgttggttcactgattgtttcctttaaaatgattcttgatgcacagagctttatgtctgtggtaygttcatgtaaatgcttatgatgccaattgttaaaatcaagtctttctcccacaggtgatggtggctatgccaaagatgcraagatgaaagccccttcctccttagcagtgtcgcctgatggaaccctctatgtggcagacctcggaaatgttcgaattcgtaccatcagcaggaaccaagcccacctgaatgacatgaacatttatgagattgcttcacccgctgatcaggaactgtaccagttcactgtaaatggaacccacctacacaccctgaacttgataacaagggactatgtttataacttcacctacaattctgaaggtgacttgggcgcgattaccagcagcaatggcaattcagtgcacattcgccgtgatgcaggcggaatgccgctatggcttgtggtgcctggcggacaagtatactggctgactataagcagcaatggagtcctgaaaagagtgtcagcccaaggctataatctggccttaatgacctatccaggaaacacagggcttctggctaccaaaagtaaygaaaatggatggacaaccgtttatgagtaagtttctaattcttgacatgggctttgttaggtttttatttgaaattgtattatactgggaaaatgccttagtaattgctgagtgttgcatgctgttttctcctaacaaccaccattttaaaaaatgaaaagtcaaggagaaaattttacctaattcctagagttcagacccrtttttccagagcagtttgcagagcataataataaaaacagactgcatcaaggaagactcaagtgtggcactgcaggagacaggaatgaggtagaagtacaagtactcaagaaatttacaacatccctgggaagataaggtacaatttcatttaaataacaaaactgtagttctaaagcagcaaagaagcagtgtgacttaacaactatttattgagccctgtggggtttaatgaatgaataaatgaatgtatgcccagcccagcccagctcagtataagttgctgtgggaggtaagagagaagttcaaatataagaagtggaccctggaaagcaagagaagaattatgtggggcaaatgctgaataggagaggctccattccattggctgcttctgtaaaaggaagagccaaatgctctgtacgggattgggcttcctcagggtccctgcacaagttgaataatccagcacattttggcatttatagactggaactgtgataactttgtttaatggggaactaacacaaaatgtgtctgacagcaagctactaggaggtgccgtaacacagaaatagagaccattgtccttgccttttaaggcatggatgaccttgtttgcaagtaagcccatctagaaagctggtcttttggcactcgggaagcattttccccacaaaaggaattgctgagttttttaccagtatactgastgagctaatccatggaatctgaattcagagtctggaatggcatcaaagttgaagaatgtgagaagtggagatgttaaagtataaggggttccaagtgtgactattttgggaggatatagagaatatgtccagtcccatgaaagcctcttgaagaaagggacaaaacaattggccttcaagttttggatcattttccaaagaaatgccatctgtacaaaagagccagacagctattttggtttcacttagaaaaatgtattcagttgtttcagttgcaagtcttcctckgttttttgaaagtaattctcttccatcttaataagagtaataaaagctacggttagctaaagatttactaagtgccaggtactgggctaggtaatttacatatgtgactttatttgatccccataataacatgggataggtgcccctaagtatgcccactttatggatgagaaaactgaaggacaaaatagttaacttgtcctgattcacataaatacccaggattcaaccagcaagagcctgtgtttttaaatatactacccttagaaaagataaaatttctaatgagaagttttaatgtcttttttaaaaactcaagccggatcacactgcagctgaaattaggcaaacaactattttgaaagctaatggtggaattcagtcccccagcaagagatggctgaagtattaactagttttcaaaagaaccagttcaaccattcatgtatttattcaacaaacacatgagcacctactacataccatacaatgttctaggcgctggggatatagctatgaataaaacagataaaaatccctacttttatggaacttatattgtactggaggaagatgaggaagatgtatacaatttcaaatggtgataagttctatggagaaaaatctagtaaagtaagggagatcaagtgggtggagcagaagaggtttttatttcagattgggtggacaggaaaggcctcaccaagaaagaaggtgacttttgcataaagatctgtaggaggtaagagtaagccatatgaatatctggggggtggggggtggtatgaggggtattccaggcaaagggaagagcaagtataaatgccctgcagcaggagtaagcctgacacattcaaggaagagtaaggcagccattctgatggaagtggaatgagtaaggttaatgaggacatgaaatcaattaagtaaccagaactacttcatgtagggccttgtaggccactgtaaagactttgaattttactctaagaagtggagccactggagagttttgagtaaagaagtgatataagccaactttcattttttaaaaaatcacactgtattacaaatggactgtgtagtggaaacaggggaacctaactgggaagcaggaggaactattgcaataatgcaggcaaaagatgatgacttggaccagggagttgggccagtaagaggtgctaaaattctgaatacattttgacagtagagctatcaggacttatagagagattgagtattgagtgtgggagaaagaggggtcagagataccttcaaaggttttggcctgagcaactggttttcatttaccaagaggggaagactatacaaggaacatattatactggaaggttgtgaggtgggagattgggaattcagttttggatatgatcaatttagttaggcatctaagtgaaaatatcaggtagacaattggatatatgagtctagaattgaggggagagggtggagagtgaaatttgagatgtactggtgtttagattgtatttaaaaccatgagatgggatgagatctctccatgaaagtgagtgtagacaatgaagaaaagagatctgaagactgaccatgaagcactccatgtttaaaattgaagatatgggccaggcayrgtggctcacaccagtaatccctgcactttgggaggccaaggcgggtggatcacctgaggtcaggagttcaagactaacctggccaacatgatgaaaccccgtctctactaaaaatacaaacaattagctgggtgtggtggcgggtacctgtaatccgagctacttgggaggcctgaggcaggagaatcacttgaacccgggaggtggaggttgcagtgagctgagatggcgccactgcactccagcctgggcaacaagagcgaaactctgtttcaaaaaaaaagaaagagaagaaaagagttgagggtatgaagaggaaccagcaaaagacactgagaaggaaaggccagtgaagtggaaagaaaactaggagagtggaatgtcctggaagccaactgtgttaatctgtttgtgctgctataacaaaataccttttactgggtaattaatcaagaacaaatttatttttcacagttctggaggttgggaagttcaaggtcaagatgccagcagagtcagtgtctggtgagggctactctctgcttccaaaatggcactgcctgctgagtccttatatgacagaagggggacagtgaaaagggacctagctggctctctccagctcttttgtaagattgctaattgcattcatgaaggcagagacaacatgacctaatcacctcctaaaggcctcacctgttagtactatcacatcggcagttcagtctcaatatttgaatttagggggacaaattcagaccatagcaccaaataaaacaggtgattccaggaggaaagagtgagccrctgtgccaaatactcctgataagtaagatgaggacttagaattgaccacttgatttagcactgtgaagagcaggcgctgtgacacatgagggaccaaagcctgagtagaatattctcttaagagagaatggatacacaaattttcatagcaacattatttataatagctgagaaatataaacaactcaaatgcctatcaagtggtgagaagacaaacaaaatgtgatatatccatgtcatgaaatagkgttcagccataaaaagaaatgaagttctgatacatactacaatgkggatgaacctcaaaaacattatgctcagtgaaagaatctagaaacaaaggacccttctgattccatttatatgagatgtctagaagaggcaaatccataaagacagaaaatagatttgtagttgccaagagctggggagaagaatgaatggggagtgacggttaattcatatggggtttatcttgggrgtgatagaaatgttctagaagtggtggtgatggttgcacaacattgcaaatgtactgtaagtcactggattgtacaatttagaatggtgatttttatggtgtgagaattatatctcaataataataatatagaatgactaggaggagagagactgagacagtgagtmaagaactcttttgaggagttttgctgtaaagagcagagaaattagagctggaggagaaacagagtaaacagaagagttttttaagtgagagaaataacagcatatttgtatactgataaaaatgatctaatatagaggggaaaattgatgatgctgaagagagaagataattttgttgtcatatcaatttgtgtgcctgttttccactggcatcacattgatgcaggcactgtgtggtaggcaagattctcacggtgaatggggtccaggcctgttaccagratttggccaacagtgagtgaaaaggtatcaactaacatcattggtgagtaaccaatctcgagccactaagctatgagaaacacagacatccacatgggggtagtcatgaaattttatggccacaaagagacattagatgtcattttacaaatgaagaaaccgaaacccagaatagggaagtaacgtgcccattcacatgctagttggcttatccagagtcaggataacagaaaacagaggatcatgtgggcttacgagagtgaccatacaaaatctagagrgctagaaagtttcccctcaagtagcagtaaaagaggaataggtagcaccaggagatgaaaagggaggctgaataaccatttgttctttctcccaccttcttaactccagccagaattatactgaaaccctcttggtcaaatagcatctgttgaaaggagaaggtacctcttctcctgaagcagtctattctggtgctgaacagcagtctttaacaaaacacagctcctgtcccttcttgcctgtaaacagaaatgagcaactttccaaccttcataatgkgactaattcctcctacagtctttatacaatatctgacttttttcacttttgtcctctagtcctttggctagttctgagcactccttcaagttttctcttgtccttctgaagttggagaacacagcatttgacctactcttctagtcagggtcagagcagtgctaaggtcggtagaaggctgctataccactgataccaggccctcctawaagaactcgagtaattccccgaggtaaaagggaggcttctttatgtggacaaggggacaaattgtttgcacaggtggaagtataagttctgctctgagaggagcatgagagaaacagaaacagaagtgaaatttggcaggatggaagactgcagtgtaaaggtagsccagtcactaatccattcaactttctattatctgcagctatcaggaggaaaaatgacatagatgaccctgaacagtggataatccaaatgggattttaaaatgcatcttgtgtagtggtagtgcctgggcttttattaggtagtgtgatgttgtttacatagttcactaattttcataattccatttgacttggaccaggatcaaaattgcacaccccaagtgttagtatttgatgcaccattgcccatgagtgtcccaagtgtcagggggaaaagctgaccacagagaaacagctaacaaggaagtgattgtcaaggcacgaatactggcctgaggcggcacaggtgggctcctaattgtaataaccccgcagcagctgagatctgagggaggggcctagcaactcgcacagcagacaagcctttctccacaaggctgcaaaagtagccaggatgcccttgcttgtttccctggcaaaggcttctgctctactaaactgaaaaggtcccagactaaggccaaagcatcagtcgtgtcactgctgctggtccattctgagttgacggttcstcaggccccttgccctttgtgggaagccctcccacttgaaggagactctccgtttacatgatctcttgatccttcgtcttctgcattctctgttttcagactttattaacacatcctctcctcccatcaagaaaacaaaaaacaaacaaacaaacaaacaaaaacaccacccactgacaggttggagaagccttcataatatctctgggtatcttctagactgttttacaaatgcccagttttatcatggatggctaatgacagattcccccttctcccttataagatcagaaggggtagggggcaagataaacaagccatgtctctgggtgagatatttgcctggggataggatgcgattcccatgcagaaatgcttatgtaataatcagtcattctaaacacatgtgacgtttccaatgccttctagaatcccagagtagaaaaggaactaaggcattgtatggttcaggcacatgcctccaggcaggtgaatgatttcaattaaacaagaacatagaaatgttggctgttccttcagatctttagaaatagagagttgacacccttgctcagtcacctctccttgtgctttatgcccttgataaggatcaagagtgagtaaaacagaattatcgtcggtatttctgggaagaactgaaataaagacagagtgaacagaagtaacagaagctggtagggaagttccgctgaactccatagcacatctatgtaacctgagtgtgccctcccagaagcactatcgatggttctgtctgttctgtaaccacattggctctcatatccacccccatcctttttttcactggcagcatcctatttatactcattcaacaagtacatggagtgagatctactctgttccagacacggagaatataaaaatgaatgagacactgtgtcctccctctaaagatgtgagagttgtacagtctagtggggaagacaaatctgaatgataggcaatcacaatatatttaacgaaggcaacagaccaccatcttctcatatatgaactgggtctgcagcctcctaacagttctccctgctccttgcctccccttccaagactcattgccaccaaaacactgtttggatcatccttttatccccttgaaaaactgtctatgcttctttattgtataagccttatctctcactaccctcctagaggaaccctgtgctccagcaatgctggtcccccagtagacatcccatcagtcagcgtgcctttcttcatacctccatttggaatgccttcctccccttcccaatctctacctaccttctaggattcaaacaccacctgcttctgctcttcctcctcctattctgctcagcccagctggaaatgacctttgcctcttctgagattctagtttcttctttacagaaattcatggcaatattctggcattagagttatttgtgtgcatatcttatctgccccactagactgtgaatttcattcagcactgtatccctggtccctagcacaagactctgatatttattgaatgaaggacaaatgaagatagaaggacattatggacttggaactgaatcataggaagccaaaggaatttattagtgaggaaaggggaatcccatatttcctaaagaattcttattaggttggtcagctttctgacatgaaagtgtaaagagggtctgactctttcatatttcctttaaaagagtaagtaatgaatttctcttctattatctgcaatttttttttaaagcaaaggtgtgggagcctctagttttatcttgaacagtttaactctggcttaaattgtcctcagaggaaagggcaagctatcccttatgagaaaataccaggccaaatatatttttaatcatgtgtaaatatcatctctccaactaaactatatgcttctcaaggacaagaatggattctgaattttctttacaaatgtttcctttgctctactggggtgcacatgtgtgcacatgcacacacacactcactcaagtgcacatgcacacagcctatgacagtgctgaggaaaagggtgagtgtactcawtacttaactgtctggtaccctctgagaccatcacagtggaactctgtaaaatcaggacagcaagggacaatttgataacaaatctcctcttaccaaatccacttctgatggctatgaaggcaactgtcatttcctgatggcacaattcagcagctataatttgcagcctggttaggtgagtgctgtgccctgcatgcaaagagggtgggtttgctcccatgctgtggcctgaagggattcgttggagcatatcggcttgtatctctgcaccaaaggatggaggcaccgaagggaaacacacagcagaagagattttgattaaacttgtttcttcgacactcagtctggaaagatgcattcccctgtgatgacagaaaaaactcaagtaagctataagaaatcaaaatctcgctctatttcttatccactttgagcaatctttccaaagttgtaggaattacccgctgatgtgtacatctgcctgttgttcttcctttggaaatgacccaacagaagagaggtgggatctgtatgttttgatccagggccatattgagcatcagagacaccaccctgcagataccattaaatgtgattgctttaactgtgaactagcagaattggggtatgtgagtgtgttggagttggggtgctttgtttatcatggagttacagtcaaatgtacactttcattggcctctctggccacagaaaggaaatgaggcaatataactttccagctacccaacaactggacagacccatgggaaatatcttattcccaacaccattgcctccttcaccagaaaacacacacacacgtgcgtgmacacacacacacacacatacacacacacaaacacacacatatacaccaagcagtctcccagctaaatctatctgggtaattacagtcttatctaggaatctttagcttgcctctctgaatataccacygtcaatatggggaggagggatgggtacaaaatatgtaggaatatgcctgtgctcttggaaataagctttgaaatgtttatcagacaaagaccaccaataacttagctgaaaaggtgtttgggtgggtggactaggaaaccagatttagccacaggtcactgcaaaggttcattgggaattttgacccttgtacccctatgcatggatggcccagttggtatctgatcttgtcatcttgctctgatgagtggatataaccactgctcatatctttacatgagatcttcccttaaaacaaggggctgtgtgactgaaggaaactgcccccaagctggaaagtccatgtggaacctgcatccacagcatctaagttcagctttcctggaggaatgatagagtgagcttgtcaagggttgaggaatccctttagaaatcaggaaaggccagtgatgatgaacattttytcatgtgtcttttggctgcataaatgtcttcttttgagaagtgtctgttcatatcctttgcccacttgttgatagggttgtttttttcttgtaaatttgttggggttcgttgtagattctggatattagccctttgtcagatgagtagattgcaaaaattttctcccgttctgtaggttgcctgttcactctgatggtagtttcttttgctstgcagaagctcttgagtttaattagatyccatttstcaattttggctttcgttgccattgcttttggtgttttagacatgaagtccttgctcatgcctatgtcctgaatggtaatgcctaggttttcttctagggttttttatggttttaggtctaacatttaagtctttaatccatcttgaattagtttttgtgtaagatgtaaggaagggatccagtttcagctttctacatatggctggccagttttcccatcaccatttattaaatagggaatcctttccccatttcttgtttttgtcaggtttgtcaaagatcagatagttgtagatatgcagcattatttctgagggctctgttctgttccattggtcaatatctctgttttggtaccagtaccatgctgttttggtkactgtagccttgtagtatagtttgaagtcaggtagcatgatgcctccagctttgttcttttggcttaggattgacttggcgatgtgggctcttttttggttccacatgaactttaaagtagttttttccaattctgtgaagaaagtcattggtagcttgatggggatggcattgaatctataaattaccttgggcagtatggccattttcacgatattgattcttcctacccatgagcgtggaatgttcttccatttgtttgtatcctcttttatttcattgagcagtggtttgtagttctccttgaagagttccttcacgtcccttgtaagttggattcctaggtattttattctctttgaagcaattgtgaatgggagttcactcatkatttggctctctgtttgtctgttattggtgtataagaatgcttgtgatttttgcacattgattttgtatcctgagactttgctgaagttgcttatcagcttaaggagattttgggctgagacratggggttttctagatatacaatcatctgcaaacagggacaatttgacttcctctttttctaattgaataccctttatttccttctcctgcctgattgccctggccagaacttccaacactatgttgaataggagtggtgagagagggcatccctgtcttgtgccagttttcaaagggaatgcttccagtttttgcccattcagtatgatattggctgtgggtttgtcatagatagctcttattattttgagatacgtcccatcaatacctaatttattgagagtttttagcatgaagggttgttgaatttggagaaataggaacacttttacactggtggtgggactgtaaactagttcaaccattgtggaagtcagtgtggcaattcctcagggatctagaactagaaataccatttgacccagccatcccattactgggtatatacccgaaggaatataaatcatgctgctataaagacacatgcacacgtatgtttattgcggcactattcacaatagcaaagacttggaaccaacccaaatgtccaataatgatagactggattaagaaaatatggcacatatacaccatggaatactatgcagccataaaaaacgatgagttcatgtcctttgtagggacatggatgaagctgtaaaccaccattctcagcaaactatcacaaggacaaaaaaccaaacactgcatgttctcactcataggtgggaattgaacaatgagaacacatggacacaggaaggggaacatcacactctggggcctgttgtggggtgggggrrgggggrrgggatagcmttaggagatayacctaatgttaaatgacgagttaacgggtgcagcacaccaacatggcacatgtatacatatgtaacwaacctgcacrttgtgcacatgtaccctaaaatttaaagtataataataaaaaaaaagttttactattgtaaaaaagaaagaaagaaagaaagaaatcaggaaagggaaaccaatgaggcaaagttgctggtgcctcatgtggaacagagaggaagtgcctgcataatccaggttgttggggccacagttcccctgataagaaaggcatgcagcagcttccttcggtctactgcctgcaaactcctgcctcctctaccttgggagaataatggctggacagtgggccgggcgtggtggctcacgcctgtaataccagcactttgggaggctgaggcagggggatcacatgaggccaggagttggataccagtctggccaacatggcgaaaacacatctctactaaaaatacaaaaattagccagatgtagtggtactcgtttgtaatcccagctactcagggaggctaggacacgagaattgcttgaacccgggaggtggaggttgcagtgagccgagatcacaccactgcactccagcctgggtgacagagcaagactgtctcaaaaaaattaattaattttttttaaaaaaggctggatattattgtttttctcccctggatggaagaccaaacagacaaggttggggctaaagtgggtattcgagccttcctatgctccgttcttctgcttcttgtagctatagagccccacagcaggcagaacgtgggcagtctttgcagagggaaggattttgccattaaccccaggaagaaacagcactcttcagtctttctttgataacgcgtccttagctgcataatagcactgtgccaaccatttcgactgaaatccatttaaacaaaggagacacccaatttaacatctaaggctaggcatatctgtgatgtcaataacctatttgattcattctattcacatatgtgactgttttaactgataatatatatgtgtgtgtgcacacacgcacgtgtatatgcagaactgaactttaggtggcattatgtataggctcaagttcaagtctgtcctataaagtacagtccaactgcttttcccaagccttccaaaggctggtatagttattaaaatttgagcaactacccaggctgagttttttagaatataatggattgatactgaattactatgccactttgtgtaatcgttgggggagggagtagtacagccagtctctaccattgtgtccaggctgaatcctgctcattttgggtaaaaagaatataattgtttaacattttaaaaggcaaataaaagtgcttaaatattttgtaatttgcaacttgaaaagaaaacagtaatgggtttccaagtacatgtgtttacttttaatgaagtgtttatttttcatggttctattggcaataaaagaacagctccacatcaaaagccttcagggaagcagttttcatttggaggacagtgagattgccaataattctgatttttttttttttttttggaaaaagtaaactccctagactatatttctagatatagcttatagcctattatcccaggtaattattttttgtctcttactcatatagacaaattacaaaaccttatgtactataccctaaaaagatttttaaaatttaagtgacatcaagatcagagggctccagaatgttttaatgaacatgtttccattatcctctgtgcctgttcattttgttggaagaatgattcattcatttcaaatttggcaacttaaacagcagcaaattataattttcccatcataacccaaagtcagtatattggcttctcagcctttgagggcccttttgtaccttcttttgctttgacaacagcaccctctgctgggttttgtaatccatcacctctaatgggatcgacccaaatcgcaaacggaggcctccctgcaacgttgcacacagcaggacatgattcataaatcagtgttccaccctggtgattcattaccagatatattttttctgtaaaacagcacagctcaaggaagttatcaagaattcagaagctgcaaaaaataccttcgtttgattaatcatctctctgacctttttcttcttcttgaacaaggttaataatacttgttatcactcaaagttaaactgtattagctgccaagtgatttttattttgcaaagtcctgttatcactgccgagacgcttcaaagctgggattggttacattcctcaggtatgaccccgagggacacctgacmaatgcaacgtttcccactggagaggtcagcagcttccacagtgacctggagaagctgacaaaagtggagctagatacttccaaccgtgaaaatgtcctcatgtcaaccaacttgacggcaactagtaccatatatattttaaaacaaggtaagattgtttccaacgatatctgactgtaacagcccctatgtcaacatccaccttgaaacctgcgtacaccattcataaacagaattcacctctagctgagaagatgtactcttcctgttttccagctatggaagttgaaacacagacaaaattcacaccttttacaagttctcacatcaactttgggcccatctctgtgggagtcatgaggttcaatccctgccaagtctgctctgctatcaacttatttcccaatacccagctgtttgcaaaggtctttcagggtctggctaggttatattaaataaatggagcctgggctccagctgagcttggcattctagatcaatgccaacatgggtgaagaaaaaggaaaatcttaggatacagaccaagcaagaatataagtgaaatgagagaattaaaaactcattatatttgaagacagaaaagtaaggaagaacagaagaagaaaggaaggaagggagataggatttggaatgtcttagaagctagaggacaagtgcacaaagagaaattgctttctctctgccctgtcattaagacctcattctgttgttaggtggtgacaccagacactcttaagagtacactaacttttgttagtggtattttgtggagtacggcaactgtgatggtgggcccaggtggtaaggtgctacgttgaacttcacactcttctcattctagctcccagcatatcaaactgaggaggctgatccaacaagtcagtgagggagggaattctttaaaaatgaaaaaagaaaaaaacaaaaacagcctgcagtgttagacaagagtcttttatccaagaaacagatactccagctgtgaaaataacaagacccaaatggatagggaacacgtttgcctgtcagagcggtagtctagcccagaaggcagataggaccacagcaccccacctgcttatcccccaaacgtgcctcctaaaactaaacctgtctcttttctgcttcctgctcttcccttccttccccctcttcctcctttgctcttctgtctacagaaaatactcaaagtacctatcgggtgaatccagatggttccctgcgtgtcacttttgccagcgggatggagatcggcctcagctcagagccccacatcctggcaggggcagtcaaccctaccctgggcaaatgcaacatctcattgcccggagagcacaatgcaaacctcatcgagtggcggcagaggaaggagcaaaacaaaggcaatgtttcggcttttgaaaggaggctgagggtaaggcttgactttacacaagatatagaacttttataggtgttttgtttgtttgtttgtttgtttgtttgtttgtttaactgcagagcctccctaaactgaagtcccatttctccaaagcttttctaagtgactgactggcttatatgatatactaattcaaaagaggatgctaatggccgataatggttcagtatccttaaatgagcattctaataggagctttctttgtcattagccagctaaagtgctctaatagtagcaatttcaccaagaaagtctggctggagaaatgtgtttagtcaaaggaggccctccagcacccctcccagcatgccctggagatgtctatcaggttcactgagttgaccgaggtccctgctttccaggtagctctttggaaagacctcgcaggtacacacaaaaggatgtgagacaaaaggcaacatttgggcaaagacaagaggaaaaatcagtgaattatagcattgccatgaatacatatccagggccagagggataaaggactggtactgagattgggctgaggtactcagagstgcctggaggaagttatagattagggagttttaaagtccttaccaagcacagttcaccagagttaaccaggagacctcggtcagcttttctgcagcacacaaagcctacaatcgccatagcactctgtctacctgyctcctcttgaacgttaaccagtgttaggatgatgtggccagctttctacatgtagtaacattcaatatcagccctagagcractgccagcctgcgggaaataatcactcactattgaggccagatctgctttgagcacctgtgtcacgcctgatataccgggaaggtttctgttatatataaagtttcggtgcygcaaaaggaatagcactcgaatataaaattttctttttaattatcagyaaggcaagttacttctatagaagggtgcgcccttacagatggagcaatggtgagtgcacacttggacaagggaggggaaggggctcttatccctgacgcacgtgttgctgtgtcgttcccctattggctagggttagaccgcacagactaaactaattccgattggctaatttaaagagaatgacggggtgagtgttttggcgggagtcagggcagagcaggtagcaggtaatctgaatgagttagggtagagcaggtgatccgaatgatttagggtggagcaggtaatcggaatgagtcagggtggagtaggtaattgaaaaaggttgctttacgaggaagttaagtttaaaagtagaaggcaaagaattgaacatactgacatattaattatttgaaaagaaatgtagaactcatatcaaaaatttggtaaccttaaggttgtggaagtgcaacccccaaacaaccacccaattccagagagaggcagtcaaaccggtcatatggcttgatatgaacaaaataatctacagcagtgctcacttttcttttttttttctttttttttttttgagacaagagtcttgctctgtcrcccaggctggagtgcagtggtgcgatctcggctcactgcaagctctgcctcccgggttcacgccattctcctgcctcagcctcccaagtagctgggactacaggtgcccgccaccacacccggctacttttttgtatttttagtagagacgggatttcaccgtgttcgccaggatggtcttgatctcctgacctcgtgatccacctgcctcggcctcccaaagtgctgggattacaggcatgagccaccgtgcccggccagtgctcacttttcaatcagttctcttggtgacacacagccacagactttagtgggtggtttttttgttgttgtttggttttgtttgggttttttttttataaagctactgaaatttgtatgtgcacaagtcaatttttatgtttcgattctattgacaagtttctgacagaatatttaccagatatgccactgaatggagaagtgaaaccaatccaaatatcaaaccaatgtgtgggtagcagtaaagatttctatcggaattctttgagaaataggacctcctgggtagaaccctggatggggaagttagagaacctggccttgataccctattttacaaacgctttaagaaatgccttgatttttttttttcacctgtaaaataaaagtgtactactagagaaagtaagaattatctacatatggcttatcgacctcatggactcatcacagaaaaattgtattgaagacatgatttcttagtacctctcccagcatatagcctcaaaaaaactttctgaaccaaatcatatactatgtgactttgggatttttcattctttaggataactcatcctatattatgtgaccttggaagtttccattttctagaacaacccatcctgttttctgtcctccatatgcacagataatggagagaaactataaactgtaatttacaccccatatcccaaattgttcttagtgctgagaagctaattgtcataaaacatttgggagctcattagtgttaagaagtaaagtgtttagttagtactaattataatgtgacccatttccgatcctgtggcagagttgagcagatttgcggactggactataagggcaacaaattcaaggccytcttctctatatcacttctaggctactccctgaggtcctgtgactgaaaaatgaggccccttattggccaggtggtgttaccatggcatgccccagaagtctaataacaataacaatcatttacatatgtttagtgcctcagagtgaacaaaatggtttcatagccaggattttatttgatcaccacagctgtcaattgttactttcaatttacagataaggagaccaaggcccaggtaggttaagtgatttgcccaaagtcaaccagctattaaggatcagagccagagctaaaatgcaggtcctcacctagcatggcactctttctactgcatcacactgtgctgccttgttccttaaaataattaatctataaatcattgccccactcagtggagctaccttggcagggcctgactcctcatttcaatgctgacaaaaagggacaaataatcgactctaatgtactggcaagtgtgggaggcacaggacaactggctggcttccaggcaggaaaagcatgaagcaggcaaaaagaggaaggaggctgcttaactggttaatttttaccygatctccctattcctagtgattttttttatgctgatgcctcaatttccccagatttggcatttccaatttaatgaaatgagtatgctcccaaaagggacatgtgaatccaattttgacaaagcaaattctcttcccccactgacgttattatttccgagatggcgtcccttcatttctggtagctttcaagggacaagcygatgccaattttctctcttcctggaccaaaatatgcaatgacccatttgtaagcatccaaagaataagcttctctgatgctctcaagttcctcaataccttggactgaatcatttatttcttctagtgaagctgtcatttcagactgagggcaggtggagctatcagagctgttgagacagaatttccaagtcatacaacatagaaaccccttctgtactgtgggaaatggggctcccttttgaaaacccacacaaaagtgtggttgtaatttgcaagtgtgcaggccataaagcactaattgttcaaggacaaaatgacaggttcatttaaaggcccatttggtaagatgatagacgtcaaatgttcccaaaagctgccgatcacacctcccccagaccttttagctggaaagaaaaaaaaatcagaaaaggatagacctatctttggagaataatcagtgattttttttcatgcaacgtcaggatcctttttaaggtgagggaggcaaacttttgggaaacatgataccctgctcagcctgagcaggcaagggatttgttacctctgagccatccttcaccagctccattaagtgaaataagtcacattaacatcctgaaatttcatttatttaaaaaatccatttccctccaacctgagttgtgtttgactcatcttccttccttgcaaggcacttttgcatctagtccatgtatctgcttatctgctgcatcaatctgtccccataaatacatttccctggacaatagagaaattagagtgcagataacaatagaggcaattgtaaaaagaattgggcatttaccaaaagcatactggtttaggaactacatccagtttgtaccttgctatgtccatggataacaatgctgtcatatgagatgtatcccagctttggatcccagagctgtttataagattttgtagactgagttgtaaggttatagcaaaatccctgaactgcagcctcctttattaaaagaaaaacaatggagggggcttagcactttatgaccaaaattataaaatcaggtaggattattatgtgtttacaaatgaaatgaagcaaggacttatctaaaactctcccaatttacttttttcctctactcaaacataactgagaatagggtaggttggtttttaaatgaaacgtgagtgttcagatgtgagctgagaaggagaaacaagctcggttgaacacagggtctcaggctgacaaatgatggggaattggtgggggcagccaagagggctctggcctttccctctattctgagaaattgccttggtcctcagctacagggtgctcagagttggattttcattcacttgacactattttaacttccttctcctcaggtttggtggaagcatttattttgtgaaaatttagataaggagcctgactggagatatattaatcagattaatctatttaaaaatatatctgcagttttcagtcaagtaacagtgcttttccccctaaggagccccctggagacaggagatttcctatatcaaggctactgggcagtattgatttttggggtccaggaattcttggggcttccaaatcatagaacctgctatatttggttgtgtttttgtttttttgttttttgtctcccagagtggaatgcagtggcacgatcttggctcactgcagcctctaactcccgggctcaagcgaatctcccacctcagtctcctgagtagctgggactacaggcgcatgccaccgtgctcggctaatttttgtttttgtttctttgtaaagacagggtcttgccatgttgcccaggctggtcttgaactcctggactcaagccatccgcccacctcagcctcctaaagtgctgggacttcaggcacgagtcaccgtgcctagcctatttttgttaatcttggatcaacctcactaagataactagaaagaaagaattatttcatataccatttcacctgtatatgagcattaatgatttggtataaaaaaattttaaatatctgttgtatggttacacagatgaattggtcaacagcaaagtacttaagcaagggcaaattagcatagtgcaaaaaatgtccaaggtaaataatatagccaaagttgggtgagaaaaatgagtatgattttgaggaagaactggtatgcccataattttgcacttttctcatctataaaaagagggacatggatggtgcaatatattattagtggtagtattaaccataacagcagcaattagcattccttgaagccttaccatgtatactgccacatattaactcatttactatttataacaccttaccagatgggtttatcattatcattcccattttacagatgaagaaactgaggcacagagaggtcacacagctagtaagcagtgatcacaggatttgaattcaggcagtctggctcaaaagcccatttcctaagatcccctctgttgataaggttctatatgctggcaaagtaaagggagtgtcttgggagtaaaaaacattatattattgaatcaaattcttcaaaagaattagaaacaactagttgtatgtgattgtaaattacagtgggtagtcggataagagtgaacagaagggttccttctaactcaagcagttttgtgtcaaaggttattatgatgtcatgtaaacttttctagaaatctatcactatgtaaacaaatgattgaaaatcctgcatgggggacaaaacagttggtggggatgttaaattgacrtaaagggaaatgagaagttttgggggtgatggaaatgctatcacgattgtggtagtggttacctgattcaatgactgtcaaaactcattaaattgtacgcttaaaattggtgactcctactgtgtgtaaactatccaaataaagttgattttaaaataataaagcacatatacaccaaaaaataaaaaaaaagaaaaaaagaaaatcctgcataaatgtcatacaatgattcttgttaaatatgaaataatttttaaagaataaaatgtctagagaaattatacatttattccatctattttaaaagtaagtttagttctctttcaaaaagaaagaaaaaaatgggaattccaggtgaaatattagaggctgatgctagtactgaacatatgccctgttcattggtaggcatctctgtgaaataaaagtaggcttaagtaagcttttgattgtctaccaagagataccaataaaaaaaaaaatctgtggaattaatgtagtgattgatttctaaaaatcaaatactaattaccttaaaactagtgagagtaaagtascatgtggtactttttaagatcaactgtgacttttttttttttttaagagtcttgctctgtcgcccaggctggagggcagtggcgcgatcttggcccactgcaagctccgtctcctctgttcgagcagttctccttcctcagccttccgagtagctgggattacaggcgcctgccaccacgcccggctaattttttgtatttttaatagagatggggtttcaccgcattagccaggatggtctctatctcctgaccttgtgatccgcccgcctgggcctcccaaagtgctgggattacagacgtgagccaccgcgcccagccccaactgtgacttttctatccattctcacaacttcataaaaattaaatgcaggaggccgggcacggtggctcacacctgtaatcccaggactttgggaggctgaggcgggtggatcactgggtcacttcaagaccaggctggccaacatggtgaaaccccgtctctactaaaaatacaaaaattaaccgggcatggtggcgggtgcctataatcccagctactcaggaggctgaggcaggagaatcccttgaacccgggaggtggaggttgtggtgagccaagatcatgccattgcactccagcctgggcgacagagcgagactctgtctcaaaaacaaaaacaaaaacaaaaaaattaaatgcaggatcttccaaactctgacgtggctatttggcccatctcacttatttaccttccaacttcttcagcaaaaattaaacaagtaacacagttgtctagtgacagtgttcttgaaaattcagccttctcctccttaaggaggggagaaaatcaactgcagtgatcatagctcagagttcagcacattcacaggcgtgggtgtgcaagtgtgtagttggttgaaccatagcaaattgccctttgtgtaggtcaaaaacagctaaatatcaccaattgcctttagatcaacgtagtacaatgttatttttctaactgaacgactttcaaatcagaagggttgaaaggattttctcttgaacaattagaacacaaagtcctcagaaagagcaggaaagggctttgcttttccccatataccctctttttacaggccttttcatttctgccagcaacactattcgtggctctccagagcacactcttccctctttcctctctggtcctagtatgaacaacaatcaggcctgtctcctagtatagctgaaaaaaacataagggaaaccgaaggatgcattacagcgtagatccatcttcccttattaaaaacctattaccaaacagttttcttaccacaccacacagcctgtcagttgccaaactcaaaggttttattcaatgcacagctatccaaagataccctttttaacttggagctattcccaaatttcaatccttttttcccccccttctcttttccagggaaaggattagtgtagattgaatactgaaacaagagtggaaataaagattgatggtccacacttaggtcaagggctatcatctttcaggaaagcaagcacttgtatgaatgtggagctttctcagccttgcccacaaacccagtagtaggtagtgttcagcctagttcttattcttatcatagaggctggtggcacgtgagcactcaagaaggaggttggaggcctggcgtggtggctcatgcctgtaatcccagcactttgggagggtgaggtgggtggattgcctgaggtcaggagttcgagaccagcctggccaacatggcgaaaccctgtctctactaaaaatacaaaaaaattagctgggcgtggtggcgggcacctgtaatcccagctactcgggaggctgaggcaggagaatcgcttgaaccaggaagtggaggttgcagtgagccaagatcgtgccattgcactccagcctgggtgacaagagcaaaactccggctcgaaaaaaaaaaaaaaggttgggagagctcagctggaaaagcattctctttgccaggcttctcacacatggtttccccaggagactcagggaggaacctgtggcatcttcagttccttcattcttttttagctcttagccgaattttacattaacttccaaacctgactttgaaactagtgtttcagcagcactggaatatcagagtgcattatccataaacagagaagcacagcggcagacgtcttgacaggcagagaaagaacattaggcagagttgtcctctgcttgctttgtggtggattttaaacagtgatccctgcttatgtagctataatgactttactaagaaatgtgttcttgagtagtaaacttaatctatcagacaaataaaaccacaaatttagttgaactggaaatcacttgttactttggctctttaactatcattatagcataaattgcaacagttacaaccatctctgggagtacatggatattttacagctattgtaaatgaacagtattacagttggagatatgtggctgtgaaaccacaggaagggtagttcaagaacacctggtttcctataggcttccaggcccgttgtatcaaaagacaggaaatatgcgcttttcttatcaccttttaggtgcacataacaacacataagcacataacaacaggtggctgtatatgtatgcaagacaacactgcatgcattggccacagatggtataaagagtcaagagtcccaatttgtggttgtactccctgaattaaacctacccctgacacaaacggcacttgcccccagataatttaagcatctaaccactagtcttccagatacaattcatggcatggaacatttgrtaggtcttctttttttttttttcagaagttcaaaattaagggcaaataacattagccccagctgaccaatgaagaaactgaaaccaaaagaggtttaaaaaggaaagtgtcacaccccaatagaaaaatgggcaaatatcatgagcagacaatttatagaagatacacatgtggccaatagatgttaaaaagtgttcagcctcagtagtaatcaaataaatgcaaatttaagccacagcagcatatcattttcccactctcatattgggaaaagttaattaactgataatactcaatgctagtaaggatggactgagatagcctctcccactactagctaatgggagtatgaatttatacaacctctgtgcactataaagtaatctctcaggttgcatcaggggtcttttaacatgtctcatttgacccagtaatttcactcatagggttctgtattatggaaatatttacttataaaaatgttcagcaaaacatgcaatatgaaagagaaaaacaaaaactctactttctgatttctaattgggagaatagataaataaatgtttatcatgtagtaagacatgcaaccattaaaaagtatattttaagaacattgaataacacaaggaatgctaaagataaaacattagctgaaaaagtaggacacaaaactttaaayacaatcctagttgtatgttttaaatgtatgcacagagattatgccaaaaaagtaagataaatgaaatgaaatacagtgaagtgttaacagtgattttcattggatggttggattacatgtaattatatcctttgtacatttctatatttctaatttttctgccatgaaaaagttatctcttttatatttgggggtgggagggaaaggttactttttaaagcaaagagcacaagattctgaacaaaggaagaccagagtctggtatgagagcattagctttgcagccatccagacctctaagatcaaaactctttctgaaccaggatgttgatcttggattcctgagacctgaaaaggttttatgtttaggtttttcagaaaggttcaaagcccccctaagagtatattaaaaatgttaatatatatgcattttatatgcacttttcttgggatacattgcatagctttcagatagttaaacagatccttgaccacaaaagttaaaattaacatcaagtttagttgagtagctagtgaatcagtttaatctgactatgattaatgtagtcaaatcctaatgtgagtttcactcctccccttcattaacaagatatttaacatttcattcaggatcatgttgacaactcttaccgatataaatctagtacactaagctacaatcaccttggaatctgaaatgtggtcctattcacaagcctaaataaaatgagaaaagtaatcattatgttatacaaataacaattactagtgttgtttcacagcttaccaagtacctgtatatggaatatcgtttaattcttagcacaagtttgtggtgtaaagtggtaacatcactcttgtttcacagataagaaaactaaggcgcagatggaagaaatgactggtgcacagacaagtaactagtttgaatgtctcctgactgcagttcactgctacttagactcctcaaagtctctcctttttcattcttgtttttgttccwgccggatacactaggactctctccacccaaatcagaagtctgtcccctaaaagctgggtgaagggtacacagcaactytaccatttttgcaacttcttgtgagtcagactatgtaaaaataaaaagttttaacacaacaaaacataaaacccactaaaactaaaacttaactaaactgagctaagctaaaataaaataaattttaaaattccttcctgcactttccacctatgccttcttcaaagctcccctcttccacagggccttcttcagtgcactggccagcagggactgaacctcttaatgactaaaatcaagaacaccttttttttttctgaaacacacacacacamaaaaaaacagttgaggattgcattttctaagtgattgtgttgtaatcagctacccatagcagaagttactggtagatctagcaaacactgacactaccagctgaaacgtggaaaaaatcaggtcagttgtcccactgctgattttttaaactttttttttttttactaagtcatttagttatttggttatcttgtgtgaacccagatgaattttatcagtcaggcaccgttgaatactgtctttcatggaatccagttcaagatcccttgaatcaggatcactctgggactgctacaaggttttgaggtgcccagagaaaatgctaccatacggtagaaaaagtctagaaccagaatcatgtgaaagtactgtttctaaacttggaatccaaacttaactctgtgctttaaccacagttagtggtgctgcccttgtgaatgctgggggacctaccaacacttagttcatttacctacaggcctccgtgaaagtattgctaagtgagattccataactagagggcaaggcaacctgagttcccctataataggtgtgaaatcatataaaactccaagcccaggtgaatgaggaaaccaaagaagggaatctgtataagttagagggggctcactgtattccttttgtctgatttctaatcacacaaataattcacccttttatgttatggccacttcactggtgaaaagggtgaaggaatacccactccttagtaggcaactgacttacataaaataagatcacataattactraaaactgtggcactgcacttaaggcttgagctggggaaaaagcaatcaacaaccacctattgagagtctagagtatttcaagtacttaagacatagccctgctctctgagagtgtacaatgtggtagaggaataaagacaggtggcatctgtggratgtgaagccgtgaggcttcagaggcaagacagactctatcgttggataatcaggaaaggattcatgattgtcagtgctctaatgaggggaacaaggctgtgcttaaaatgtatttcatatctctttctcataggcccacaacagaaacctactctccatagattttgatcatataacccgcacaggaaagatctatgatgaccatcgaaaattcacccttcgaattctttatgaccagactgggcgacccattctgtggtctcctgtaagcagatataatgaagtgaacatcacatattcrccttcgggattggtgacgtttattcaaagaggaacgtggaatgaaaaaatggaatatgaccagagtgggaaaattatttcaagaacttgggctgatgggaaaatttggagctatacctacttagaaaaagtaagtacataggggaaaaagacaagtttcaagtttctgaatgagrctatcgaaaatggccctaattgtccatcttggtgaggacctgcaggagaaaagtctgtgttccagctgttctgttctgtagaagtaacaaaaagatgttgaacttataaggataaactgtttttcagctgaaaattttccccagtcccagactctgccaagtactctttcagwctaaagtcagaataacggcttagctttctcctcatttgaacatctttgttcatgcttttgaaaaggttatctttattattatgaaagctcataccgagggaaaaatagctagaaaattataaaattgtgttaatgtactcagctctggtaaagggctttttacccagaggataagcaattctaattttgttaggatagtcagtgaagttttagttgtatacatttgaagactaatttccaaaagtaatcagcctgcgggaatggtggtagtggggcctcattggtaatactcttttctgtacactgagtctccagtagcatccataatgggagcttgtggcctgtgtctgggaataatagaaaaatattttaatcccactacaggaaccatttgtcaaacatcagcccctacagagcaaaatggtttctggccagattggtaccagaggacagtaagagtaattgatctctatctcaatgtctaatctcctaagatagtgcctcttgtttcccaaatctattctttcaacacatttaggaattcatcagtcctaaattaatttctacaaaaattgaaaaatggcttcccttgagaattcaagggtaatcagtacaaggtagcttctagatgttcttagagaagtcataggagctcatagctcacatgacagatttccctattggtaccaaataatgcccaacttttctgatacgccctccccaaagttaaacaaaaatagtgtgccagtggttatatgtcattatmaaaccatgttactagttcccagagtttgttgctggagaatttaccaagttggaaatgcctggagatgaagcagagttcacttgggagccagggcaaaaggaaggagtcctttggtgaatccacctcatgtccttttttgctagaaatatttatcaaatctataatctatcctctacactggcaaaatctgaatcttatagagcaggtctttcctcttttgaattttggtaacaagaatgattggcaaaaccgtgtgactagtgcctacagaatgccaagcctgttacaacattaactgaatccaaaaatttgctggtatgtgtgcataggcaaagtatttcttaaggtgtatattgatgaccttcatatgaaaaaaacartgctactgatcactaacagaatattagctgagttagtttttcagaaaggaagacaggtttgcaccaatctttccacaggtcccccatgtgactagttaagtagccagcactccttagaagcataygtaggattgcactcataattccaacctcattggcaccagagtccgaccaaytgagctaattgcctatagacagtcacatctaggtctcataagactttcccctctagatgacgagttagtgggtgcagcgcaccagcatggcacatgtatacatacgtaactaacctgcacattgtgcacatgtaccctaaaacttaaagtataataataaaaaaaagactttccctttagactmtctgcacaataacataagagcctattgaaaacttcaatttcatccctgggtgcagttatttagcctcttctctgacaccaatgaggagattttattgkttctcttttcysaattcactgattattccatcaaatttacttaagcmaagaatcacgtgaagcaaacttcacaagttctctttgctacaaaaacgtagttggcaataattgctargcaaacaaacaaaaacctcggtgagactgccagtgtctgcagtggacaaaaataagaccttcctcacccagaataaggtatcaagacaagtcctggtaactttctgaccagtragacaaaccagcttatttgtacctttgagttcacttttgttcctttcttgattttatatttaatttgttctctaattaaaagggtagctactgatttaagcagtcctgttatgcaaaactcagaacctacagaacgcataattatggaacgattctttactttccaaaagtcatttgtcataaaattgattttattaacattattattaccagtaatcataactaattcactgaatagatataattaaatgaaataacttaatataaaacacccaagtagagaatttaaatgctagctagcacttactgccacttggaggtaaatcaaaacaagaaagagcagaagaaagtaagggagggaagaaggaaggaagggagggaggcagggagggagggaggaaattaaagcatctttgaaattgtgattctagagggaaaaagggaaagaacattgaatttaccaaaatcccatgtaacatgtaactttttcactgacttgargttttgtatctccttgtgttctttccagtcctctcattaatatggcctttgtggcacattctcccactatgacaggggcagagcagggataaagaggctcgttcttgtagtatattttaaactaagaattctcaaactttaaaatggatttctctttttacaccccaaaatactctggtattaccttgtgaattcgcttgcyatacctgtgtcacgatgtattaaaaagcagcagcagatttttcaccttaacacgcagaaattttgtgaaaatagtttgacttcttctagagtaagtgaaacttatgcatatcattttcatgcacaatggttgtagccattaggagaaaaataattatttgggtaatggctgtggttgcttaatgatctcttccctattaaaaaaatcaattattgtttcttaaattttctctatgtggtcattaattctctgtcttgatttatgagacttctctgagttaattatattttgaagacttgtgggctaaaattttgtattagagtaaatgtaaacctttcagtttcctaaaataattcttatgaacttcatttttaaaatgcatttaaatatattttataatcatttaataagatacttyagccttatacatttacagcaattgcctctttggggctgacactttcagaggctgcctagagagacagaacsacgactttggcttcagcttccaggtggccccacactgccatctggtggtcattcaaatrctttaacttttcaaatttctgctctcatttctagtcttgttcaaataagcatacagccatgattgctgttgctgttgttgttgcttttacaattatctcttttagaacctcacaatcaattaaaagaataaaagtctcccactctgttatttggactaataagaaatggccttttatcctataacagcattgtggacattggatagattcataagcactgtttttgagcaaactgataataatgcccacccaaagtgaaaaagcagccaaatgagagctaaatggtattttggcaatgtaacagttacattcatttgatttctaatcacatcatccacattcttgccattggcaggaagctttgaaacagactaagggcttttgagacagcccagcatcagcaccacctaggaacacggttcaggcagtggtttactgcaggcaggaggatgggaacagaggagagaataacaacgacgtgccataaatacttggaaaggctggtacagtgactggaaaaggcatggcccaggcaggctggtactagataatgtgtgggggccatatggtgatagtccctggcccgtgtcacaggtgacagatgtcatttactcacagcaagttgacagaagagagtggaaaggaactgagaaatgtgactttcagactagagataatgcaaaagcttttccacaattcctgtacraagcttttccacccctgccccctgccacctgctttcccattcataggaaaatttcttgctggttctattgaattctgccttggtccagggaggcagttctcccttaatgtctccaagcccattcaggatttccaagtctccttccttttgttcaggaggttttcagaggtcacagtggtggaactgtaggctgtggcaagctgcaggttgtccacaagtgacgaattgacaggatttctgcactcacctctggctctgcaggcgtaatgttggtggaaaagaaagaatgaacaaatgagcaaataaccactgactttgacttcatggtactgaaatgcaattcaaagtcaataattctcagaagggtagggaggatatgcagtttcagaaagcacattcaatattagaatgtaatgtcatatttagaagatataaatgtacattacatatacttrtgtaattcacattcataaatatttatataatttgtgcttagaaaatgaaaatatacctattgttttcataacacaaacttgaataaataaccctcaactaaatctctttgcttgaaaaggtaattttctaaaggggaaggataaagctcctctagggagtcatatcagaatctccaaggatgagaaatttttatttttattaaaagatgagatgcacatgtcagtcaattagagtcctccctaaaacagtgctccttttatgtctgcatttagaattaaaacaagacaatcaatatttatgaarcacctgttacctgcattatacctcaacaaacaactgtttctaaaatacagatcagtttgggggagaggggctgcataaccagagaatcattcagttttaatgacatgcttccctaatattaaaacacaaatggaaatgtgaagttaaaacatcaattgcaaaacattaatagtgccataataatattttatgcacaatttttaggaagacatctagtatgtgaagtcaatcaatactttatgataactataaattaatttgtgaaatgccctgccatccatttaccttcctctgaaacatatgcacrttgaagtaacctttctaaaataccaacttgacagtttctcccagcttgcaagtgccctcttgcaaccgtcccttaacttgcttaaaacccttcaagagtgccagatgcagtggcacacattggtagtcccagttactcaggaggctgagacaggaggatagcctaagctcaggagttcgaggctgcagtgagctatgactacaccactgcactccagcctgggcaacacmgtgagaccctggctctaaaaaaatgaaataaaatagaaacccttcgatgactccctgttgccaacatacttgaatccaaactccttagtgtggcttagaaagcctagcatgatctggactcagcctacatagctgacgtcatctcctgccattcccaccactcccaacatactcaagttctagccacacaaaatttctctcattctctgaaaaagccgtgttctttttcatatccagaccctcacaaggctgtgctctctgccaagaatactctttccctacccctgcccccggctccctgccttcacctggacaatccctaggcaatctttatgtctcaactcagatgccactttatccaagaagccttttctggtctctcaagtctgagtaagctggtcttcctctgccttccagaagcactctgtaactcccctgtcataacacatttcacactatattgtaattgcttggttacttgtctttctcctccattaaaactgtaaatttcatgaagatagacaccactattgtgcactactgtatccactagggtttgccacagtgtctggcacacagtaagtgcttgattgatttgtgttgaatggatgaatgtgtattttctttagtcgcctcaactttagttgtccataatatgctattctgcctttgtctcgtttcagtctgtgatgcttctcctacacagccagcggcgttacatctttgagtatgaccaaccagattgtctgctctcagtcaccatgcctagcatggtgcgtcacagcttacaaaccatgctttcagtgggctactaccggaacatctacaccccaccggacagtagcacttcttttatccaagactatagtcgagatggccgattgctacagaccctgcatctggggacagggcgcagagtcttatacaagtacaccaagcaagcaaggctttctgaggttctctatgataccactcaggtcacattaacatatgaagagtcttctggagtgattaagacaatacacctgatgcatgacggattcatctgcacaatcagatacaggcaaacaggtttgttgtgaaagagtggtggtgtgtacaacaacatcactattttcttatgacatttttactgaccacagtgtgagatagaagcattaatctacacacattcaacccaactttcactttacttatcaaattatctgacattgaaaatgtaaagcatgttatagtctgatgaaagctgatttcttaaaaacatatagtgcatttctttctttcagctctcaagtaatttgaaatccaagtgcctagtgtaactgtatacccattcctgctcagcaccaaatcttctcaaagatgaaackgcaagatataagtctcactgaaactagctcaagccctgtgtaacctttataagcctcagttgatgacaaaatatcttcacaagtcagaactttctaatgtatttcaccctttgggtttatagaatgcccaaatccagttactttaatgctggaatttgtcaaaacctgaccctctgactttgtagcaaaggttaaatgaaatgaaagcatttttgtcagtgattatagcaagaagtatcaatttcatcaccctgggctactggatgtgttattacttctgtagtttctataattaaaattttctataactatagagtattttaattttttatatttgaggattaccactatgagaatatatatccatgaggtaatatgcccaggcatttgatatcagagatcagtctctaatattgtattatgaatataaaagcaccagtactaaataaaataacactagacctttctgactcttccacattgatcgcctagcttcttactgtttttgttttggttcctgcaggacctcttattggacgccagattttcagattcagtgaagaaggccttgtgaatgcacggttcgactacagctacaacaatttccgagtcacaagcatgcaagctgtaatcaatgaaacccctttgcctatagatctttaccgatatgttgatgtctctggcagaacagagcagtttggaaaattcagtgtaattaattacgatttaaatcaggtcataactactacagtgatgaaacacaccaaaatcttcagtgccaatggacaagtcattgaagtccaatatgaaatcctaaaggcaattgcctactggatgaccattcaatatgataatgtgggccgcatggtaatatgtgacataagggtaggagtagatgccaatataacaaggtacttctatgaatacgatgctgatgggcaacttcagactgtttctgtaaatgacaaaacccagtggcgttatagttacgatctgaatggaaacatcaacctcttaagccatgggaagagtgctcgtcttactcctctccgatatgacctccgagaccgcatcaccagattaggagaaattcagtataaaatggatgaagatggctttctgaggcagaggggaaatgatatttttgaatataattctaatggcctgctgcagaaagcctacaataaggcttctggctggactgtgcagtattactatgatgggcttgggcgacgtgtcgcgagtaagtccagcctagggcagcaccttcagttcttttatgcagaccttaccaaccccataagagttactcatttgtacaaccacacaagctcggagattacatctctgtattatgatctccaaggtcaccttattgccatggagttaagcagtggtgaagaatattatgtagcctgtgataatacaggtaccccactagctgtgttcagcagccgaggtcaggtcataaaggagatactatacacaccttatggcgatatctatcatgacacttaccctgactttcaggtcattattggttttcatggaggactctatgatttccttactaaattagtgcacctggggcaaagggattatgatgttgttgctggcagatggacaacgcctaatcatcacatatggaaacagttgaacctccttcctaaaccattcaacctctactcctttgaaaataactacccagttggcaaaattcaagatgttgcaaagtataccacaggtatttaaactatktaaaactttaagctaaacttgagtaactcagtactgttgattttatcacagaatctcaatgcctttgtaaatatgcttcctcttcctgacagttagcccgcaagttattgtgcatttgctgtcttccttagttttctagagtgagcaaaacgtgcatgttaacatataatacttttgcatcctactacattttttagctgtttctgtgttttactcttacaagcttatatgaataatttcgtaaaagaaaaattcaggattcttgtttcatcatataagctgatattataatccagggttatccacaaatcaacactctaccctgtagagagaggatcaggtgttttagtgtgggccatataaaggggagttttargctgggtgcggtggctcacacctgtaatcccagcattgggaggctgaggcaggcagatcacttgaggccaggagtttgagaccagcctggccaacatggtgaaaccccatctctactaaaaatacaaaaattagcacatgcctataatcccagctactcaggaaggaggctgaggcaggagaatcgcttgaacccaagargtggaggttgcagtgagccaagattgcaccactgtactccagcctgggcaacagagtgagactaygtcaaataaataaataaataaataaataaataaataaataaataggagttttattcctaacttctattgcctaaacagtttgaaggcaggagaggtatctttcaagttttcaacaaagcttataaagtatgggatttttcattttctttttttaatattgtgtctcacagacatcagaagttggttggagctatttggtttccaattacacaatgtactacctggatttcccaaacctgaattagaaaatttagaattaacttacgagcttctacggcttcagacaaaaactcaagagtgggatcctggaaaggttagtaaaagttttatcacctccttttagctgaaacaacagaagggcattcaatacccagaaattatatatacatatgtttgcttactgattttttagtcttcttgaatattcactaaaacgtgcacaattaatgagaaggtataaaaaaagctccatgagaaaaaagatcagagaattggagttttgggggaaaaaaaagattaacaggttacttgatgactgctgcaataggtacataagaggaaagaggaactgtactttaaaaattctgaaatgggctaccaagagcaattatggattctacctagagaaaattgttcggtaagagacacgaaaacatcagatttccaactgtaaaataatttaggggttgatgtcttaagagcatgggaataacagaataaaattattctgataaagaaaaaatacataaacacaatgaagcaaaaataataaatattacaagggtacagttttgagaaaaaataggaacatcaaaacatttaagattcagcagatgatatcaccagaagtatgaggtacaaatgaaaataaggagctttttctttcaactgaaagaaatatgaatatctgtgtttgcgaaaacaaaatgggcttgatagaataaaactgaaatttgggtgtgaggccttgaaatttaagtctaaaaaattataagggacaggaagttctagataggtcctataaattcatccctttttgtaaagatgtaaatgctttctgtaattaaaagtccttctaaaaarcatttagcaaaatgttgaaaattgctgaagcttcataatggatacttggaggttcattagtcttttctctttatttcttagtatgtttgaaaattgcccaaaaaaaaaggttttttttaagtccacataaaaagatcaatgaatttctggctgatttgccatagttaattataaggtcttaaactctttaaagtaggaactatgccttatgcatttctttgtgcctcactgtgcctaagtattactctacatgtagtaataacatctagtcagtgtgagtgaaatcagtgaaaataaaatgtctgtgttttgggagagctggaccaacttaaagtgccttccagctctgcaattctgtgatttcaagtttaaatgtatttccttatgcttaactccaccaagatataagaatgctaggtagtcacctgttagtcttttccaaatctctgatgaagagattccaaatctggcttatttttaaatcactcactgacaaattaaagagagaaggaagcaaacttgcaagcctgtcctttccacaatcaccaagtatctgacagatgtctaactccatgctgcatctgctctgtgcctctctttcctagactatcctgggcattcagtgtgaactccagaaacagctcaggaatttcatttccttggaccaactacctatgactccccgatacaatgatggacggtgccttgaaggagggaagcaaccaaggtttgctgctgtcccttctgtttttgggaaaggtataaaatttgccatcaaggatggcatagtaacagctgatattataggagtagccaatgaagatagcaggcggcttgctgccattctcaataatgcccattacctggaaaacctacattttaccatagaggggagggacactcactacttcattaagcttgggtctctggaggaagacctggtgctcatcggtaacactggggggaggcggattctggagaatggtgtcaatgtcactgtgtcccagatgacttctgtgttgaatgggaggactagacggtttgcagatattcagctccagcatggagccctgtgcttcaacatccggtatgggacaactgtcgaagaggaaaagaatcacgtgttggagattgccagacagcgcgcagtggcccaggcctggactaaggaacaaagaaggctgcaagagggggaagaggggattagggcatggacagaaggggaaaagcagcagcttttgagcactgggcgggtacaaggttacgatgggtattttgttttgtctgttgagcagtatttagaactttctgacagtgccartaatattcactttatgagacagagcgaaataggcaggaggtaacaaaaatatctctgcctttgcgtcaccaaagactgcctgtttttaaaacataaaatggtttattgtattggttttctagatcagaactctgtatatgtaaatatggaggaaaaacatatccaactgcctttcaatgtgacggaagatggtattttaatattgtttgtttaaactctttaagaaatgacagagatttttagttcttgtgtggcagtattcaaaataacacaagtagaactcaaacagctaaaaacagttttcagaaagcaccactttcaatttgccgagccatgcatatgttccaatatccagaaagaacccaaggttctctatctctattgtgagaagcagtttcatccttaactgttggcagaacttaygggctatttgaataggtggtgcaatagtatctgaaacttgcctttcgaaagactgccagccctttgacgttttccagatctgttataggaaacttaaaaacaggtgtaaaatgtcttcagccaccatctcctagagtgaggacccaattgcccttccttcttgattattcctccttgcttgttaaagtaaatgccatattgttgtgctgtgttttggcgtgtggtggctgggttctgtctaccatgcttccctgtgggtgtggtaaccagactgtatagccgctatttgctcgtgtgtacatgataccaaagcagctggccagcgtgacctctctcacacgacctgttttgactcaattttttactaaaagttgttcagctgtattggtatcatgtaaacatagcttttattaacctgggtaggaatttctcatttatatataggatgtgttttggtcatagtttcacattagtgattcagtatctatacactgacccaatggttttgtgcacatgaacggtaatttacttaaaagtatgattctggtacaaaaacaaacaaaggctttagcaggcatacgtgtctgggatgccgatacatacattaactactactgcagaaattcataagagccaaaaccttaaaaaaatagacctggtacttaagtgaaagtactaaagggaagaccagaccaaacatcacagcagttgctgccacattgtttcagcccacttagatttatcyttcaaatgtacaattctgtattgaacatctcccagccatcttcaggaaatcgaatcaagtaaatcctttccaaccgaaaacatttcaactaactatagagaggcagactcatttttactaaaataatttatacagttagttattttcgttctccgtmcttacccatttatctttatttaatcgtctctactgcctaggaaaataactattttccaggacgggttatttgttctgcgatcatttaaaatttggagaaaggtcaggattagtgttaatatcagctgcagtttctcaatctctaggaatcctgcagtaaaacaagccccttggtgagctggaagatttgtgcccagtgacaaagagatagtttgtaaaatgctgtgtaattgtaagttaccacaaatgaaaatacatgacagcacaatgtggcccgtagaaaattcccctgagccagcttctgcactttcatcaccgaatctgaacatttgctatgtctgaaggcaaatttatgatggaatgttagtttggattctttccagatgctacctaaatgcagtgtggggtcattgccttgctttgcgatgacagtttctttgaaaatatgcaaagtcataagctcatgttaaggtttttcaagagtctgcctcctactacacaaaggaaagcaagggaaaggaaatgaccctggcaaacagtagggaagggtgtattcaaacatttcattttcaaaaccttcgggttagaataccacttacacatgtattctgagagacagaattcatgaggaactcatctctctttataactggaaacacaccagcttgatatattgctaatccatactaaaatcatattattgggttttttctgaatcaggcctgtattaatggtacagtatttattcagaatggaattctaaaattactaacaaacttgttgaaaatttgaatacctccacaccaacctaaaaatggaccttaagttcctagaacctctgatgttcttttaaattaatggaaaaataatttgtgaactgtatatagagagtgcattcataaatgtgattatgtattttatcacaaatccaaaatgtcaatattagagtctattttgcttatattttaagcaattatacgtttttgcaattcattgatgatgtatcattttcaaactgctttaaatatccattagaaacaaatatttgaagcttttacttaatagtgattaccttgaactgtgcatttctagtttgtaatacgtatttggttggttcgtgcctttagtttgttaaagttacatttgtattatattcaggaaatgcactttttattacttacagctgtggttttaatactgccttgaactattattattctttttacaactcctaaagcttgagggaggaaagaaaaaaaaaacaaaactactaatcagtagtaaatcgaagagaaacattttggcatttcttaagaagaagrtggagatattgagtatatcacttcctattcagctgaatagaaagaatgccttcattgacttgcagttctgcagtttaaattattgaaagaacaattcgtttgcatttcctgatgaaagtaaaagcatttttcagagaaacatatgaatttctcatacccagcagacagatggctgacactgcacagccacacaccattcgagtaagttaaagtgagagcatagtagttggactctcctatgaagaacattctgggctggaggcagggaatactccatggttgtttctttttcctacttaagcccattttgtttgtgcttttctgttttgttttgttttcactcttgcactacagtctagagatccaaatgaactgaaaagttcaaagtttaacacatttaaatatgtttacttttagttgtcattctaatcgttattgattagaagcatgactcctgaaggaaagggaaataaatctcaattcatactaacttgcaacaaaacacttttaccatataaataagtatatgatttatttttaacccaaaaaatgtataaaataagtgtgtcctttactgtcaatttatckagaagatctataatatatagactacatatatataatatatacaacatagccaaatgtatgaaaacttgacaatgtataatttggaattcacatgctacctatgtagacaggtatgaaattaagttataattttcatgagacattttcatcactgttgacacagtttcaagcattccatcatgttattttgactctwtttcttttttttttctttaaaaatatatttttaactagaccaggccccrctataatatcacttaagagagtcagggcaaagtttttgcatttatgaagatgtgttcatgtaagggtgattgtaatggagttcattggtaatagaagcaaaagtacagtaacgaagtattgaaaagaaaattttggagacattggagcatattatatatagcttgtggaaagacataaggctacagatggaatggaacattcctgttttcttgaagaaattcacatacacatagctgacctgactagtacttcagctcttccacagccttctataaaggttctttcttctgcaaagaaaacaaaacaaaacaaaacaaaacaaaaaaaacaaaaaaagcgcaaaaaacaaaaaaacaaaaaaaagcaaagtaaaatttaaaaatacagaaaacaaacaacaaaaaagaattcaaccataaatagtgactattattttcagtgtgtccttcatgtgaaagctattaaggaccaaatatactactgttcataagaagaaattactttctaaacagtaactgaaaatacttagagttaaacttgctgtggattttgtcttggcagttgtcatcttacattatttgtcaaaggaaatgtgtttggcagttaaaaatctttccttagatttagtggtggactttaacctcttaaataaatgttagtatatcagattgtgtccttgaaaaatattttacttgtatgaatcatgacaacgtctaaatctttactattcttctggcaaaagcatcagtaagaaagaaggcgaaaaagagaagtatagcctttatgtcagaaaaacattctttttagctgcttactttctcatgaaaagtaaagatgtttacagtgtatgccaagttttcagtttctgtataacaacaggtagaggttctaatcatattgaaaattgtgttataatggtctgagccatgttgctaggaaacaataggttccaattttgtattcctgctctcctgtgctgaaaagtgactggatactgtacaggttcatgttctctggctgcagttaaatggtcttttgcattttgctctggctttcaggccagaagcatgcatttttctacaagagcatcacaacaacatgctgtaaatatttaaagttaaacattatgtgttgatatttgaaagaaaagyactttgaatatttcatttttaaaaaataaaattgccaatgaaaaatgtgtcccattttatttatgcgccaaactgcattctcaaatcagtctggtcaccttagataggacaagtggctcactaacagggaacaataaaaccacaccatcttgaaaatgcaggtacagaaatcaaaaagtcactaatcctaggcagacagctcttcatttttatttttcatacaaataggatctctgacacaagtgaccatttaataaacaaagaagagtagctgctgcaaatttaaatgcctctaggctgtgacttcctttaaaaaggcttccctctccttttggtgcctttctcagcaatagaaagaaaataaaaaattataaaaacggggtgggagagatatataggagttcagggtgtccaaatgcactggcaaaaataatggatgttggggcagcagccagtggggaagggtgtcagggaggggaggcaatcatgaaacactaaaaaaatcctatgcaattacaattgccatttggcacttgtttttcacaagaagacatttacaagtgacgctgggaaatctggccaacagatcttcaaaaattcatcttgatactcgcggagcacatgtagtccaaacaacccattactgaaacttggaatcctgcaatttacaccacttcaaaatgccctgctgcttttttatgtgtgtgtgtgtgtgtgtgtgtgtckgtgtgtgtgtgtgtgtgtatatakatayatatatatatatatatakagagagagagagagagagagagagagagagagagtgaaaagactcatggagcagaagacaaccttgatcatctcaacacaacccatcagtaaaaaacaatgggggtagggggttgttagtatcaatcatctggaaatttttttcaaaatatgcatcccacctcacactcagggtattttttaaaagggcaggagctcctatagagagagaattataataggagacgtttgtatattccttccctattcaccctcccttttagagatctgtgactatcagtcaatgttatttaaacattcagtaatattactaccttaaagttatacatatatgtaattacgcacacacatatatgtaaattattgtaccttaataatcttgtgaggttagtacgacttaattattcctacttggcaaatgcagtaacagtaacagactgacttacctaaggtcacgtggataatcagtgacaaagatgaaaaacagtgggagttgaacaatgagaacacatagacacagggaggggaacatcacacactggggcctgtcaggcggtgggcggcaaggggagggagagcattgggacaaatacctaatgcgtgcagagcttaaaacttagatgacgggttgatggtgcagcaaaccaccatggcacatgtaacctatgtaacaaatctgcacattcagcgcatgca
